United States Patent Application Publication US 2008/0039413 A1 - sequence listing, part 13

SEQ ID NO: 1603 - DNA, 50707 bp, Homo sapiens
gggctggtcgtggtggctcacacctgtaatcccaacacttcagggggccgaagcgggtagatcacctgaggtcaggagttcgagaccagcctagccaacatggtgaaactgcatctctactaaaaagacaaaaattagccaggcatggtggcagtcacctgtagtcccagctactcgggaggctgaggcaggataattgcttgaacctgggaggcagaggttgtagtgagccgagttcgtatcactgcactccaatctgggtaacagagtgagaccttgtttcaaaaaaaaaaagattagtgatcagcactgatgggggtgagaggtgggagcggggaggtgggtagagaccaaaggagatgataagaaagaaaacagaggccagatgtagtggctcatgcctgtaatcctagcactttgagaggccaagaccttgaggtcaggagtttgagaccagcatggccaacatgatgatgaaaccctgtctttactacaaatccaaaagttagccaggcttggtggtgcacgcgtgtaatcccagctacttgggaggctaaggcaggagaattgcttgaacccaggaggtggaggttgcagtaagtcgagattgtgccactgtactccagcctgggtgatagagaaagactccatctaaaaaaaaaaattaaattaaaaaagaaagaaaaaagagaaggtttgagaatgactttaggagggcctgcagctagaaggagcaggtgagttataatctgatcatctctggtcaccatagaaaccagctgtaaattcagccagaatgagctgatgagctccaatatctatgcctctctgccagtgtagacagtccacactcccttcctccaagatctagtcttgtcagacctgcttccagccggaatccaccccagtcctcttcctctcaagcctcttgttcctctttctagccacagttccaggtgactgcccatcaataccaaccccgctgggagagacaggcagcaagatacccagtccttgcccaggaggaagtcacattctagccagggagtagactacactggagagaaatggcccaaggatacacagcaaaagcttgtttaaagaaaaaacaaaagcaggtgtgacctggcttgtctgcccgcatctttctgtcctttccagggtaaagcaactctctcttaatccagaatgtaattacattgattgggaaagcattcagtctttcagacaagccacatgctggcagtaagcattgaatacaaatgcagggtttgcagtgactggaagttagagcctgcttgcaggtagcatgcaaatgtgttcaaaatgtccccaactttgggagaaaaggctggaagtctggatcaaactcgtatgcaaaccatgaggagtgcttttgaaggcacagcgggctaagggctttctccataccccctatcttgtgggctctggtcttacagcagctgtagtaattctccccagcagggcttgcactgcacttccacatctgtcctctctctacacaagctatgaatgtcatttccattttacagataggaaagtggggctctgagtgcttcagtgacccaaacattgtcaccttgcttaaagtggcaaacccagccagagccctcctctcgcttttccctagttagggacaacttgcgtaggtgtccttgcatgtctgaagattctgcattcttagggatacatgaagaaactcctatgtcctcccaccaccccattcacacttgaggattctgtggcaggtgcgcacttaacagtaaaattccttcctttgctaaaaatttgctgaattcgctccctttcatgatctgtaactttacataagctgttgtcttttatcagctttaacagatcaaatgtgagcaatcgtctgggtgtggtggctcacgcctgtaatcccagcactttgggagactgaggtgggtggatcacctgaggtcaggagttcaagaccagcctggccaacatggtgaaaccccgtctctactaaaaatacaaaaattagctggtggcgggtgactgtaatcccagctactcaggaggctgaggcaggagaattgcttgaacccgagaggtggaggttgcagtgagccgagattgccccactgcactccagcctgggcaacagagaaagacttcctctcaaaaaaaaaaaaaaaaaagtgagcaatcaggagacaattgttcttctgatggctgaggtcaccatacaaccaaggctgactgacgtttcactttctaaagactcagaaaaggaaggagaaccgtgtcccacctcaccctagcccttgtcttcactgactgcaggccgcagccaccagttggtttctctgggctgtgtcctcaaagataccaggaatgcagaagggtggagatacaggccaagtgttaacatttgtgctggtttgcagatatagtattttacccaggaaatcagggcttacaaaaatatgaggcaaatttttatccaacgtacaggttaagttctatccctaaattccatcaaataataatctgatgtgtgaaaattagtaattcaaaatttactacgctgttggaactttaacatatattgagccttaagggaatatgattatgaggcctgggtcacatgacaggcagctgtaacctctgtttctccgattagattagcttttttccttacctacattgttttgtaaaatgtaaatgactgaagggtgccaaggaagacccccttgcttcactgttgatcttcattacagattaacttttttttttttgagaccaagtctcgccctattgcccaggctggagtgcagtggtgcgatctcagctcactgcaacctccgcccctgggtccaagtgattctcatgtttcagcctcccaagtagctgggattacaggcacccgccaccatgcctggctaatttttgtattttttagcagagacaaagtttcaccatgttggccaggctggtctcaaactcctgacctcaagtgatccacccaccttggcctcccaaagtgctgggattacaggcgtgagccaccgtgcccggccattacagattaactttctatacaaagacttcatgactatcacgttgtctaagatgggatgttaaatacactcctctcaattggaaaggaaataaaaagttgtaaagaaaacaagctctatggaaaagaaaaactaactgttgtaactcataaacaagcctgttgcagaaaatgttataatcctactaaatgtatttgtttcctgcctatataagctaaaccttaacttttttggttttcccccaagccgaccaggatgagaaagaccttaactttcaactttggagcactggccccatttctctggtgcctgtgtttctcaggtggttactcccagcttttcacttgcataaactatttaaaattgaattctgaaccttttgattatttcaggtggatagatagattttgcaaagcctatgcatgtacatattcaccctaattctgttaccggaaaggggtcccaatccagaccccaagagagggtttttggatctcgagcaagacacaagaattcaaggtgaagccacagagtaaagtgaaagcaagtttattaagaaagtaaaagaataaaagaaaggctaatccataggcagagcagtggcatgggctgcttgactgagtatacttatagttatttcttgattatatgctaaacaaagggtggattattcatgaactttccaggaaaggggcggggatttcctggaagtgagtgttcctccccctttctgaccataggtcactcttgttgccatcttggttttggtgggttttggccggcttctttactgcatcctgtttcatcagcaaggtctttgtgacctgtatctcatgccaacctcctgactcatcctgtaactaagaatgcttaacctcctgggaatgcagcctagtaggtctcagtcttattttacccagcccctattcaagatagagttgctctcgttcaaatgcttctgacgattcctctgtatttttttcagaattcctgtctctttgggccctgataccttagcctggggctcactgctacctggaagcactaatgcaatcctagttttctcccctaaagcccattctagccaggtggcagggacgtggagcctcactgtaggtcacaccctggcgtgaagggctgatcagccaccccatggtgtccacatggttgtctctgcctggggtgaccctgctttctgcacctggagcaatcctgctcctccttcaagtccctactcaggtctcctctgaattccagttctacagggctactgtgaaaaccaaggccacagaggtcaagcttcaggcacaggcctgacacagggcacctggtccaggacagctctgattgtcactgttgtcccctctccttgcccactcccttaggtaatccatccctccctcaaccccctctgtctcttacacattctcacattgctgcatggttaatgcagtgttgacccctctcctccaatgaatctcaaattccttaagggcagtgaccttgtcttgcttccttaggaccccatatctggctctaggccttaaacttagtggactccacggatatttgccaataaactctgtctcctgggatccacagacagcagtttgatgaatggtcaggacattgtgataaattaaaattcattgtttgatgtggctatcgacacagacagagactgtgctgctagtgacatcatgtcggtctggtaattaataatgatcattagtaacgtttacttcaggacagtgcccttggcctggacgtgtggggaaaatggtccagagcctcaccgactgagtcactgtgccctgtaggaacggcctctgatagggatgagtgcctgctgctgtgggctgccccagtctgccccttgggacagaagctgtgttttattcatcctacatctcaataaacattttttgataaatcaatgaactcctttgaaatcacacaaaactagaggtgttgttggagacaagcggttcagaagagaccaggcattgtggctcaagcctgtaatccctgcactttgagaggccaaggtgggtggatcacctgaggtcaggagtttgagaccagcctggccaacacagtaaaaccctgtctctactaaaaatacaaaaattagctgggtgtggtggtgtacgcctgtactcccagctacttgggagggtgaggcaggagaagcctgggcaacagagcaagactccatctcaaaaaaaaaaaagttcagaagaaacctcttctgggtcttccaactccgcactgactgaaaggagaagaggctccaattaaagaaaattctagaacattctgtgggtcccaggcttgttccacactcacacctctgcaccgctgtacatgccatgtccatctgcaagaaagcccttctgctgtctatctggggacctcctatgttttttccaggatcccacttatacaccttctccagcaggtcttcctgcaataagggagtctggtgcagccccttgagagttctgcgtccactctggcctttttcacaagttcgaggctgtcttagggcaagtaggaggagttggcagacaggtcctatctctgtacctcttgttgatctatttgtttaatttaaaaaatttgtgtgtgtgtgagatagggtcttgctctgttgcccaggctgaagtgcaggggcatgaccacggtttactgcagcctcaaagtcctgtgctcaagcaatcctcctgcctcagcttctccagtaactgggctcacaggcccgcactaccacccctgactaatttttaagtgtttttgtagagatgagggtctggctatgttgcccaagctgctctcaaattcctgggattaggaggcctcagcctcccaaagtgctaggataacaggtgtgagccaccacacgggccacctcctgttcatctaaaatgaagttgctagccatctgggcgtggtggcttacacctgtaatcccaacactttgggaggccaaggtgggtggatcacttgaggtcaggagttcaagaccagcctggccaacacggtgaaaccccatctcgactataaatacaaaaaatgtagctgggcatggtggtgctcacctgtaatcccagctactcgggaggctgaggcaggggaattgcttgaacctgggaggcagaagttgtagtgagccaagaatgtgccactgcactccagactggacgacagagcaccacttcatcttaaaaaaaacaagaaggtgccaaggcacaaaatataagttaaacagtttacttgagccaaaatgaggacagctgcccaaaagactcagacgcaagtaatcttggatgtgagctcccttctctctttgttacaaacaggtttttaaaggcagaaaaaggaggacagggagtgggctgatacaaagttgtttgtcagaaattctcattggtttacagaaataacattgattagtgattggctgtacagtgctataggatgtaagatatggtgtccagtgcagcattgttaggttatagctacctgtggcaatagcaagcagtttcaagacataaatacataactcaaagtgggagtaggacgtgattgctgtcttattttaatgtctctctgggcctgataacttacaggactcgcattcctcaggtaaaagttcttttctcaccacagaaacaagatctgcagcataggggaagtgtgttggctcggtctgaagtcgttttccaaagtgtcagagacatttaaatcagagcaactccatcttgaacaggggctgggtaaaacgaggctgagacctactgggctgcattcccaggaggttaggcattctaagtcacaggtcgagataggaagtgggcacaaggtacaggtcacaaagaccttgctgataaaacaggatgcagtaaagaagccggccaaaacccaccaaaaccaagatggcgacaaaagtgacctctggtttttctcactgcttgttatacactatttataatgcattagcatgctaaaagacactcgcaccagcgcgcgacagtttacagatgccatggtagcaactggaagttaacctacatggtctaaaaaggggaggaacacttagttctggcaattgcccacccctttcccagaaaactcatgaataatccaccccttgtttggcatataatccagaaatatccataaaaataaccaatcagcagccctcggggctgctctgccaatggagtagccattctttatcctttactttcttaataaacttgttttcactttatggattccccgcaaggtgccaggtccaagaaccctctcttgaggtctggatcagaacccctttctggtaacaaaaggatcttgtcgctggcgtgacagggcatgggtgcagactagagcactgggaaaggcatattaggagcagttttttcttttctttttctttctttttttttttttttttgagatggagttttcgcgcttgttgcccaggctggagtgcaatggctcgatcttggctcactgcaacttccatctcccaggttcaagcgattctcctgcctcagcctccggagtagctgagattacaagcatgcacccccacacctggctaattttttgtattttagtagagatggggtttcaccatgttggtcaggctgatcttgaattccgacctcaggtgatccacctgcctcagcctcccaaagtgctgggattacaggtgcgagccaccgcgcctggccttttttttttctttttttaagacagggtgtcactttgccacccaggccggagtatagtggcatgatctcagttcattgcaacctccacctccagggactcaagcgatcctcctacttagcctcctgagtagctgggattatgggtacttgtcatgacactcagctaatttttgcatttttagtagagactgagttttgccatgttgcccaggcttgtctggaaatcctgagctcaagcaatcagcccgcttcagcctcccaaagtgctaggattataggtgtgaaccaccacacccagccaagagtaggattttaaacaccagaaccccttgaggactaagctctgattttttttaccttgcccaaattcctacctaagaggtctggagagtcatgccctacaaaccataaattctcatcagatgggttttatttaaccctatatatcatgacttactttccaatctgactctggcataatattatgtgactaagaagaaagtcaaaagattttaccccaaaacatttttctttgccatatcttgaaatggccctgcaaatctgtcttttgtgggggaaaatttgcatctgtaaagaatctctattaccggccgggcgtggcggatcacgcctgtaatcccagcactttgggaggccgaggcaggtggatcaggagttcaagaccagcctggccaacatggtgagaccccccccatctctactagaaatacaaaatttagccaggcgtggtggcaggcacctgtagtcccagctacttgggaggctgaggcagagaactgattgaatccgggaggtggaggttgcagtgagccgagatcgcaccactgcactccagcctgggcgacagagcaagactccgtctcaaaaaaaaacaaaaatctctattaacatagatagatatttttcccgtttcctgccccaccctctcccctcctcccggctttgagttgtcctacctttctggaccaaaccaatgtatttcttaaatgtatttgattgatgtctcgtgtctttctaaaatgctgcgccccgaccactttgggcacatgttctcaggacctcctgagggctgtgtcacgggccatggtcacaaatatttggctcagaataaatcccttcaaatattttagagtgtgactcttcgtcaacaccctcttcaaacaaacctagggatggtctttctgcctggatgcctcagctgcgaccagaaagtccacaaaggagcagtgaagcagggcttggtgcagaggccatgcggaaggcacggatttttggagactggagaacccaagcgcaaatccctaccccactgctcaccagcaggttcttaagcaaatcactctgcttcgctgaatttactgtcctcagctataaaatggtgtcctcggcaactggagctagatgccttcgccactttgctgaaagatatgaactgtgcccaaggtgggcggtatcagataggagccccgaagtggaaacgtccagcgtgggaatctcctctctacagggtccccaaggaactcccggcaggcccacttcagggctcctttctgacaccgcccagctcaacctctcaaaacgattcacaaaatgctgtaatagccacgatgcaccctcactgcactgtcccatccgccccttttacaaataggaagacccaaagataaaaataagaaaccaaggccaggcgcggtggttcacgcctgtaatcccaatactttgggatgcggaggagggcggatcacctgaggtcgggagttcgagaccagcctggccaacatggtgaagccctgtctctactaaaaatacaaaaaattagccgggcgtggtgaagggcgcctgtaatccgagctactcgggaggctgaagcaggagaatcgcttgaacccaggaggcggatattgcagtgagccgagatcatgccattgcactccagcctgggcgacagagtgagactccttctcaaaaaaatagaaaaaagaaacccaaaaaggcgggggagagtgaggaagaaaagaaaaaaaaaactggaaggcctgggccgtgatttgccagggccacggcgtggccaccaaagcgctccaggacgactcggcagagcgcgggcaccgtggctcaggcgcgctccccgggggcggggcgagcaggaggggtcacgtgacgcccggcccggaagcgctcgcgcaggagaccccgggtgacggggcccggcgccgctaactggagcgaaccccagcgtccgccgacatggcctggaccaagtaccagctgttcctggccgggctcatgcttgttaccggctccatcaacacgctctcggcaaagtgagtctgggccctgccgggcgtgcgggccctggcgaccccggcgctcgttctacgccttcccccttcttggccctgccctcctggcttcccctgctttcccacttgctccggtcagttcgcgcgcgttatgaccacccaagggatgcgaggcccggggaaatgcggagcggggctgcgccccggacggggggatccgagccccggctttgatttgctgtacagcctccgctcctgtttccacgtcttttaacaggagggttggccgattcctttccacggcccttccagtgctggcgtccaagcctgagcacctccctccacgagctgggagagacccctggacttgtgcacatgagccgcagtagtggctgtgcaggccgagtgacccagtgagcgtggaggcctcaagcggcagacagggaggtgccccacggcccctcaaggatgaggggttagagctgtgctttgaagcttaggtgggatttcggaatgtgtctgagactgtaagtcaaggaaagtctacggaaaggccagatcaaagtcgattgtaaccagcatcaaatgcccaggttagattttctctcataatcagaaaagtgcttttgagctggggaatgacatgttgaaagtgatatgattgactcaatgacatgaggagtggtttggtgcaggaaaaaccactccaaggctgctgcatagcagatgaggggaactaggaggtggcagtgagaagagaaaggaagggacaactggtggcagagaccaggtgtgaatggccacaggcctgacccacatgagcaagaaacaaggatcactccagggtttctgcctgggagaagaaaagtgccattaactcagacagagagggcaagtggccagttcagctctgatgtatgggggtgagaggggggacagttcccaggaggttagggactaaggacccagggcagtcatgagactgagggacagggcctagcctcccctctgttgtgggcaggatggcatttctttgtctctctctgtctccatctcagggcagggccttcctgcccctccttttcttgttgcccaggctggagtgcaatggcacgatcccatgtataaggtacctacggtgtgtaagggaaggggacagaagtgaccaagaggcgatctctgcctttgagatgcttggaatctgaggtggaggagacagacgtgtacgcacacgacagtcacagtgttctcccttccccaaacggtgggcacagtcagtggagtcctgggtgggccccacctgttcctctggttcacctctggccaactgtgccttgtggagaactactagcttcccaggccctgcatcctcctgaggatcactcctcatgctgaatccttagctgttcagaggccccagcctgagggctcccatctcaggatctgaacacagcaaagcaagtcttctgttctgtcatgccagccagggcctctgtcaagtgcttagagagcggttgtaagtccaccagggctgctgcccacaaggagaatccagattgccagttactgctggggtaaactgtgctgattcacctccttccttagaaaactccaaaccagtcaggtaggaagcttagagatcctcaatcccagaaggcgtcgcctttaaaggctgcctgagagtcaggaaagaggctcccaggtgacagacccaacttttggtcctgtcccctgcctgacagctggtgtggggcctctcaggatcctcccaccccaagatgggcccccaaattggaccctaaacagtgttctaaggtcaaaccacaagaagggatactcttagggagaaagaacatgtgggagcagctgcatgcaccccgatgtgaagtatggatttgaaatcacatttctggcccggcgcggtggcttacgcctgtcatcccagcactttgggaggcagaagcggctggatcacttgaggtcaggagtttgaaaccagcctgaccaatatggtgaaactgcatctctactaaaaatacaaaaattagctgggcgtggtagtgcgcacctgtagtcccagctacttgggaggctgagacaggagaattgcttgaacccgggaggcggaggttgcaatgagccaagattgcaccactgccctccaacctgggtgacagagtgagactcggtctcaaaaaaaaaataaaaggaaatcacatttttgacccacgatttccagcaggcacagacagacaagcatgtgctgacaactagcagaagcatctcatgcacaaagagcacctcgcatgccccaggccctgctctgccctttcatgtgtgaactcagggaattctcataaccaccctatcaggcaaagacaggggctgatattcctgtataaggaaactgaggtaggaaatgattaaattccttgcccaagttcaacttagctactaagtggcagagtttatagttgagccagcatggtctggctctagcatccatgctcttaaccaccactggagggtgtggctggggacttctccagtcattttggggtcatttagagttgttaaaagcatagaaatcatccagtctaatccccacaatttacaaaggaggcctcaggagaagtttctttctgtgattcaactgtttggtgtctgaatgaaggctggaacccaggcctcaggactttaagtcctgttcttttatgactgtgataccccagagtccctccttcctgggagtttcctctcacagctccccaggccaggacagagaagcctgtgcttgtggaagttgtaaacctgtaagtggcatctgcgctcccagcctttgatgtgcctctctccaggactgggctgccagcctctcagccagcccagagacactgctgacagggtcctcccgctggagtccaggccactcaaggttcagactgacagcctgtggttgtctctggcagtttcttggcctgtgacaagagtgatgtttcccttcccaggttcttgggaggatgaaaggcagtggatgaggaagcacatctgagcacgtgctgcctgctgtgctggggcggcaggtcagctttcctctctgcggccccatccctgggtcctggcagggggcccctccctgtgaagtggcttcttctttccctggctgttttctcaaaacctcctcactagcaccttctgtcgatcatcttctttaggccaagccatttctgtctacgtgagccagtgccccatccacaggtactcatttcagaaccccagtctcctgaatccaactgaggttctacatatgaagagccggggtcagctgggcactgtggctccagcttgtaatcccagactggaggctgaggtgggatgatcatttgagcccaggagttcaagatcagcctggacaacatagggagacctcgttctctacaaataataataataaataattaattaatagagccagggtcaagtagatgctcactaagtaaggctcagctcccctcctaagttctgcaggctgtagggccctcccagccaggcagggatatgagcctgacttcctttcatgcccaggccagggaccctgccaagaaggtggcaggaagcctggaaaccactaggcctctactagagaagaggtgtttgctcttcttctgtgtcctttctgtgccagctccaatgtttgcccttggcagctgccccaccacccttgggttccatgaactggcatgggataattgcttcaaaggggttgttgggccagcttgtggaagccttaactcaggaggacagtgtagtagagtgggaagttcatgaggcttgggacctgaggaatagatgagccactggacctctgtgagcctcagttttctcatctgtaaaatggacttggtgatccctgccgtaccttcttcctggacactgaagatctactgaggaaggtttccttttttttttttttttgagacggagtctggctctgtcatccaggctggagtgcagtggtgtgatctcagctcactgcaagctccgcctcccgggtgaacgcattctcatgcctcagcctcctgagtaactgggactacaggtgcctgccaccatgcccggataatttttttgtatttttttagtagagacagggtttcattgtgttagccaggatggtctcgatctcctgacctcgcccatctcggcctcccaaagtgctgggattacaggcatgagccactgtgcccagccttttttttttttttttttaagacacggtctctctctgttgcccaggctggagtgcaatggtgccatctaggctcactgcaaccttgagccatcctcccacctcagcctcccaagtagatgggaccacagacacccgccaccgtgcccacctaatttttgtattttttgtagagacagcgtcttgccatgtttcctaggctggtctcaaactcctgggctcaagcaatccacctgcctcagcctcccaaagtgttgggattacaggcatgcaccaccacacccagcttaaggaaagttttccattccatggagatgagagggctcaccattgtcacctcaggagccagggccacctgctgtggcaccccagagagtggagaagccttggcccttctgtaggtcccaggcaggagaaagaaggggactcactgggcttgacaagctggggacacaagaggaagtggcagagattctgtgggaatggccacagctaatctgcccaagccagccccatcgccacttcctcagtctgttttcgccacccccgttcacgtggacgtgcacacctcccagaatgctgagctttgagtttgggcctggccatgctagggagtgactcaccacccagcacggagagcctactccccagcctgcccgccaaaaggagcggcctcagcttgtccccgctaggacccttcgggcctcctgccctggaggtcatctcccctagaatacagtgtctgtggagaagacaggcccacctactgggctgcccctctcctcccaccagctaggggagcaagaactcagaggagagcttcagagcatcagggagggggcgcatgactgcctgctgagcttccagtgtactggccctgtttcaacatctgaggagccgtgagcccctcgagccctctctggcccctgggttcctgtctgtcaaataaggagttcagctgatggctgagtttcttctgtttcagcattttggctctgtgaactgcagggacaatagcctgaggtccctccagccacctctgcctcagccagcaggacaggttccagacgtttttccagtagctttcaggctgaaggggagctggggccacgctgaacccaagggggagatggcttctgctcagtgaagggaaaggagaaggggcagaaaatgagttttgctgaatacctgccatgtgccaggtcatgtatatatccttatatcatgtattgcttctgacagtttgtcagtgttggtatgattaccctgtaacttgtccagcctgtgggactcaaaactctgggttttctctgtattctgccttttctgagtataaattcaagcaaggtttaaccctggatctgccttaagcctcagagtccccatctaaaatgaggatccttgttgtaaggcttaacgggacagtccccatgaagtgtcctatgaattgtgcatttaaggaaacatgggctgggtgcagtggctcacacctgtaatcccagcacttcgggaggctgaggcaggtcaatctcttgaggccaggagttcgagactagcctgggcagcataaacaaggctgcatctttgcaaaaaatacaaaaattagccgggcatggtggcccatgcctgtagtcccagctactcaggaggctgaggtgagaggatcatatgagccttgggaggctgaggctgtagtgagccgtgattgtgccactgcactccagcctcagtgacagagtaataccctgtctgaaaaacaaaacaaaaaaacaaacgttgttggccggacgcagaggcttatacctgtaatccgatcactttgggagattgatacgggtggatcacttgaggtcaggagttcgagaccatcctggccaacatggtgaaactccgtctctacaaaaaatataaaaattagctgggcatggtggtgggtgcccgtaatcccagctacttgggaggttaaggcaggagaatcacttgaacctggaaagcagaggttgcagtgagccaagatcgcgctgctacactccagcctgggtgacagagggaggctccgtttcaaaaaaaaaaacaagaacaaaaacaaaagacaacaaacaacaaacgttgtgaagaactgacagcaaagtgctgcccaccttaggggtcactgctgtcatccccaggcaaactggggctggatttttgttctagcctgtgaggctggggtcttttctgattctgcgccaggagtcgaaacctgtctccaatccaggatgagaagcctggctttctgccccaaggtacctgcaggcctgagcatctcaggctgggcaaggcagcccatgctgctgacacccaatcccttgggctgtcagcctgccccaggccctcagatacaaagagataccatttccccagccgggagcgctgccagccaggcctgtctaggcagacctacccgtggagaaagcgaagacaacccctgtgggaggtggggagctcagcaccagccctacagtcagctccccaagaagcgccccagccttggggaaggacaggccccgaggggtttcccctatggaccaacttgttctaccagcagggggccctcagactcaggtgggaagtaggactcatggaaatgtggcctcagcttccatacctgccccctacagacaaaaataataataaaataaataataatccttgcctgaagcttctgatcaaccttcatggcctggcaatagctcccttgtccctcctagaggagacttggctcctggcctggggattcccatctctctgacttcacttgctctgggcagttggctctgtgcccttggtaaggcttgacctcttctctcttccttgctttgcctctgtttcactcagttgcctcatgcaggccttctcagggggctctttctgcaaaagcaagactgggttcgagagcagccctgctgggtctgtggcccttacccatgttccatgtcctgtcctggccagggatccaagagccaacagcatatcaggcagaaattaggcaccatgggtgcagtggctcatgcctataatctcagcaactcaggaggctgaggcgggaggattgcttgagcccaggagttcaagaccagccatggcaacatagtgagaccctctctctaaaaaaaaaaagagaaagaagtgagactccagcccatgaggtcaggtgtttcctgacctggggtggaggcttccccagctcccagactccctgttccatagcaggcgctttctttgccccactggtactggttacagcctggtccccaagccatgccaggctccaggtttctctctgccttctaaacagttctgtccgaacttctcccttcaactctcctttgcccctgccattcccaagaaccacaaggaatcttaactacccctctttctccacatctccaggagctggtggggtctctcactatggaataggtttgccatagccctgttttcttccgcaaactcagaggcatatagagaagccaaagctggacagggactttgtcaaacctagaccctaactgcggcacaaccagtggcacatgctctgggtgctgcgggggaggtacaggaaccagaggactcccccgccctttgggagctgaggctcgctacagagatgagccaatggcagtgcagggctgtgcactgcaatctgactgccctggaaagacatttcaaggaaaggcatttaataaaaagaagtcccgagtcttgcactttaaagacatccactgcctatgcaggatatgctgcagtgggagcaggtcggtggcccacaggaaacggctctgggactgtgttgacttcagtcagcacatgatgttactgatgcatttggagctgtgtcaacgaacccagggtgtcaacatgagggagggccacgccttgctagcctcagtctgggccagatcacatgctcttggctctgggcctgggtacaccagagtacttccagaagtcagtggccaggggtgaaaggttaggagaggctggagctgtttagccaggagatgagaagattcagaagaaggtcaacaagtccccagatacctaaagggctttcaaatgaaagattagacaagattccacagacctaaccaagcccagcaaagacgaaattcaagacagagaattttcatgcacagatggcagacagttcagagtgattggtggttaagctgcccaaagcactatgccacaaaggattctgggcttgtgtctaggctcatcggggaagtatgtcataatcagtcatcaccatctgccgggtgctgactgggaggtcatgccatgagtgtgatgtctttgccacctgcttgaaagtcagcattagaaagatcttccaaaccattcaggctttttgaaggtgagcaggtggtctgtattaagtcatttcccaggacccaaatactcctgtagaccagaggttcttgatatttttcatgccatgggactctttgacagtctggcacagcctatggacctcttcttacagtaatgttttaaaacgtgtaaataagaccaaggattgggccaggcacggtggctcacgcctgtaattccagcacgttgggaggctgaggagggtggttcacaaggtcaggagattgagaccatcctggctaacacggtgaaacaccgtctctactaaaaatacaaaaaaaaattagccaggcgtggtgtcgggcgcctgtagtcccagctgctcaggaggctgaggcaggagaatggcgtgaacccgggagacggagcttgcagtgagccgagatcttgccactgcactccagcctgggcgacagagcgagactccattaagaaaaaaaaaaaaaaaagaccaaggattacaaaagaagtcaattaaattgaaatacagttatcaaacacttaaaaaagcaaattcgtgatatagaatatatatagatatgctttttttttttttttctgagacaggatcttgctccatcacctaggctggagtgcagtggtgcaatatcggctcactgcagcctctgtcccccaggttcaagtgagtctcatgcctcagcctcctgagtagctgggattacaggcttgtaccaccacgcccggctaatttttgtatttttagtagagacggggtttcaccatgttggccaggcggtctcgaactccagacgtcaagtgatccacccacctcagcctcccaaagtgtcgggattacaggcgtgagccactgcgcccagctatatagaaatgctttctactacattgttataagtgggtctgactactgtaatgttcatgagtgatgagtgtaaatgatacctcacgatatatacaatgactgtaatgtgatcatgagagtatctgtgatttctgtgcattacagaggcacagacacagtgacttgaggaaatgccaagttaaaactccttgaggtgaagactgacccctttgagagggagccccactctggggccgggtcacccaggtctgggcctcttgacattgagaggtgtgagcctcttcactagcaccagggtaggatgctgacagggtctgaccttccctctctctcctacagatgggcggacaatttcatggccgagggctgtggagggagcaaggagcacagcttccagcatcccttcctccaggtatctggccctgtccctcctacctcctgtctcccgggcctcagaccaggcgccacccccggccatgaggccaggctgtttcctgacttaggagtggaggtgtctcctgctcccagaagagccatccacttctctctttccctccccagagcagaatccaaggtttagaatagggcaaagagcaccatcctctgcgaaagtcctggcaagtggtcatgtcctcaccacatccaagtcaggacacgtggaaaacatcagccctagtgacaaaagtcagctctctatccactgggagcccagaccccaattgggacagggcagacaccataaatggaagacactgttcgttgaactgagaatcaggagactcaaatgtcagccccagctctaccagcaacttgctttgtggccttacataagtctttgagcctctcttgggtctaggcttctccacctgcgatttgactaggggttggcctagatggatggttttcagacagggctctgcacagccttagggttcatcaggatgtatgggggctttggggcagacctaggaggctgtctctagcctccatggcagctctgcatttgtctattttacatattggggttctgggtaagctcttgtttgacaaaagtttgcattaaaaaaaatagttaaagatgatccccgagatcccttccagctctgaagtcctcgggttttcatccctgcaggcagtgggcatgttcctgggagaattctcctgcctggctgccttctacctcctccgatgcagagctgcagggcaatcagactccagcgtagacccccagcagcccttcaaccctcttcttttcctgcccccagcgctctgtgacatgacagggaccagcctcatgtatgtgggtgagtaaccaggccaggctgagaagggctcaggggaagctgtggctgaaggggctactggtgaaacagccctatcccacccacctccacttcatcccaccattcccccagacttcacacgcacaggcacacaggcaggactgatcgagcgcttactatgagcttggcatgtctatcaccaaagaccccttagtgacagatggccttcgccttgggaagctaactgtaatttgtttctcctttcctagctctgaacatgaccagtgcctccagcttccagatgctgcggggtgcagtgatcatattcactggcctgttctcggtggccttcctgggccggaggctggtgctgagccagtggctgggcatcctagccaccatcgcggggctggtggtcgtgggcctggctgacctcctgagcaagcacgacagtcagcacaagctcagcgaagtgatcacaggtgcggccaggggcagggacacggggctgccctatcctgccctgtcctccttgggagcccagcacagactcatacaagctctgccatgtgccatataccaagccctgggtgaggtgggtagctctggaggtgatggatagaatgtagggaagactgcaaagggatgtggctccaccaaggatgagtggcaggccgggcagggcgaggggctggcttgtcctttgatacagatgcagacatgcaaactactggatttgggagtggaaaggaacaggtgcttaccaagtgcccagcctggtgctgagcactgtgtgttcatcatcacagtgactcccacaggccccaaacggatgcatcacagcccattttacaatgaaatgactgtcctgggtcacttagggtcaggatcaaccaagaaatgtctatctcaaagcctgttgcttcttgaaagacctgcgtcataccccgtggggcagctcttagacacaggcaggcctctggggccttagcctggcactgctggcatgcccctcaggaaccagggaatcagggacaggcagtggtgactgtgcctatgaactatagggggccctgcagaggtcaggggctggcatgtttggtcgctgtggccatgctctcctggcccccagccccagtgcagccctgttctcatctgggtccctccttccccacaggggacctgttgatcatcatggcccagatcatcgttgccatccagatggtgctagaggagaagttcgtctacaaacacaatgtgcacccactgcgggcagttggcactgagggtgtgtgtgggcacaggggcctggaaggagtggggtagaagggagcctggggagctgagcacaggacaaggtgccagggttcacttgtggggggtgaacttcctgccccgccttgccttccagatgtgttttgacaagtcttctgacacctgctgtgtcaggaactagaggagaccaaggacagagatgaatgagatgcaagcccttcagaggaggtgaccagcaggaagaaagggcagtcagtgaattcaagtttggaccacttgtgctcaactgatgtctcattggccatgcctatctgagtctctcagggcagggagggtggcattcgagctgcaaatttcaacaggcagtagtaggagcagctccaaacagagcaaaggcacaggggactggatgtgaatttgaaaaccagtgaggaataattttgagtgtggccaggtgcggtggctcatacctgtaatcccagcacttttgagagaccaaagcgggtggatcacttgaggtcaggagtttgaaaccagcctgcccaacatggcaaaaccgtctctacaaaaaatacaaaaattagctgggcgtggtggcgcatgcctgtagtcccagctactcaggagactgagacaggagaatcgcctgaactgggggagcagaggctgcagcaagccgagattgcgccaccgcactccagcctgggcaacagaacgagactccatctcaaaaaataataatttgagtgcagtataggtttgatgttggggaaataatcaggaattaagtaggtcagggtcatgtcattagagaactttaccatcaggcaagtagatttagactttaaatgacggaggaatcactgaaagtttttgagcagggaagtaagtatcaaaattatgagattagcaagatacagctgcgctttcaaagaatggcctgggggctagtgcctgttggggagcagctcttgtctggcccccggtgagctaagggacttaggcagaatgtgaattagctatatcactgagcatgcagtctatttccactcatttctgttttctagcaagaccttaatgagtgaagcagtgcatggacttaccttctggcgcaagctccttgtcacagaccagtaacacactgaactagaaagctgtgtttttccaaacttgtgaaaataatgtagtcagttgcagctggcagttctttttttaaatgaatagaatttttaaatatcagagcattgtatactgtaagggtaatgtttttatgagtgtgtgtgtgtgtgtgtgtgtgtccatgaacctgtgcacacgtgtactgggtcacaatataaaatgtatttcttactcttgatccagtcaaaaaaaccctgagtaaaagtggagaagggacagctagaacccatctaataggccacaagctcctgatgagagactgagggacgtgaaaggagggagctggcatgaggaccactgggagggaatgacccgagatcagaggaggctaagccggtgggctgtgctgggggtctgggggaaggtggagagtgtaactgtttcctctactccccaggcctctttggctttgtgatcctctccctgctgctggtgcccatgtactacatccccgccggctccttcagcggaaaccctcgtgggacactggaggatgcattggacgccttctgccaggtgggccagcagccgctcattgccgtggcactgctgggcaacatcagcagcattgccttcttcaacttcgcaggcatcagcgtcaccaaggaactgagcgccaccacccgcatggtgttggacagcttgcgcaccgttgtcatctgggcactgagcctggcactgggctgggaggccttccatgcactgcagatccttggcttcctcatactccttataggcactgccctctacaatgggctacaccgtccgctgctgggccgcctgtccaggggccggcccctggcagaggagagcgagcaggagagactgctgggtggcacccgcactcccatcaatgatgccagctgaggttccctggaggcttctactgccacccgggtgctccttctccctgagactgaggccacacaggctggtgggccccgaatgccctatccccaaggcctcaccctgtcccctccctgcagaacccccagggcagctgctgccacagaagataacaacacccaagtcctctttttctcactaccacctgcagggtggtgttacccagcccccacaagcctgagtgcagtggcagacctcagctctctggacccctcctacagcactagagctaaatcatgaagttgaattgtaggaatttaccaccgtagtgtatctgaatcataaactagattatcatagttatctagtttatgagtcataagctagatttgattcttcaaagaagaaaagtcagtgagcaaatttaaaccagaactaagcattatattttctttttttttttttgagacagagtctcgctctgtcgcccaggctggagtgcagtggcacgatctcggcggctcactacaacctctgcctcccaggttcaaatgattctcctgcctcagcctcccgagtagctgggattacaggtgcataacacacctgggtaatttttatagagatggggtttcaccatgttggccaggctggtctcaaactcctgacctcaggtgatctgcctgcctcggcctcccaaagtgctgggattacaggcgtgagacaccacacccagccataactaagcattatgttttctaaaacttctaagatcctccctaaacccgtctggagacatgggttttagcccagactctgcctcaaactcattgtagctcccagcacattacccagttgctctgggccttggtgttatgctctgggaagtagatgttgatgctgtggccttagtgccttctggccccagcattccatgggcctgtgatcttgaccaacctgagaaaacagtaacagcccatccactggaaatacccctctgcccacagcaccacccttctgtgctgttttttttgttgtttgtttgtttcttctttttgagacagagtcttgctctgttgccacgctggagtgcagtggtgtgatctcggctcactgcaacctcccgctcccaggttcaagcaagtcccctgagtagctgggactacaggcgtgtgccaccacatccggctaattttttgcattctttaatagagacggggttttgccatgttggccaggatggtctcaatctcctgacctcatgatccacctgcctcagcctcccaaagtgctgggattacaggcatgagccaccacgcccagccttttttttttttttttttttttcttgagagacagggtcttgctctgtcacccaggcacagcttactgcagccttgaactcctgggatcaatcagtcctcctgcctcagcctcccgagtagctaagactaacaggtatgtaccaccatgcctggtttattgttttatttttttggcagagatgggtctcactgtgttgcccaggctgatctcaaactcctggcctcaagcgatcctcccatctcagcctcccaaagtgctgggattacagacctgagccaccacacctgggcaacagagtgaaacctgtccctgttttcctgctcttactctcacctctgaggcctcctctgcctggaagagattacagggaaattccaggcagcccttgtcaattgtttttatgaattctttacctgttccttttaaagacaaggaaactgaggcccaaagttctaagttgtttggcaaatggagtctcctaccctcagctcctgcaaggacctgggggacccccaggtccagcagccacatgattctgcagcagacagggacctagagcacatctggatctcagccccacccctggcaacctgcctgcctagagaactcccaagatgacagactaagtaggattctgccatttagaataattctggtatcctgggcgttgcgttaagttgcttaactttcattctgtcttacgatagtcttcagaggtgggaacagatgaagaaaccatgccccagagaaggttaagtgacttcctctttatggagccagtgttccaacctaggtttgcctgataccagacctgtggccccacctcccatgcaggtctctgtggggtctttgggatggatctcctagggctgggctggaagcctcatgtactgttgtcttctaggtaaccaccctgaagagaaggggtggcatcaggaaccgcagggaaccaagcagcctttggtccagtgctgctccttggaacagttgagtgtggcctcaaaccattctcctgggtagctcagtcataaaacaccgaatgcctgcctcaaaatagcctctgagggaagggagctgttgacaagtgaagccctcaggttgtgtgggattccagcaggttattacagcttgtggggggagggagggtccattccaccagctttgaatcccagggtcccctcagcttcactgggccacagtgtctgtcccaggaagaagcaaatggacagtgaggatgatggagagactacagctgccttgtctaaaacctgggatcttaaaagtgttattttggcttttattttttaaaaaaagaaaaggaaaattggcaattgtattaatccattctcgaattgctgtaaagaaatacctgagactgggtaatttaatttataaagaaaagaggtttaattggctcacagttctgcaggctatacaggaagcatagtagcttctgcttctggggaggcctcaggaaacttacaatcatagtggaaaggcaaaggggaagcagacacatcttatgtggccagagtaggagcaagggggcgcaggaggaggtgccacacacgttttaaacacccagatctcacaagaacactcaagaggacagtaccaagtggaatgctgttaaaccattcatgagaaatgcacccccatgatccagtcacctcccactaggccccacctccaagattggggattacatttcaatatgagatttgggtggggacacacatccaaactatatcagcagtactggacatttttcatgagagagaagggtcacaagaggatgtctggagctagcctctagaatgttggtgtggaaaatctctccaatgtttgaaaagcataccaattacctagtcctccattcattgttcaaatgaagaaacccaaaaagcagaagtaacttcccaagggtcacacagtcagttaacaggcaaaagccagatgtcctggttctcaatcctcgcctgtcccattctgccacagatactgcagccagaggccaggcatggtggctcacgcctgtaatcccagcactttgggaggccgaggtgggtggttcacctgaggtcagaagttcgagaccagcctggccagcatggcaaaaccctgtctctagtaaacatacaaaaattagctgggcatggtggcacaagcctgtaatctcagctactcaggaggctgaggcaggagaatcacttgaacccgggaggcagagtttgcagtgagccaagatcacgccactgcactccagcctgggcaacagtgagactcagtctcaaaaaagaaaaaaaagcttaaaaataaagatataaaccgggtgcggtggctcacgcctgtaatcccagcactttgggaggctgaggtgggtggatcacgaggtcaggagatcgagaccatcctggctaacacggtgaaaccccgtctctactaaaagtacaaaaaattagccgggcatggtggcgggggcctgtagtcccagctacttgggaggctgaggcaggagaatggtgtgaacctgggaggcggagcttgcagtgagccgagatcgggccactgcactctagcctgggcgacagagtgagactccgtctcaaaaaaaaaaaaaaaaaaaaaagatataaagaaaaaatgtttttgtatacttgcagtgtgtgttttaagctaagtgttattacaagagtcaaattttacagttcaaaagcttataaagttaaaacgttaccattaagctaagattaatttattattgaagaaggaaaatttttctttttagagacagagtcttgatctgttgctgtcactggggtgcagtggcatgatcctatctcactgtagccttaaactcctgggctcaagtgatcctcctgcctcagcctcccgagtagctggcactacaggcatgcaccaccgtgcccagctaattgtttttatttcctgcggagatggggtctcaccacgttgcccagactgatctcgaactactgggctcaaacaatgctcctgccttggccttccaaaattttaggattacaggggtgagccagtgtacccagcccattttttatactgtttttttactgtgccttttctaggttacatatgttagatacacaaataccattgcattacagttgcctacagtattcagtacaggaacatgctgcacaggtttgtcgcctaggagcaataggctataccatatagccaaggtgtgtgatacactataccatccaggtttgtgtaagtacactttatgattgcacaatgacaaaatcgtctaacaacacatttcgcagagcatatccccattgttaagcatgggaactgtataatgcctttattatatatacatgactatataataagggctatatgataagccagagttaccatggcaccacaaaatgttttttaaaaaatcagccaagtggcagggtgcggtggctcacgcctgtaatctcagcactttgggcgtggtggcacacgcctgtagtcctagctacttggaaggctgaggcaggggaatcgcttgaacccgggaggcagaggttgcagtgagtggtggtcgcaccactgcactccagcctggtgacaaagtaagactccatctcaaaaaaaaaaaaaaaaaaaattagccaagtgtgatggtacattcctgttagtcccagctactcaggaggctgaagtgggaggattgcatgagtccagcagttcaaggctgcagttagctgtgattgcaccactatactccagcctagacaatagtgcaagacccggttgtggggcggggttaatatatatatatatatatatacacacacacacacaacatagaatttaccattttaaccagttttaagtgtacagttcagtggcgttaagcacgttcacagtgttgtgcaaccatcaccaccatccatatccagaatttttcatcttctcaaactaaaactccccacctattaaatactaactccccattcctcccttactcactggcaaccaccattttactttctgtctctatgagttccgttattccaggtacctcatacagtatttgtccttttttttttttttttttggagacagagtcttgctctattgcccaggctggagtgcagtggcacaatctcagctcactgcaaccttcccctcctaggttcaagcaattctcctgcctcagcctcccgagtagctgggactacaggcccgtgccaccacgcccggctaattttttgtatttttagtagaagcgggttttcaccaggttagccgggatggtctcgatctcctgacctcatgatccactggcctcagcctcccaaagtgctgggattatacaggcatgagccaccacacccggccttgtcctttttttttttcttttttttttgagagaggtgccactctgtcgcccaggctggagtgcagtgccacaatcatggctcagttcagcctcaacctcctggactcgagcgattctcccacctcagcctcctgagtagctggggcgacaggcatacatctgcacgcccgggctaatttgtgtgtgtgtgtatctttggtagaggtggggtttctttcttccttctcctccttctccttccccttctcttttttttttttttttttttttgagacagagtctcactcttgtcgcctaggctggagtgccgtggcatgatttcggctcactgcaacctccgcctttcaggttcaagcaactctgcctcagcctcctgagtagctgggattacaggcgtgagccacagcacctggcaaatttttatatttttagtagagacggggtatcgccatgttggccatgctggtcttgaactcctgacctcgggtgatctgcctgcctcggcctcccagagtgctgggtttacaggcgtgagccaccacgctcggcaagatggagtttcgccatgttggccaggttggactcgaactcgaactcagtggttccgaacaacttggcctcccaaagcgctgggattacaggcatgaaccaccgcaccccagcccagcatttgtcccttggtggactgctttatttcacttagcataacgtcctcaaggttcatctatgttgcagcaggtgtcagaattcccttccttttaaaggctgaataacattgtggtatacaccccattttgtttatccgttcatctgttggtgtgtattcaggctgtttctgccttcgggctgttgtgaagaatgccgctatcaacatgggtgtgagaatatctgttcaagtccctggctatatttaaattcttttggatatttagccagaagtggaattactggatcatctggtaattctatttttgattttttgaggaaccaccaatactatttttcacagcagccgcagcattttacactcccaccagcaatgcacaagggttccatgaaatcactaattttataacatttttcctgattacatgttcactgtagaacatttagaaaatgcaagaaataaaatttagaaaattaaaattccccttattctacataccgggacatgacttgaatttttattatccccaacaaagggaagagagcatttttttgggacgattgcgttgctatagtgccgaggcctgccctgcccggaccttattctcaaagccccgccgatcccgccgtccccgcgaccccaagcgtcagcaaagtttatgcagttgaactggattctgagtatatctgtggatagttcctgggagagtcgcagatacgacatggggttgtcacattctctatgggtctgtttcctcatctttaaaagccatctctgcgttgctaaggcaaagcataaaatgtttgaggaaagcgacttttctagaaagcacgttctacaaacacaccatccacgttccaaactgagcttcggtgttttgactggagggcacctgaggacgtcagtacggtcccgcaaagaccagcaaccagattggcaagcagggggcaggagaatttcccgccccatctctttagttgtctattggttgattttaccatcagtctcccctgtcctcctatcatcgccgctatatttgtgtctcggtgcatactctcattggccctacctgcagtcgctctacgtaaggggcgttccagagtcagccactgggagtcgctggattcgggttttaaaaaacgccggccgtgaagtgggcggagcgagcgatttgaacgcgagcggcgcggacttctgccaagcaccggctcatgtgaggctcgcggcacagcgttctctgggctccccagaagccagcctttcgctcccggacccggcagcccgagcaggagccgtgggaccgggcgccagcaccctctgcggcgtgtcatgggcccgcgccgccggagccgaaagcccgaggccccgaggaggcgcagcccgagcccgaccccgacccccggcccctcccggcggggcccctccttaggtaaccggccgcggccccatctcgaagaggagaaaaccgaggctcgcaggcggagcccggatctcccgagtcccgatcccgtggcacttccctgttgggggacaacgcggttccgccgtccggcatccgctccgggcacgggcggtgccagccctgcgaggggctggagcaggcggttccgaaagcgggaagggaccggcttagccacttggctcctaacgccgtcttcttgttaggactagtggttacccagcgcccaccgcccaccgccaaccaggcattgcctcccactgttcgtgcgttatctcagcttcatattgtgcccattttacagctaatgagaaagccgaggcacaggccagagagcttgagcagagtcacacaacttggtgttctggcggacacgggatttccaatcctctgtgtttgtgcatttttaaattgcaaaagtattgactgctttcggtgacgatttcaaacaggagtcctcttaggaggtgtctttcaggggttttttttcccttccgggagaggctgttaggccttgaaccgaggccctctgcgctgctcactctgttgccttccagagcttgtgtccgggaaaaggggccgaagtctgtgtcttaattgtctatggtgggctggtggatgggagacccaacggcaggaggaggcagatgcctgtatggtacatggtggcaacagctgctttacttatctcttaactcttgctacgtagctatgaggaagatgggaagtgtattgtagtttatttgtttcattgctttttgtagagactgggtctccctgtgttacccaggctggtctcaaactcctggcctcaagtgatcctcctgcctgggcctcccaaagtgctgggattgcaggcatgagccactgtgcctacaggcttttttgggttttttgttttgttttggagacggagtcaggctttgtcgcccaggctggagtgcagtggcgcgatctccgctcacggcaagctccgcctcctgggttcacgcccttctcctgcctcagcctcccgagtagctgggactacaggcgcctaccaccacgcccggctaattttttgtatttttggtagagacagggtttcaccgtgttagccaggatggtcttgatctcctgacctcgtgatccgcccacctcggtctcccaaagtgctgggattacaggcgtgagccaccgcgcccggccggctttttggttttttgttgttttttttttgagacccatcgcccaggttggagtgcagtgatgccacgagggttcactgcagcctcaacttcccaggctcaggtgcttctcccagctcagcctcccgagtagctgggactacaggcatatgccaccatgccggctaattttttgtatttttagtagaggtgggattttgccatgttgcctaggctggagtaggttgtttctagatgttgctgttgcgaatgggattttttttctttcccaaaacacgaggatttaacctttgcttccagccaacttgctgaattctcgttcaccctagtcgtttttagttgctccagttggaatttttaagtagactattatgtcatctgcaaataacttttgaatcttccgttttcatttctacacattttatttattattgtatggtactagtaaggccctgagactcactaagagtggtgttttggtcatctttgtcttgtttgtaattttaacaggaatattaagtatgatgtttgctgttgctttccaaggtagaagcatccttctactcctggttaaatggaaggtttatctcaaatgggcagtcaacacttcttggcagtcctaccacctttgtctggtattctttcttcaattttcgagacagagtctcactcttgtcatccaggctgtagtgcagtggtgctatcttggttcattgcagccttgacctcctgggctcatgcagtcctcctgcttcaccctcctgaatagctaggatgacagacctgcaccaccatgcttgactatttttaaaccttttttgtagagacaaattgttttgtctctacagaacaaaaaaaaaacagccatcgtgcctggcctttgtctggaattcttgcttttccattctccccatgactatttcatacctttttctccctcctcgacttcctacagctccattccccccactcactcttagccaataatggccttgactaggtgtcccccttcctatcaaagcccttccttctacatggggtcttggtcatatccttctttcacctacagaggagctttctacctgtgcttagataaatccagacacttcacactggcatcggcacatatgctctagtatttatgatgttttgttttgttttgtttttgtttttgtttttgagacggagtttccctcttgttgcccaggctggagagcaacggcgtgatctcggcttaccgcaacctctacctcccgggttcaagcgattctcctgcctcagcctcccgagtagctaggattacaggcatgcaccaccgcatccggctaattttgtgtttttagtagagacggggtttcaccatgttggtcaggctggtctccaactgccaacctcaagtgatccgcccaccttggcctcccagagtgctgggattacaggcctgagccgctgcgcctggccgtatttacgatcttaagagaaagggcaggagtgtttccttgaccccacattctcacttccctatacctcccatttccctctacttcccttcatagctgtccttttaaaatagccagacttgttaggtccacatacattgcatctgattcctcccttcctagtgaccctacaacccactccaatctgactccccacaaccactacccccacttctaatctgcttgaactactcctgtcagggtcactagcaccttttgtagtgccaaatccagtaggtgggtctgtgttcttactgtgtctcagaagcatttgacgcagtgggcctctttctccttgaagcgttctgttcccttggcttccatgccactgtgcactctggcagttctgcttggtgttctctactgcctgtgctgcctccctcggctccttgatgttggacttccttgacatccttttcctttctaccccctccctaggtggtctcatctcctccgtggctctaaatcccactcatacattgacagctctcaaatatctgtatacctggatctctcctctgaccccagatacctatatctaactgcctttctacctgaaggctcttggttatgttaaacttaacacacccaaaactgaacttctggttactcccctccagccccttcatcctcagcttccccatttcagtaaatggcacaactacccacccagttgttcaaaccacaagcctgggagacccccgtctccaatacaaatgcaggtccagataattctacttccaaactgcatccttaatcactccattttcaccatctctgctcccactagcctagtccaagctaccagcagctctcgagcaactgtgagagcctcctaatcagctgccactccacttccactctgtccctttctacttctttccttacacagcagctggaatgaccttccacatctctatcctgcataaaactcttccctggcttcttattacagtaggattaaattccatctcctcatgttggcatttcaagacccagctactaaatttttgatcccagttcttttccatgatctctctaattggttacttttcataaccacttgttcttgggtcatggatttcatatctctgttacctctctgagttcattaaccatttttctctcaaagtttctatttcttttctctattaactcaatttcctctggtattggttattttgtttgttgagtttggttcctttctttcatggtattggccttcttaaattgttgggtgatctttagttgtgttcatcttcaaattttctgtgaatgctatgtcttgtttatttttttattttattttatttatttatatatttttgtttgagacacagtctcattcttgttgcccaggctagagtacagtggtgcgagctcggctcactgcaacctccatctcctgggttcaagcaattctcctgcctcagcctcccaagtagctgggattacaggtgcctgccaccatgcccggctaatttttgtatttttagtagagatgggtttctccatgttcatcaggctggtctcgaactcctgacctcaggtgattgacccaccttggcctcccaaagtgctgggattacaggcgtgagccaccgcacccagccctatgtctgtttattaaagactgcctccagtgactggattgccaactggtggtggggagggagggaggtgtcagtagtttttctcctgggcatgggtcttcccagttttaaatgttatcagtcttctggacactgccctgtttcattggcctgtgttctctagcctcacccagggatggtctcctctgctggctgcctggcacaggccatctctggattgtctcacctaccctacttgctcttgcagctcttctaacacttcgtgattagtttattgtattaaatgccttctatcgaacttggtgtagagtctctttgcttggctggatcctgaataacatttctgaaacaattttatccgtcaacatgttatttttgtattttgtttgttcaacttatcagatgttcactcatcttgatccttggttgtaattatggagcaactgtgctgttttttctttaactttattttcactaacttattttctaatatttcttttgttctatcttgttttggtttactttaataactctgtaatacttaatttgactgcttggctcagataccttttagtgttcttgttttctaataggaacactttaaggctatgcattttcctctagtactattttggctgtatctcataagttttgggatatgggctttttattgttattcatttccaaatagtctaatttcaattaagtttcctcttcaacacaggttagttagaagaaactggtttttgattcatgagtttttaatttccaattagagaatttggcttttttgattcctacttttgggaatgtttttaaaattattttcttttttgttcttgttggaaccaggatttgagccaaaggctctgtctccacagcccaggtgcctgacactgacactgagttaggccacaccttacacaggtctcagcttggccactaatgagggctggccaaccatcttcacctcgctgggcctcaggatgatcaagacaagggaattgtactagtctctcagattctttccagctgtaaaaaacaaaccaacaaaaaatctaaaaccaaaataactgagcttccaatctaggtgggaaagatctaagacttgtacaaagtcctgcaaagcccagaggagggcggtcacccatctgtttggaaggatcaggattcgggaaagacttcatggaagagttagcatttaaaatcaactgcagaggatcattcactcattcatttaacaaatgtttatttagcacctatctgctattttctaattgctgaagatagcagcaaaattactatatatcaggttggtgcaaaagtattgtggtttttgccataactgcaatgacttttgcagcaacctaataaaacagacaaaaatccctgctctgtggagggtaggcacatagatatagtctagcaatttgacagcttacctgactcagccaagctgcgaggcaccacctattttccactgaacttacctttcttttgctcaggcgcttcctcccatcaacacagtcggcggagacaaggttggctaaaggagatccgaaagcttcagaagagcacacacctcttgataaggaagctgcccttcagccgcctggtaagctccgggagcttcccaccaacccctatgccaccctcctttttttaaattttcccaggtattagggaccctactgtctcttaactaactggccaagggacctcttttgtaacctggtaggggattcttttctgaaaacatgagccctccaagagcaccttgtaattctttatggaattgatttctaacctctactacctttttaaaactgtagtttttgactgtataaataggaactctctcgtttgtccaccttagatcccttttcctatcctgggagattgcctctcatcacccaattactggtgatttccccatcaccagtaagagatccgccagttcctaagctcccaggagtcaacacctgctcctaattgggtcctaagattaagagccaggaaaaaataatggaaaggaagattcactggaactcatggagagcatcattgtcccttgaatctctcttctgttactccctactcctactcctccccttccccactccttcacaggcaagagaaatatgtgttaaattcactcgtggtgtggacttcaattggcaagcccaggccctattggccctacaagaggtaagaaggcaccaaggcacaattgggtgagggctgagtgggagaaagaggcagcctagaattctccagtgctgactggagtgtcacatgctgaatctgacctctggaaaagaacaatgaggtaacctctgagggtttggaggctggattctgcgtggtgatagcagaattccctggcaaagttcagtctcattctgtgaatagtttcctacaatcctttgagccctcagagattaagtttagcaggtttccaaaaaaaagcagcccatggcccttcatctgtgtccgtctttttctctttctgtctccaggcagcagaagcatttctagttcatctctttgaggacgcctatctcctcaccttacatgcaggccgagttactctcttcccaaaggatgtgcaactggcccggaggatccggggccttgaggagggactcggctgagctcctgcacccagtgtttctgtcagtctttcctgctcagccagggggtaagctcatcctctttcacaggactggggctggaatttctcaagtaatttcctttctccatccatagtcccttgtcacctcgccttccctttgttctctagtaaaggttgatctagttttgactgcctgggacaatgtggtttgtgcccttttgtgcaatgttagataaaagatatctttctattaaataataaccagatgaccctaatttcttttggttgttattgttgttgttttatttttataagacagggtctctgtcatcagtgttgccatcgtggctcactgcaactcctgccttggcctcccaaagtgttgagattacaagaatcagatgacctcattttgattaagagaaaactttctaataaactttctaataaaagagaacactttctaataaaaactttctcttttttgattaagagaaagttttcttacttttgaaaatggcttgttagtaagtgtgcttccttaatttcagggatgataccggggactctccagagccatgactagatccaatggattctgcgatgctgtctggactttgctgtctctgaacagtatgtgtgtgttgctttaaatatttttcttttttttgagaaggagaagactgcatgactttcctctgtaacagaggtaatatatgagacaatcaacaccgttccaaaggcctgaaaataattttcagataaagagactccaaggttgactttagtttgtgagttactcatgtgactatttgaggattttgaaaacatcagatttgctgtggtatgggagaaaaggttatgtacttattattttagctctttctgtaatatttacattttttaccatatgtacatttgtacttttattttacacataagggaaaaaataagaccactttgagcagttgcctggaaggctgggcatttccatcatatagacctctgcccttcagagtagcctcaccattagtggcagcatcatgtaactgagtggactgtgcttgtcaacggatgtgtagcttttcagaaacttaattggggatgaatagaaaacctgtaagctttgatgttctggttacttctagtaaattcctgtcaaaatcaattcagaaattctaacttggagaatttaacattttactcttgtaaatcatagaagatgtatcataacagttcagaattttaaagtacattttcgatgcttttatgggtatttttgtagtttctttgtagagagataataaaaatcaaaatatttaatgaaaatggacttactgttacagcatagagattatactgtactttttgtgtgttaaaaataagttctttatttgtttgcaaacagccacaattttttttttcttttttttttttttgagatggagtctttttttttattgatcattcttgggtgtttctcgcagagggggatttggcagggtcataggacaatagtggagggaaggtcagcagataaacaagtgaacaaaggtctctggttttccgaggcagaggaccctgcggccttccgcagtgtttgtgtccctgggtacttgagattagggagtggtgatgactcttaaggagcatgctgccttcaagcatctgtttaacaaagcacatcttgcaccgcccttaatccatttaaccctgagtggacacagcacatgtttcagagagcacagggttgggggtaaggtcacagatcaacaggatcccaaggcagaagaatttttcttagtacagaacaaaatgaaaagtttcccatgtctacttctttctacacagacacggcaaccatccgatttctcaatctttcccccacctttcccccctttctattccacaaaaccgccattgtcatcatggcccgttctcagtgagctgttgggtacacctcccagatggggtggtggctgggcagaggggctcctcacttcccagaaggggtggccgggcaggggtgcccctcacctcccggacggggcggctggccgggcggggggctgacccctcctcctccctcccggagggggcggctggccgggcagaggggctcctcacttcccagtaggggcggccgggcagaggcacccctcacctcccggacggggcgaacagccacaatttaaacaagataattaagggaggtggttttgcctctggtggagtagagtatgactagatgaaaaccttgcccttctgttgtaactgaaagcaatttaaaagatttccagagacatgggaagtgtcacccaaagatatgagatctgtatgtgatgaaaatgattagtgagggcagactactaataatgatgtgtcagtcaactgagttcagagacagattaaagagatgcaccaagttctattgtttaataattttttttttcccgagactctgtctgtcgcccaggctggagtgcagtagtgccatctcagctcactgcaagctccgcctcctgggttcaaatgattctcctgtctcagcctccctagtagctgggattacaggcatccaccatcatgcctggctaatttttgtatttttgtagagacagggtttcaccatgttggccaggctggtcttgaactcctgacctcaagtgatctgtgggcctcagcctcccaaagtgttgggattacaggcgtgagccactgtgcctggctgggtttttgttttatgtatttttttattattatttttttaatttttaatttaattttattttttgtaggggcaaggctttgccgtgttgcctaagctggtttcgaactcctgaactcaagcaatctgcttgactcagtctcccagagtgctgggattacaggtgtgagccaccaggcctggccatatttatttttgagagaaaggggggtctcgctctgtcacccaggctggaatgcagtggagcaatcatagctcgttgcagcctcaaactcctgggctcaagcaatcctcccacctcgccctcccaagtatcttgaactatagatgctcgccaccacgcccctgttttatttttttattttgtttttccctactttcagggtgatttcatcaacattcttttctaacctttcaattgaattttttatttctgatttcatgtttttaatatccaattaactccttattttggtaatgtttcttttttatagtattccaattagtcagcattcacttaaaaaaaaaaaaacagaaataactccagatattttaagcaaaaagggatttggtggaaggggttgactatagtaatgtcaggaaggctggttgagccaaagagaagaggatgctgcccaaagatcaggaagctcccagtgcccacccccactgctgctctgctggaagcatagccctgccaccattgcattgaactgtaccactgccgctgagcaaagtcaggatccccaactctgaccattgtatcatgcccggctggctctgcaatgtcattttgatgtgtcttcagtatggatttttttttttttttttttctgagtcagagtctcgctctgtcaccgaggctggagtgcagtggtgcgatctccaactttttcagttttctttgataggagagtggtcccaatgaccttttctaccattactggaagttgaagtttgatgtgtctcttgatattcccatactcatcattactttagtatgtacttattgccattaaaataaaacaaaaataacttaaatgtattcaacatcaaacataacacatgctgtcatatataacaatcaagactctcatttgcaagtttggggaccccaactcaaactgacttaagaggagaaggttcatataactgaaaagcccagagacatttctggtttcgctacagtcaaatcgaagggctgtaacaaagtcatgagatttggtctctctcttcaccctttgctgcttctgttagtgtcactttcaggcaggccttcagaacctgtaaatttggcatgtcacatggcaaaggggaattaagagtgctaatcagctgacattaaaatagggagatttagaagaaaaaaaggacaaagcaaaaaatggggagagtaccttggaattttgggtgggcccaatgtaatcacaagtgccattaaaaatggaagagtgagagagaagtgtgttagagataggagtaggagaatggtcaggcagatgcaacattgctggcattgaagatggagggagagatcacagactgacgagtctaggtggcttctagcagcgaagaggcaaggaagcggattttcttttagaaactccagagaagaaaacaggcctgccgataccttgatttttagcccagcgaaacttgtgtcagacttctaaactacagaactgtaagaataaatttgtgttttatctaagccactgagttgttgctaatttgttacagcagcaataggaaactaatacaagtggtttcccaaggaaatttgaggcttcttaacaggtaagagagaatgtagacagggcagacaaaaataacagatgtctactataccacatgtggtgttatgatagacattggttttcgtccacagttccgggctcataactgctatagccgttgttagttcttttgttgtaatattgggtatgtgttaggcctcaggaaacagaatctctccttctcctgccctcctttcacctgccccaagacaggcctctaatctttctcaggctttcagattgtgggtcttaagatcctacccagagaggttccctctataccctgggggaaagaatgcggaggtcctgaagcttccataaaaacccttgaggacggttcagggaggttcccgatacctgaactcggggaggttcctggagggtggcgccccccacaccccccaccccccacggagggcttagaagctctgtgtgcattccccatacctcaccccacgtgtctcttcatctgtttcctttttttatgtttttcatgcattttttttattttttatttttcatttttttttttttagacagagtctcactctgtcacccaggctggagtgcagtggcgcgatcttggctcactgcaacctccgcctcccaggttcaagcaattctcctgcctcagcctcccaagtagctgggattataggcgtgggccactacacccggctaatttttgtatttttagtagaggcggggtttcgccatgttggccaggctggtcttgaactcctgacctcaggtaatccgcctcagcctcccaaagtgctgggattacaggtgtgagccaccgcgcccagccatctgtatcctttgtaatattttttgtaacaaactggtaaatgtgtttccctgagctctgtgagccactccaccaaattaatcaaagagggggtcatgggaaccccaacttgaagccagtcctagaggcccagacttgtgaccggttttggtgggtgggcagtcttggggactgaaccctcaacgtgtgggatctgatgccatctctgggtagacagtgtcagaaatgaattagaggacacccagctggtgtccactgcttggtgtatggggaaatcacctccaacgtttggtcacagaaatcttctgcatggatgattgttgtgctgtgagagtgaggaaaaacatggttagagttctccctacataccatatgacgcactgtgtcacaattacaaatttttaaaagccagatggcacctactttttttttttttttttgccattactttcaatggcaacaaccgcaattacttttgcaccaacctagtaatatactttgagcagcattagagttttattctattttatattctttggatttattttaatgctgtttacaggaactgaaaagctccattctttttaaaagattttctaattaaagtataacatacataccaaaaacacaaatgtatacagattacaattttacagctcaattagttttcacaaactgaaatcaatgcatctcagaatcctgccccgttctagtcaatacttactctgccaaggataattgttatcctgttgtttttttatatagacggagctttgctcttgtcgcccaggctgggtggggtgtgtggcccaggctggggtgcagtggcgcaatctcggctcactgcaacctctgcctcccgggttcaagtgattctcctgcctcagcctcctgagtagccgagattacaggcacccaccaccacgtctggctaatttttgtatttttagtagagacggggtttcaccatgttggccaggctggtctcaaactcctgacctcaggtaatctacctggttcggcctcccaaagagctgggattacaggcgtgagccaccacgcccggcctatcctgacttttaataccatagattcattttgattattgtagtaagtggaattatagagcatatattcttttgtgtttttcagtcaacatgtttgtgaaatttatattttctcatgtgtttatggtgttaattcttactgctgcatagggtttcattgtgtggatatgcctaaattttttttttttttttttagtgaaagcaagtttattaagaaagtgaaagaataaagcatagctactctgtaggcagagcggcctatgcctaaatttgtatatttccattctattgaacatttggatagtttcaagtttgggggttacaaatattggctactgacttttgcctcaaaaacaaaaaaaaaagagacttggagatgcatttttttggggggtttgtttgtttgagacaggatcttactctgtcacccacgctagagggcattggtgtgatcacagttcactgcatcctcgacctccccaggctcaggtgatcttcccacctcagcttcccgagtagctgggaatataggagcacaccaccacacctggctaatttttttttttttttttttttttagacagagtctcactctgtcaccaggctggagtgcagtggcgcgatcttggctcactgcaacctccgcctcttaggttcaagcaattctcatgccttagcctcccaaatagctgggattacaggcacacgccaccacacccagctaatttttgtatttttagtagagacgggatttcaccatgttggccagaatggtcttgatctcctgacctcatgatctgcccgcctcgacctcccaaagtgctgggattacaggcgtgagccactgtgcctagccatttttgtatttattttagtggagatgggttttctccatgttgctcagactggtctcaaactcctgggctcaagtgatccactctcctcagcctcccacagtgctgggatttcaggtgtgagccattgcacccagcctgagaggcagttctttgtaaagtttttataaatgttctgaatgtgtgaaggaaattaatttccaatgcacaaatatatatatatatttgtgtatatatttaaatatatatatttaaaaattccgactgagcacctgtaatcctagcactttggaaggctgaggcaggaggattgcttgaggccaggattttgtgacaagaccagcctgggcagcagtaagcccctgtctctgtttgttgttgttgttgttgttgttgttttgagacagagtctcactctctcacccaggctggagtgcagcagcacgatctcggctcactgcaacctccaactcccaagttcaagcgattctcctgcctcagcctctcggaccctgtctctatttttttttaaataaagaaataaaaattctgtgtaacttcataaatctgtgttttgtgcacttttctgagaggagccatgatttccatgagatcctcaagtccaccctccatagatggttatgaacgccccttctaaaattctatgagttattctgcctccaacctcacattaatattctcagtaagtatattgcatatttttgcagatttttaagaaatgtgtaacaaagtcatttgacacatattttttgaatatttgcctcaattgcctcaattttccatcctgcaggacatccctccgcttgagtaacagagtaataataatgccttacactgatacaggttttcagtgtataatgctctttcagcactgatttgatgctctcaactgcagacaacacatcacttatacaagacagatttagagctcccaagacattgagtggattgaaaaaccaaattcatcttgaaggagcagccgaagcatttgaattgagaatttctcccctccctggcactgggccaatattgctacaccatgcgacagcagaagggtagaagtagattcctaattgtttctaggatcaatttaagttccctgcttttctgcaacctcttattacaaacctccaaatccacggccttacatgctgtttagagaagcctatttgtctgctgtatttaccagcagcctgcctgactcacttctatttggcctggcccaccaaatccagggggccccaaatcatccttgtttctccccaaaaatactcatcctctcccaagccccaaccagcacccttcagacaccactgggactcagcacatcttcggctgcttcactttactgatcactttttaaaaaggcattgctcatccgttcctgagagccctgaaatcctcggctgggctggagcccttggtgtctcctgccctgtgttctggcgtaggccgtggggagagcctgcttgagttgtgcacattcacaggaactctacagggctgtggtcctgggggacaaggctgtttccctccatgctcatggcagtggagttttctggagagaggagtggaggaggacagctgagtctcgtccagcagtgggctaagaggcagtgataagctccaagtggggaaaggaaagggctatggcaacttccgggatgacactaggtctaaggtactgggtctgaaagtgcttcatggacctttttttttttttttttttgagatgaagtcttgccctgtcgcccaggctggagttcagtggcgcaatctcactcactgcaacctccacctcccaggttcaagcaattctcctgcctcagcctcccgagtagctgggactacaggtgcccgccaccatgcccagctaatttttgtatttttagtagagactgggtttcaccatgttggccaggctggtcttgaacccctgacctcaagtgatccgacagcctcagtctcccaaagtgctgggattacaggtgtgaaccaccgtgcccggactacggaccattattttgtgtgttaaggttacaatggcccaagtaaggttttggtttttgtagagtcttttatgatagtttttgttatcaggcatttatgcataagaaccctctcttcatggtcttctggctttgtttatttgttttgttttttgagacggagtcttgctctgttgcaggctagaatgcagtggtgtgatctcggctcactgcaacttctgcctcccaggttcaagtgattctcctgcctcagcctccctagtagctgggactacaggcacatgccaccatgcccggctaatttttgtatttttagtagagatggggtttcaccatgttggccaggctggtctcgaactcctgacctgaggtgatccacccacctcggcctcccaaagtgctgggattacaggcgcgagccaccgcacccttcctgtcatccttcagcaatccctgttggccatacttgatgttcagcttgaactcatcatagaatttcagggtcaaaacatgtcttttttttttttttttttttttgagatggagttttgctcttgttgcccaggctggagtgcaatggcgtgatctctgctcaccagaacctccgcctcccaggttcaagtgattctcctgcctcagcctcccgagtagctgggattacaggcatgtgccaccacgcctggctaattttgtatttttagtagagatgggatttctccatgttggtcaggctggtctcaaactcctgacctcacgtggtgcgcctgcctcagcttcccaaagtgctgggattacaagcatgagccaccacgcccagcctcagaacatatcttaaaagtcattttactgccaggtgcggtggctcacgcctttaatcctagcactttgggaggccaaggcaggcggattacctgaggtcaggagtttgagaccggcctggccaacatggtgaaaccctgtctctactaaaaaaaaaaaaaaaatacaaaaattagccgggcgtggtggcacatgcctgtaatcccagctactcaggaggctgaggcaggagaattgcttgagcccgggaggcaggggttgcagtgagccgagatcgtgccactgcactccagcctggccgacagagcaagaccctgtctcaaaaaaaataaataaataaaaagtcattttacttgaatgtcttctgtaacagtcaacctttatttgaataccttcagtgataaaaaaaaaaaaaaaaacctcaccagtcactcaagtaattacgtttcagaaagttttaagtatttattttatatatatagggagatatatacatatatattatacatagggagatatatatatattaggtatatatatttaagatacacactcacatatatatctcaactttgctttcccttgtcttaacctcattaattatgcctttggtacaccagagaataatttatcttatttatttatttttgagacaggatctcactctgttacccaggatggagtgcagtggcacaatcttggctcactgcaacgctgacctcccagctcaaacagtcctcctgcctcagcccccgagtagctgggaccataggtgcacgccactgcacccagctcatttttctattttttgtagagacagggtttcaccatgttgcccaggctggtcttgaactcttgggctcaaacaatccacctgccttggcctactaaagtgcagggattacaggcgtgagccactgcacccagccaccagagaatttaatttatcttccatgtaactgaagagagtcatcaggtccccactgtcttccctgtgtcaatctaaaaaaacagagagaggctgtctctaaagtaaaatatttattcagcaatagagcattgcaatgggaatacacgtgccacagtaaactgcatattcaggaagggaagaaagacaaaagtttttaaaggaaaaatgaggattacatattgttttgagataactatccttggctacaaggatcaataacaagggtggcagcagtctgaggttgaacaggcagttgctgagcagatgtccttgaagaatttttgtgtgtgttaaggttacagtggcccaagtaaggttttggtttttgtagcatcttttatgatagtttttgttatcaggcatttatgcataagaaccctctcttcatggccttctggctttgtttgtttattcgtgtttattttgttttgttttttgagatggagtctcactctgcccaggctagagtacagtggcacaatctcagctcactgcaagctccacctccagggttcacaccattctcctgcctcagcctccacagtagctgggactacaggcacctgccaccacgcccagctaatttttgtatttttagtagagatggggtttcaccatgttggccaggctggtctc

SEQ ID NO: 1604 - DNA, 2203 bp, Homo sapiens
ggcccggaagcgctcgcgcaggagaccccgggtgacggggcccggcgccgctaactggagcgaaccccagcgtccgccgacatggcctggaccaagtaccagctgttcctggccgggctcatgcttgttaccggctccatcaacacgctctcggcaaaatgggcggacaatttcatggccgagggctgtggagggagcaaggagcacagcttccagcatcccttcctccaggcagtgggcatgttcctgggagaattctcctgcctggctgccttctacctcctccgatgcagagctgcagggcaatcagactccagcgtagacccccagcagcccttcaaccctcttcttttcctgcccccagcgctctgtgacatgacagggaccagcctcatgtatgtggctctgaacatgaccagtgcctccagcttccagatgctgcggggtgcagtgatcatattcactggcctgttctcggtggccttcctgggccggaggctggtgctgagccagtggctgggcatcctagccaccatcgcggggctggtggtcgtgggcctggctgacctcctgagcaagcacgacagtcagcacaagctcagcgaagtgatcacaggggacctgttgatcatcatggcccagatcatcgttgccatccagatggtgctagaggagaagttcgtctacaaacacaatgtgcacccactgcgggcagttggcactgagggcctctttggctttgtgatcctctccctgctgctggtgcccatgtactacatccccgccggctccttcagcggaaaccctcgtgggacactggaggatgcattggacgccttctgccaggtgggccagcagccgctcattgccgtggcactgctgggcaacatcagcagcattgccttcttcaacttcgcaggcatcagcgtcaccaaggaactgagcgccaccacccgcatggtgttggacagcttgcgcaccgttgtcatctgggcactgagcctggcactgggctgggaggccttccatgcactgcagatccttggcttcctcatactccttataggcactgccctctacaatgggctacaccgtccgctgctgggccgcctgtccaggggccggcccctggcagaggagagcgagcaggagagactgctgggtggcacccgcactcccatcaatgatgccagctgaggttccctggaggcttctactgccacccgggtgctccttctccctgagactgaggccacacaggctggtgggccccgaatgccctatccccaaggcctcaccctgtcccctccctgcagaacccccagggcagctgctgccacagaagataacaacacccaagtcctctttttctcactaccacctgcagggtggtgttacccagcccccacaagcctgagtgcagtggcagacctcagctctctggacccctcctacagcactagagctaaatcatgaagttgaattgtaggaatttaccaccgtagtgtatctgaatcataaactagattatcatagttatctagtttatgagtcataagctagatttgattcttcaaagaagaaaagtcagtgagcaaatttaaaccagaactaagcattatattttctttttttttttttgagacagagtctcgctctgtcgcccaggctggagtgcagtggcacgatctcggcggctcactacaacctctgcctcccaggttcaaatgattctcctgcctcagcctcccgagtagctgggattacaggtgcataacacacctgggtaatttttatagagatggggtttcaccatgttggccaggctggtctcaaactcctgacctcaggtgatctgcctgcctcggcctcccaaagtgctgggattacaggcgtgagacaccacacccagccataactaagcattatgttttctaaaacttctaagatcctccctaaacccgtctggagacatgggttttagcccagactctgcctcaaactcattgtagctcccagcacattacccagttgctctgggccttggtgttatgctctgggaagtagatgttgatgctgtggccttagtgccttctggccccagcattccatgggcctgtgatcttgaccaacctgagaaaacagtaacagcccatccactggaaatacccctctgcccacagcaccacccttctgtgctgtt

SEQ ID NO: 1605 - protein, 367 aa, Homo sapiens
MAWTKYQLFLAGLMLVTGSINTLSAKWADNFMAEGCGGSKEHSFQHPFLQAVGMFLGEFSCLAAFYLLRCRAAGQSDSSVDPQQPFNPLLFLPPALCDMTGTSLMYVNMTSASSFQMLRGAVIIFTGLFSVAFLGRRLVLSQWLGILATIAGLVVVGLADLLSKHDSQHKLSEVITGDLLIIMAQIIVAIQMVLEEKFVYKHNVHPLRAVGTEGLFGFVILSLLLVPMYYIPAGSFSGNPRGTLEDALDAFCQVGQQPLIAVLGNISSIAFFNFAGISVTKELSATTRMVLDSLRTVVIWALSLALGWEAFHALQILGFLILLIGTALYNGLHRPLLGRLSRGRPLAEESEQERLLGGTRTPINDAS

SEQ ID NO: 1606 - DNA, 611 bp, Homo sapiens
tgggagtcgctggattcgggttttaaaaaacgccggccgtgaagtgggcggagcgagcgatttgaacgcgagcggcgcggacttctgccaagcaccggctcatgtgaggctcgcggcacagcgttctctgggctccccagaagccagcctttcgctcccggacccggcagcccgagcaggagccgtgggaccgggcgccagcaccctctgcggcgtgtcatgggcccgcgccgccggagccgaaagcccgaggccccgaggaggcgcagcccgagcccgaccccgacccccggcccctcccggcggggcccctccttaggcgcttcctcccatcaacacagtcggcggagacaaggttggctaaaggagatccgaaagcttcagaagagcacacacctcttgataaggaagctgcccttcagccgcctggcagcagaagcatttctagttcatctctttgaggacgcctatctcctcaccttacatgcaggccgagttactctcttcccaaaggatgtgcaactggcccggaggatccggggccttgaggagggactcggctgagctcctgcacccagtgtttctgtcagtctttcctgctcagccagggg

SEQ ID NO: 1607 - protein, 114 aa, Homo sapiens
MGPRRRSRKPEAPRRRSPSPTPTPGPSRRGPSLGASSHQHSRRRQGWLKEIRKLQKSTHLLIRKLPFSRLAAEAFLVHLFEDAYLLTLHAGRVTLFPKDVQLARRIRGLEEGLG

SEQ ID NO: 1608 - DNA, 1501 bp, Homo sapiens
tgggagtcgctggattcgggttttaaaaaacgccggccgtgaagtgggcggagcgagcgatttgaacgcgagcggcgcggacttctgccaagcaccggctcatgtgaggctcgcggcacagcgttctctgggctccccagaagccagcctttcgctcccggacccggcagcccgagcaggagccgtgggaccgggcgccagcaccctctgcggcgtgtcatgggcccgcgccgccggagccgaaagcccgaggccccgaggaggcgcagcccgagcccgaccccgacccccggcccctcccggcggggcccctccttaggcgcttcctcccatcaacacagtcggcggagacaaggttggctaaaggagatccgaaagcttcagaagagcacacacctcttgataaggaagctgcccttcagccgcctggcaagagaaatatgtgttaaattcactcgtggtgtggacttcaattggcaagcccaggccctattggccctacaagaggcagcagaagcatttctagttcatctctttgaggacgcctatctcctcaccttacatgcaggccgagttactctcttcccaaaggatgtgcaactggcccggaggatccggggccttgaggagggactcggctgagctcctgcacccagtgtttctgtcagtctttcctgctcagccaggggggatgataccggggactctccagagccatgactagatccaatggattctgcgatgctgtctggactttgctgtctctgaacagtatgtgtgtgttgctttaaatatttttcttttttttgagaaggagaagactgcatgactttcctctgtaacagaggtaatatatgagacaatcaggttgactttagtttgtgagttactcatgtgactatttgaggattttgaaaacatcagatttgctgtggtatgggagaaaaggttatgtacttattattttagctctttctgtaatatttacattttttaccatatgtacatttgtacttttattttacacataagggaaaaaataagaccactttgagcagttgcctggaaggctgggcatttccatcatatagacctctgcccttcagagtagcctcaccattagtggcagcatcatgtaactgagtggactgtgcttgtcaacggatgtgtagcttttcagaaacttaattggggatgaatagaaaacctgtaagctttgatgttctggttacttctagtaaattcctgtcaaaatcaattcagaaattctaacttggagaatttaacattttactcttgtaaatcatagaagatgtatcataacagttcagaattttaaagtacattttcgatgcttttatgggtatttttgtagtttctttgtagagagataataaaaatcaaaatatttaatgaaaatggacttactgttacagcatagagattatactgtactttttgtgtgttaaaaataagttctttatttgtttgcaaacagcca

SEQ ID NO: 1609 - protein, 140 aa, Homo sapiens
MGPRRRSRKPEAPRRRSPSPTPTPGPSRRGPSLGASSHQHSRRRQGWLKEIRKLQKSTHLLIRKLPFSRLAREICVKFTRGVDFNWQAQALLALQEAAEAFLVHLFEDAYLLTLHAGRVTLFPKDVQLARRIRGLEEGLG

SEQ ID NO: 1610 - DNA, 1849 bp, Homo sapiens
tgggagtcgctggattcgggttttaaaaaacgccggccgtgaagtgggcggagcgagcgatttgaacgcgagcggcgcggacttctgccaagcaccggctcatgtgaggctcgcggcacagcgttctctgggctccccagaagccagcctttcgctcccggacccggcagcccgagcaggagccgtgggaccgggcgccagcaccctctgcggcgtgtcatgggcccgcgccgccggagccgaaagcccgaggccccgaggaggcgcagcccgagcccgaccccgacccccggcccctcccggcggggcccctccttaggcgcttcctcccatcaacacagtcggcggagacaaggttggctaaaggagatccgaaagcttcagaagagcacacacctcttgataaggaagctgcccttcagccgcctggcaagagaaatatgtgttaaattcactcgtggtgtggacttcaattggcaagcccaggccctattggccctacaagaggcagcagaagcatttctagttcatctctttgaggacgcctatctcctcaccttacatgcaggccgagttactctcttcccaaaggatgtgcaactggcccggaggatccggggccttgaggagggactcggctgagctcctgcacccagtgtttctgtcagtctttcctgctcagccaggggggatgataccggggactctccagagccatgactagatccaatggattctgcgatgctgtctggactttgctgtctctgaacagtatgtgtgtgttgctttaaatatttttcttttttttgagaaggagaagactgcatgactttcctctgtaacagaggtaatatatgagacaatcaacaccgttccaaaggcctgaaaataattttcagataaagagactccaaggttgactttagtttgtgagttactcatgtgactatttgaggattttgaaaacatcagatttgctgtggtatgggagaaaaggttatgtacttattattttagctctttctgtaatatttacattttttaccatatgtacatttgtacttttattttacacataagggaaaaaataagaccactttgagcagttgcctggaaggctgggcatttccatcatatagacctctgcccttcagagtagcctcaccattagtggcagcatcatgtaactgagtggactgtgcttgtcaacggatgtgtagcttttcagaaacttaattggggatgaatagaaaacctgtaagctttgatgttctggttacttctagtaaattcctgtcaaaatcaattcagaaattctaacttggagaatttaacattttactcttgtaaatcatagaagatgtatcataacagttcagaattttaaagtacattttcgatgcttttatgggtatttttgtagtttctttgtagagagataataaaaatcaaaatatttaatgaaaatggacttactgttacagcatagagattatactgtactttttgtgtgttaaaaataagttctttatttgtttgcaaacagccacaattttttttttcttttttttttttttgagatggagtctttttttttattgatcattcttgggtgtttctcgcagagggggatttggcagggtcataggacaatagtggagggaaggtcagcagataaacaagtgaacaaaggtctctggttttccgaggcagaggaccctgcggccttccgcagtgtttgtgtccctgggtacttgagattagggagtggtgatgactcttaaggagcatgctgccttcaagcatctgtttaacaaagcacatcttgcaccgcccttaatccatttaa

SEQ ID NO: 1611 - protein, 140 aa, Homo sapiens; identical to SEQ ID NO: 1609

SEQ ID NO: 1612 - DNA, 1423 bp, Homo sapiens
tgggagtcgctggattcgggttttaaaaaacgccggccgtgaagtgggcggagcgagcgatttgaacgcgagcggcgcggacttctgccaagcaccggctcatgtgaggctcgcggcacagcgttctctgggctccccagaagccagcctttcgctcccggacccggcagcccgagcaggagccgtgggaccgggcgccagcaccctctgcggcgtgtcatgggcccgcgccgccggagccgaaagcccgaggccccgaggaggcgcagcccgagcccgaccccgacccccggcccctcccggcggggcccctccttaggcgcttcctcccatcaacacagtcggcggagacaaggttggctaaaggagatccgaaagcttcagaagagcacacacctcttgataaggaagctgcccttcagccgcctggcagcagaagcatttctagttcatctctttgaggacgcctatctcctcaccttacatgcaggccgagttactctcttcccaaaggatgtgcaactggcccggaggatccggggccttgaggagggactcggctgagctcctgcacccagtgtttctgtcagtctttcctgctcagccaggggggatgataccggggactctccagagccatgactagatccaatggattctgcgatgctgtctggactttgctgtctctgaacagtatgtgtgtgttgctttaaatatttttcttttttttgagaaggagaagactgcatgactttcctctgtaacagaggtaatatatgagacaatcaggttgactttagtttgtgagttactcatgtgactatttgaggattttgaaaacatcagatttgctgtggtatgggagaaaaggttatgtacttattattttagctctttctgtaatatttacattttttaccatatgtacatttgtacttttattttacacataagggaaaaaataagaccactttgagcagttgcctggaaggctgggcatttccatcatatagacctctgcccttcagagtagcctcaccattagtggcagcatcatgtaactgagtggactgtgcttgtcaacggatgtgtagcttttcagaaacttaattggggatgaatagaaaacctgtaagctttgatgttctggttacttctagtaaattcctgtcaaaatcaattcagaaattctaacttggagaatttaacattttactcttgtaaatcatagaagatgtatcataacagttcagaattttaaagtacattttcgatgcttttatgggtatttttgtagtttctttgtagagagataataaaaatcaaaatatttaatgaaaatggacttactgttacagcatagagattatactgtactttttgtgtgttaaaaataagttctttatttgtttgcaaacagcca

SEQ ID NO: 1613 - protein, 114 aa, Homo sapiens; identical to SEQ ID NO: 1607

SEQ ID NO: 1614 - DNA, 1240 bp, Homo sapiens
agaccccgggtgacggggcccggcgccgctaactggagcgaaccccagcgtccgccgacatggcctggaccaagtaccagctgttcctggccgggctcatgcttgttaccggctccatcaacacgctctcggcaaagcgcttcctcccatcaacacagtcggcggagacaaggttggctaaaggagatccgaaagcttcagaagagcacacacctcttgataaggaagctgcccttcagccgcctggcagcagaagcatttctagttcatctctttgaggacgcctatctcctcaccttacatgcaggccgagttactctcttcccaaaggatgtgcaactggcccggaggatccggggccttgaggagggactcggctgagctcctgcacccagtgtttctgtcagtctttcctgctcagccaggggggatgataccggggactctccagagccatgactagatccaatggattctgcgatgctgtctggactttgctgtctctgaacagtatgtgtgtgttgctttaaatatttttcttttttttgagaaggagaagactgcatgactttcctctgtaacagaggtaatatatgagacaatcaggttgactttagtttgtgagttactcatgtgactatttgaggattttgaaaacatcagatttgctgtggtatgggagaaaaggttatgtacttattattttagctctttctgtaatatttacattttttaccatatgtacatttgtacttttattttacacataagggaaaaaataagaccactttgagcagttgcctggaaggctgggcatttccatcatatagacctctgcccttcagagtagcctcaccattagtggcagcatcatgtaactgagtggactgtgcttgtcaacggatgtgtagcttttcagaaacttaattggggatgaatagaaaacctgtaagctttgatgttctggttacttctagtaaattcctgtcaaaatcaattcagaaattctaacttggagaatttaacattttactcttgtaaatcatagaagatgtatcataacagttcagaattttaaagtacattttcgatgcttttatgggtatttttgtagtttctttgtagagagataataaaaatcaaaatatttaatgaaaatggacttactgttacagcatagagattatactgtactttttgtgtgttaaaaataagttctttatttgtttgcaaacagcca

SEQ ID NO: 1615 - protein, 126 aa, Homo sapiens
RPRVTGPGAANWSEPQRPPTWPGPSTSCSWPGSCLLPAPSTRSRQSASSHQHSRRRQGWLKEIRKLQKSTHLLIRKLPFSRLAAEAFLVHLFEDAYLLTLHAGRVTLFPKDVQLARRIRGLEEGLG

SEQ ID NO: 1616 - DNA, 21134 bp, Mus musculus
  misc_feature (1)...(21134): n = A, C, G or T/U
cagacaaataaaccaacctgctacatttctgactaaagctcccctggtaatgtagcgaacaccggggaggagggacaagaagcattatcagggtcagcacaatgcaacctgaccctggaggctgtgtgttagaactgtgtggtgctggaaagctgccttccacccttccacccctgtgcaggctaattcccaggtctcttatggcctctgggaaggctgagcctaaggcagggattcagatgcctgatagtcccaagaccaaccaatcaacaaacaaacaaacaaaaaaacaaaaaaaaccaaacaaaccaaaatgagggtatagtaaactgtgaacggatgtttctttgtgaaagtccatgtagtctgattggaagggaactctggagtgactcatgccagcctccttgttcccaattctctctgagagcaacatcccttccagacaatggcactgacaacagccagccaagatgggcatgcctggatataggcaggcctcacctgcagccataggtgcaccatagagtgcccagtgccagactactctgaagatgtggcaaagcagagtggatggcagagccaagagtcaccagggacattttctacccacaggagctaggcatattagtctgatggcaaaggtgcacgcccttggttgaaacccttgcccaacgctgacctcttttccttgtgtgtgcaagtttgcagttttcattctacctctatcttaatgagaggcacaggaccaagtcacacacagtgttcaagagtccagtttggccagagccacgtgaacagagaaatgcccctgcatgtgttagagtaaggcatggccatggtttactaactgcaagacaagatagggtaaactaaggccaaagaagagaatgatatgctcaaagctatccaatcagtaggcagaggggttttaatgtgaacactggtactcctgaccagtgtttaaagtgaaaagttgaagctggtgagatggctcagcaggtaagagcactgactgctcttccgaaggtcctgagttcaaatcccagcaaccacatggtggctcacagccactcgtaatgagatctgatgccctcttctggtacgtctgaagtcagctacagtatatttatgtacaataataaatctttgggccagagtgatcggagttgaccagaacaagcagaggtcctaaaaattcatttcccaacaaccacatgaaggctcacaaccatttgtacagctacagtgtacttacatacataaaataataaagaaagaaatcttaaaaaaaaaaataaagtgaaaagtcacagataacccgtttctcagtgccaggggcagatgtcctgggcaatgcagagactgagtctgacaaggggttgcgatgaggggcaggtgatggtgccagtctcactgggaagaaactgatgtgctcccaggtctgatgtttttggacagctacagaagagtacttcaagcagttagcatcagaaaggaccttgggggtggggctcagatgtgggtcattcaggatgacccaaagggtctcgtaggtaggtcattcagcccaggcataattctcagaccatgtcaacctcaggaagctgtggtgaatcacacttcttaagaaggacggaagataaatgggggagggggacaggcagtaagaagtgagcaatggggcgctgtgctttaatcccaggcagaggcaggcagatctttgagttacaggccacccagggctgctgagtaagaccttctctcaaggccaagcagtggtagtgcacacctttaatcccagcacttgggaggcagaggcaggtggatttctgagtttgaggccagcctggtctaccaagtgagttccaggatagccagggctatacagagaaaccctgtctcaaaaacaaacaaacaaacaaacaacaacaacaacaaaaagaccctctctcaaacaaacaaaacagaaagttcatgaagcaaagcaccaaggcacccccagctccccctcaaggagtctcctggccttaggccttcgtacaacacagaaaactttcccttaaggggaagcctgtgaaccagacaggactcacagcttttcacggtgagaagtctggagtttgtgtactgttgggagccctggagagtaagggcaggtggcactctgggtaagctctgacctggacatctcgcttaaaacctttcaaggaaggcagtggctctatctagctaagtctagagtagagtagaggatggtgataacacacggggcagattccagtgagaagaggacccctctaagcaccccaagggaacctaagagagagatcttagagaaaatgaatgaacagacttgtctccaccctgggatttccaggctggtaatcagcaggttgtgccacatgttggggagtaagggtagagaaaggcacatggaatctcctgaccccttgtcagactcagcctctgcatcgcccaggccatctgccccctggcactgagaaactgattacctgtgacctctcactttaacactggtcaggagaaccagtgttcacaataaaacctcaccacctactggttagatcacgttgagcacatcattgtcctctttggcctcagtttaccctatcttgtcttgcagttagtaaacctttctaggtcacaagttcaacgagcagtgtccaagagagggagccagctggctactgcctgtgcagccttctctccatgaacagtactttacattcctgcagcccaggagaggttcctggtgtacacctctttataggagccagtgactgctctgtgtgtgtgtgtgtgtgtgtgtgtgtgtgtgtgtgtgtgtttacttgagcactcatgcgtgggtgcatggctttatatatacatatataaaaccagcagccattgatcctgtgaaactccctagccctttggtgtgaggtggatgggtggacatctcaactgggtgtgtaatgtacaaggggtccagacacccacattgtccccacagagattgcgggcaagctctgaaatgggcgggtttgtaatagacagtgagggcggtgcatgagtggagagcagaaacgtgctggctggatccagttgctgaacctgtctgtgacgtagtctcttggaagctgaggtcggctagggggtaggagtgggactggggaagagggagagggcggagcggctgtccgcggtactgacctggcaggaagccgaatgctctcaccacggttcagggagctgtccgcggtactgacctccagcctactagttgggcgcggtgtgcagtgctgatagcggttcttcctctgtggcctccgggcgaaggcgacgcagaggtcagccgcccgagctctttcttctgagtttctgaatgtgctgtgctcattcttgaggggatagaagacccaaggggagatacatcttagagaaaacgaattagcagaattgctcattcattttccagactggtgagcggcagggggtaccatatattgatatgggtgggggtcaagaaaggcacatggaagctcctgtcctcttgtccgcctaatttcctgcattgcatccttcaatggggaggcagcccactcagagactgcagaataccagcagcccctcagtccacacatggtgggccaggtgactaaagtgcctgcctctgcatgtttcagaaaggtttcgggggcctggtcacttggcagagtgggggtggagttaacaggacataaggaaaacagcagtcaaagtgaaaggctgtctgtggttgtgcccaaccataaagaccccgaacactacagcccttacagcctgtccatagagctcccagcagcagaaatgaaggatattccaccaatcaccattgctttactctgagtaagtggctgttactggagcccttgggtccttgaagggaagtaaaaggggtctaagagaccactccacagtggagacaagtcattatccaaggtgagttaacaagagaggctgggggttccttctcttgcctctttcagaatttcaaaatgaacaaatcaggggtaaggaagctgagaaagtcagcttacgccctccttttcctaggcctacttctcagacctctggtcacaagtcccctggtcatactctcacccttgccacatctgttcctgcctcgataccccagtccaacatgacttatcaccctgactgacctgccacggtgggggctcagcaggaaaggggatgtttcctatcctgcacaagcagagccatcttcactcgaggctgggatttcacctgtcagtgcccacctgaggccccacaagtgaagctggtaggttggagataacctgagatggcagatgggcagagattgcacagatgagggtctaattgacaatcaattgtgattaggagctaaaggacgtccttatagccctagacagtctggttgaggctgaaagagggctgttgtttagagttctgggcgaggaggaggggcatcgggcaaccctctgacttggttgttcctcagaggcagggtgggaacagaggaagaagttgtctcagtctctcagtgagctatgtccacacagcattgtcccagaccaaaggaagaagagaagcggtggccctattcagctccagaggacccttgggctcaccttactcctcagagttggctgtaagcttggctgttcattactctgcctgctacagctcatgtcagaatattgaggggcaggaagggcaggggaagtaaaccaggggcatacaaacttctagacagccaaggtgctttctctgcattctgcccagctctgaccagtcccctacccatcagcaggcaggtcattcggcagggccaagtgtgagtttcggtgaaaaacaacaacaatgacaacaacaaaacccaacatccagttgcctgtttttctataacgtgttactttatctcacttcatatcctctgttaacacgttgtattacattgtctgtgtcttagctgcagtctacaactcacgttctaggaaacaccactttgcttgcatttgcttgtcctgaaggaaggctgcacagaaagggctacacaggtcattgtacttcctcacaggcaggtgtcatggctgagagtgcagccaggccagctccaacccagtaaggtgtgggtgctgcagctgctgttaaatgtttgccaacattcacccctctgctgacttgtgctagtgacaaatgtgtgtgtgggggggtgtgtgggggggtgtgggtgcttgtagggatgtcccagagtctccactacccagagccagctctgcacatgaggcctgtcctcccctgccctcccctcccaaaagaagctcccttctgcacccagnnnnnnnnnnnnnnnnnnnnnnnnnnnnnnnnnnnnnnnnnnnnnnnnnnnnnnnnnnnnnnnnnnnnnnnnnnnnnnnnnnnnnnnnnnnnnnnnnnnnnnnnnnnnnnnnnnnnnnnnnnnnnnnnnnnnnnnnnnnnnnnnnnnnnnnnnnnnnnnnnnnnnnnnnnnnnnnnnnnnnnnnnnnnnnnnnnnnnnnnnnnnnnnnnnnnnnnnnnnnnnnnnnnnnnnnnnnnnnnnnnnnnnnnnnnnnnnnnnnnnnnnnnnnnnnnnnnnnnnnnnnnnnnnnnnnnnnnnnnnnnnnnnnnnnnnnnnnnnnnnnnnnnnnnnnnnnnnnnnnnnnnnnnnnnnnnnnnnnnnnnnnnnnnnnnnnnnnnnnnnnnnnnnnnnnnnnnnnnnnnnnnnnnnnnnnnnnnnnnnnnnnnnnnnnnnnnnnnnnnnnnnnnnnnnnnnnnnnnnnnnnnnnnnnnnnnnnnnnnnnnnnnnnnnnnnnnnnnnnnnnnnnnnnnnnnnnnnnnnnnnnnnnnnnnnnnnnnnnnnnnnnnnnnnnnnnnnnnnnnnnnnnnnnctgcctcctgtcccagcctcccagaggctcagcatgtccgagcttggcccaaattacaggcgatcggtcccccattatttctcctaacttttaatttctgcttccgaaggatcattgcccgcggtaattgcaaaggaccgtccttgtgcagagcaggctctcgggaccgtagtgggaggaggaatgcatacccgctggagcacacgtcgtaggcgcacacactcacactctgggcacgccagttccatcgccgggtcccacctgggtccttcagaggcgggtcagctcattggcctgagcgagaggaggaggaaaactaggaagcgaagcatcggctacctgaccctcatcctccaaagccgggctcgaccttccgaggtcgtccgccgagactgtcctgtaaatctccagactggacaagacggtgcacaaacgctcaggcctcaaacggcccttctgatttgttagggatggggaagaggacagtttccgtattatttctggaagaaacacatattttcccgttacatgaagggtatcgatctttatgtaggccacctgctatttgtgcgatttttcggtcaccctttggggggggggcggggactaggacggccgtctagccctactcatttcgattccacttctaatgagcgtcactcgcgggcgccagccccgcctcttgcgggggatttcgagtcgtccctaatttgatccagccaagggggcgggagtcaaagccagtgaggatggagggacagagattctgaccagattgctccagacgcggaaaaacagcaatcgagggcagcggaaaccgaaactctgggaacacgccccacaaggggctgaagaccctggagagactcagaacccgcaagaacccctctctccctttccgtcctagcagcggaaggcgcgagagcccctggtgccaggatagcccagaaccccgcgtgccacggcagcaggagagacctgccttagcggtaccctgagctgggatgtccaggccaactcggggcgcgtgggttcccacgtcctggggcctctgcagccctccacagccaactgatcccgcaattatttaaaaggcgactgtctcctcccccttcgccaaggaggcgggcacgcagtttccagccccgcggaggcgcagcggcacggtgctgagcaccccagcctccagtggactgtgctctggctccgggcagggcgtctgtctgtccgtctctgcggctcagtccgtgagtcccgtaccgggcccgcctactccgcttgggaccgttcgcagccaattaggcgtgagcgctaacgagggaagcggaaccctgcggccgcctgcgggcgcacgtgtgtgcggcgtgtgggcgcgtgggcgcctccggcggggccgccataaatgcactggcccggcgcggcgggcgcatgaagcggtggcggaggcaaggccaggcagcaccagcagagcgggaacagatgggctgaggctgattttgcggggcgcagggatgggatccccagtaggtagcgggggcccgagccgcctgagcggcccgaggcccgcatgagtaccagcggcccggcggcacccggatacgtccccgcgctgccaccgccaccgcccgggcccggctcggggcccgcaccgccggctcctgcggctacagctcgggacactatggacggacgagctgagctgcccatctttccccgggctggagtgccaccgctcgcggccagcgacactgttcccgcggtgccagagggggctggagcggcccggcccgccgcgcccccgcgccccacctnnnnnnnnnnnnnnnnnnnnnnnnnnnnnnnnnnnnnnnnnnnnnnnnnnnnnnnnnnnnnnnnnnnnnnnnnnnnnnnnnnnnnnnnnnnnnnnnnnnnnnnnnnnnnnnnnnnnnnnnnnnnnnnnnnnnnnnnnnnnnnnnnnnnnnnnnnnnnnnnnnnnnnnnnnnnnnnnnnnnnnnnnnnnnnnnnnnnnnnnnnnnnnnnnnnnnnnnnnnnnnnnctccttctccgtgttggacatcctagatcccaacaagttcaacagtaggagacgccgctgcgtgctactgggccctgtggtgcccgctacgtgtgccccatgcgccccggccgcgtgcgtcgcggtccccgctgcctccggacgttcgccgcgcgcagagctagaacgccgagccctctccgccgccacaggagtcgcagcggccgcgggagctgagcctacaagtgagtataaggggttggtgataggggcgaggacaccgactgctccggaatgtttatgctcccggcgagctgggcctgacccaagcgccgccgggctctgtggaaagttcgcagagcgcggggtccgccccaagcatccgtggcctcctcccgacccggactctagggccctcactgctgcacgcttctggaaaggttctgttgggccaaatctggggccttggggttgcgactacggtccaggattcatctagtcaatctttggtgttggagggtagttggtgctggaggcaaagggacatgcggcgactgacttggtgacttacccacccccaccgtggccttcccggccctccccctttggacaaatcagactaattgtgacaaaacgctggttatctctggaaaaacaattaaatcccttcgattacagttaaagggaaatgtgcttagcggcggaaagcggccggtaatggggcggcccgcgccccctttgcggtcgatatcccattacggcgcatgcatatctctttcaagcaccttgcaaactccccccgaacatctaaattatagggtcaaaattcggataattactcgattaaaacctattacacttattaggggccgctattgatcgcgaattgcattcgaccagctcctgattgctttttgtgcccctcccccgtcctcctctaacttcttggcccctgcgcctctcatggaccagaacgctcagggagaactggactggggccgccagctctaccaacgcggttgcattgaccttccgttcctagagagaggaagggcaggccatgcaggctgcagttggacccctctctccgccaaggggttggtctacgaggaactcgcggctgcctgctggagctgtgtagggagggagcgagcgctgcacagttgggagagggcagccaggcagggctggggcagggatgactggctacgtgtcgcctgagggaatagttgtcctgctaagacctgggagttgaggacaggacacccgcactcttcatgcgacctgggtcatttgagctgggttattttcgagttgcgattttatgctccagtatgtcagcgtcaactcgatctgagagctgaacaccggccctgggtcggaaaacgtggaggcctcctctggcatttaaagaccacctgtgggtgaggggcatgaaaggtcctcagattcctgcagagcagacagacagccttgcaaaatttcagaggcaaaatgcagtcatggcggcagcatctctctggatgcagcgggattagcgctcatactccctcccagggccctgcttagaggttcacaatacgctttcccagcctccaaactcaaccagcccacgggaagctggagcccgcttaagacagagtcgctggggagctggttggtgggccccagaggtccgcagggaagtcagcactttgcgacgcctagttttcagggcctgaagcctgaggtagggacagctcccagacgaccgattttggttttcagaagtggcctcctcacagccggccgaccccaccccaggcctcgcgcccctccagctattaactgtgcggtaattggctggccccgcgcccgctgtaattggaaggtaatatacgcccaaataaattaaatggactttaactagtttgtacattacacaaaatgagtttaattaagtttgtatctgccccgtgaatcgatcggagctctttctccgctgtacactccgagggccgcccgcgcaccgcagccctaaaggccaaggccaggactgcggatggggcagcaaagcagctcgacacggagtgggtccttccgaaggaaggcagagaggaaatgcaagcaatcaaggaggaactgtggcaaggaggaagaaaaagaaaatctttggtgagggggcaaacgaggaagaggagaaacacaacagttaaaagagaatctctcctggggcggagcgggcagggcggctggcagcgggcctgaccctctgttctcttccttttcgccgcccgcaggtgctggggactcttacagggcggacgaggccgaggccaacggctacagcagcggcagcggtcgcagcccgaccgcggacagcgaggatgaagcgccggaggacgaggacgaggaagaagcgcccgaggtgcaggatgctcagggcacggaggagcctcggggaggcagcggcggtctcggggcccgcgggtcgggctgccccggagcggccgaggtcgaggcttcccctgtggacgatactgcggccccagggccccgtgggaactcgcccggagccccgggcccgcctgcaactgctacgggagcggggagcgcggggagtaccccgcagggcgccgccgtgaccaccaagcccaagcggaagcgcacgggctcggactcgaagtccgggaagccgaggcgtgcgcgcaccgccttcacctacgagcagctcgtggcgctggagaacaagtttaaggccactcgctacctgtcggtgtgcgagcgcctcaacctggcgctgtcgctgagcctcaccgagacgcaggtgaagatctggttccagaaccgccgaaccaagtggaagaagcaaaacccaggcgctgacaccagcgcgccgaccggcggcggcgggggccccggcccgggagcggggcccggcgcggggctgcccggcggcctcagtccgctcagcccctcgcctcccatgggcgctccgctcgccttgcacggcccggccgggtacccggcgcacagcccaggagggctggtgtgtgctgcgcagctgcccttcctgtccagcccggccgtgctgtcgcccttcgtgctgggctcgcagacgtacggcgcgcccgccttctatgcgccccacctctgaatctcggtgccaggaccccggtggggaccgcagcacgcggcctcaaggccagaggacccaaggcgagcatgggcgtctcttttctaaggtttcagtcgttggtcctgtatatagatagccgttcctacagaagagaaatttataaacgagtgtgcgcaggggccaaacgggaggctcccgtggcctgctccaagcactttgtagaactcttaataaagcacaggaagccatgcgggcgttttcccgaaggctctggcgccgtaggatgccgatcccgccttcctgtccgctccggttcttatccatctgtgtgtcgccctgggcagggacttcagagcggttaggtatagtttcctgtcagtgtttagtgtctcatggtcactctagtagcttgcactctgtcacctttctctcttggggatcgccctgggtccagcacgggtctgagtccccttcccgctctctccgaagtgaggccctttcccctcttcttgcagcctggcactgctgacctccaaatccggtcccaccaactgcccccactcccacccccaagcaggctacttgtgggcaggaaaaacatcccccttcctagaggaggaagctggagggttgaggtgtaacaacctgccagatagtctactagccagaatggaagtgtgtgtgtgtgtgtgtgtgtgtgtgtgtgtgtgtgtgtgtgtagtccctatgtgctgaacgcatggagcccaggagtggcccgaagctgtggcccacacaccccaaagcagataccgaaccacctatgactacagggagactacatggcagcctgttccagctttggaagattttgtatatcagtaggggtggagactggagaaggaaaagggggttgactgtggagagggacagggaggcaactgttctctggtctgttccagggtccctgactctccctagaaagaacaaaagagcctgctgtgctccactgtggggctaggcttctccttcaggcgtcctgtttcctagcacagtgagcttttggaggggtcttgaccgctagtcaagcgagctgcctttgggagtcaggctgagagtgaactgcagtcactagcactggtcagagtgcacaaaactggcttcatgctcatcaaaagccaaaggcaggtaagagcagcatctggcagtgagggggcaggaagccaacctgccccttgaagactggtagcttccctcactgaccaggagagacctggtatcagattccagccagcccacattccactttcagaccttctaggcctaaaggttcctgtcctgacctgatgtttgacagccctagatgggcacctggtccagccttctagttcagtggtgcaatactactatccctgtggtcagggagtgagagccatgtatgaagtggcttaactgtgagaggtgatggcttggaggatattcacagccttgctgctgagggctgggcctctaagacatagattgccgacagggaagtcctaaaaggccccagaagattccagaaaacccttggaatcaaatcaaatcactagaagcctggcctgtgcaggggctgcccagccagaagccacagcctccataaataggagacgacatgccatagtcctgccctatcttgtcccacctccaaaacgcatggcgatcttctctcccaggccaacacaggcaaccctcgcccacacagcaagataccactgagcgtgagttgggggtgagggtgacagtgccctcactgcaagtttcctccatgtctgtgctcaggggaccctgtgcatgagagggaaagcagctgccagctgaccctggaaaaagacccaaggcccccttccagtcctgtttccttttgccagccatgctgagctgagccgaggatgctgatccaacccagagttctcctgggaagatgactaggtagagcaggtagctgtgcttcccgggatcctagctactccggcatgtggtaatgaattttggctgaacagggctcttcaacatccaaatgggggttgggagtgggggtcagctcatttgccaaggctctgtcccaaattcggctacttgtactcatggcgcccttggcatctacagaaggctttggaactgagcagagaatgtgggtcagggcctgtgaggctgggaagcagtgagcccaccacacacagcacctcccttccatctctgggttcaatgccacaggctacgacatggagtagtggctacttcctggcattccctgagtccctgtagtctttcttgctggcctctgtatacagccctttgcctgtgatagaatgttgtgcgacaagacatttctagagagatgcaatacacacatctacacatctactcaccacagatagagatcccatgacagagcaaagtccaggtaccactaaatgtcaactggtgagccagtgaggtaggtgtgtgtgtgtgtgtgtgtgtgtgtgtgtgtgtgtgtagacatggtttctctgtgtagccctggctgtcctggaactcactctgtagaccaggttggccttgaaactcagagatctacctgcctctgcctcatgagtgctgggactaaaggcatgtgccgtcatcacctggtaagccaatgagttatattgcggttacttacaggagtgtgggagaggagttatttacaggagcagaaatgactcaaagacagctgtatcaccaaggttcaccccagcatagatggccgctctcaaaacgtgggagcctggatcacactgcatagcctgcagacagcgggacaggctgaagaatgtcttttccaggtgcctcagttggtctaaacctcgtcaggaagcttagctggcttaggcttcttccaggaagctgagctggtctgagtcttatttgtagcttggttatctgagtctcttagcagctcagctgaggctggctctcagcttttattgcttactgtgggaaggaggggcttagtgactgtggtccctcataggaacttcctgaagctattttgtgttgctcaccttcctgtttaaatggcttcttgaagaatggaatgtttcagtctctgaggaaactgtgtgttactcagcacaaaactattgtcatctgtctgtgacagatgaaatctagagggttagtggatgccagggcagggcttaggaggagcctaagaaggttgctcagttctggcctctcagctggctttctccacatgtgacatttggtgagttttggggtgtagattgtactgtttctggggaggcctctaattgtagagtcctacaactctgctttgatcagttttgtacaggcacaatttgtctagtttttaactaggcctgagacccctggatatggtagcacatgcctgtaaccctagggttcatgttaaaccccagggctcacccagtggcagaggcaggcaaatttaaagttcaagattgtccctggctacattgtgggtttgaagccagcctaagatacacgagactcagcctcaaaaacaagactaagttttgcttctttgaagggcacatgggctaagttctggctacacagcgatgtgtgctggataggacaccagaaggtgattcatggcaagtctcagaaagcagataagatactccattctctctttgtagacaatgtgatgactgaagccagatccctctggctgttggcgtagcttgggaagataaagcttgtgtgcttgcctgctgtcccacagtatggacagagatcagatcttaatggtgtcatgtagcctcctcaagcccagcatgacctctgacagaaacatcttaaacctactatttagttttcaaattcattccgatactcacttttatagcggtgtgctttgccttccctgtggcctgacccgttgggtctgcaccagccccagcacctccaggtctgcactctcctatagcagtcctacagctgcgcagtctggcccttgagggccggaaccagccaaccctactcacaaccctaacagatatcatctatgaacctgcagctggctccccctgaccttcccaaaagcctgctagtcctgcctcttcccatctccgaactccaccctggggacccacagccttgagcgagtggagaagccgttgaattccaagggtcagcagctgcctctcttccagctctgagtaccccgcccccatacaccttggacccagatactctgacctgtttctcctgactcagaggccatgaagcacagcaatgacagtgagccgggggcagggaggggggtggtggcgaggagctgggtagaagccctgtggatagggtccagctgcacagacccttccttccccttgtcctgctcagggtagcttcatcctgacagtcacactggcaaatcttttttttaatattcactaatgggtcccaattatggacattttattaccaattatgagttcccgggtaaagggcaaatgtatagtataggtcaagttaacagtgatcaagtacttcttatttgttttttttttaaattaggtatctccttcatttacatttccagtgctatcccaaaagtcccccataccctcccacccactcctacttcttggccctgacgttcccctatactgaggtgaagtcagggagatccactgaaaaacagaatatagaaatggccagagtaactaaccagttagtcttgagtcacaccttacactttctccttctaccccatccctgatgctgcaacttcaccttcagacagaaatatacgagagctctctgacctacaattgcatcacgaagctacataaataaaaaggctgcatgtatctcacaggtagatagctcaagggccagaccagaaccactgcaacctggagtttaacacatagggcaggtgctctttcaaacctgggaaaaggtttatatcagccagctacgtgaattgtaaaaatggtatttcctagttcatattttttaggtcagtgatttaaaggtgaatatggatgcacaaaagtaatagaagagagagagaaaaaaaggaataatcgcacaaaccccagggctcagcagctcctattccacattggtgtgcacctgtatgcagaaatgggtaaggacggatgcaaggcagagactggggacagacagccttaccatcttgtgaaggagcacatccaccctcacaacactgtcctgcaggaagatccttcaagaagggggagtgaggaccactgggcaccatagcaaccaacaaaaacacacctcaaagctccagaagccaacaaggtttctgatacccacccccacctgcccaccccaagaccctgcagtttattgtgacgggtagggtgcaggtcagtggcagaacacacactcagcatgtgcaaggccttgggttcaattcagttcagggcagaactgaacagtggctggttccctgacacacggctcaatgtgcttcggatgacttgaagaaatcactaaaataagggatgccacaagtttatggaaattaaataacaaactcctaatcaattgagaaaacaataactggaaaactagaaaattctttgaattaaaataaaaaaagtccagggtgtgggggccacatgcctggaatctcagtatttgagatgaaggcaggagaagcagggtttaacacagcctgggtagcataaggccctgtctcaaaagcaaagcaaaaactttaaaggacagacagacacatacacaaataaaactgtgcctggtaacacacatctgggatcccagcgttcaagaagctgaggcaggatatccctgagttccagatcaacctgaagtaccaggaccttgtctcacaaaccctaagcccagaaaaccagagccagcccccagcccagttctgtctgacttccatgaatgcctggtcctcttgggctctgatgctccttcagtcttcttcattgtatctccaaccttcagcagagtggcaggggcaggtggcccaggcatgtttagtagctgaaaacctccactatgttactgggaatacagttgccggaacaaaacacactttccaaggagctagtgtcaatcaccagaaattaagtgttgtgtggtcaatgtcaaagaaactcctccaagacaagttgtaactctagaacaatagcttgtgtttagagactggtattaagcacttggttggggttctgaactccagaatcttgtggaggcaggagctttggacttgggagataaacaaacatctatgctgttgacaaccaaaagagaggtcatgaggaattacaaacttgtttaacacaacacagaaatacagaaaacaataggtcaaagtccacacctgtccccaacccaatgaagaagaaagggtggaaaaagacaccatgttagcagtcttccagagccagcagcacagctacattgttaccagaggagggagacttaggcccaaagcccagggccatccatttggaagaaagggcaacaagaaaagcactaaacacaggccctcaaatacatgaagctaaaatgaacagagtaaggggtgtctgaagacagcaccccacatcagtggacttataggaaagccaggcagcccactaaggcaggtgaagtttgcagacatcacagagcttccccagcagcaacagggcagaactgaacagtggctggttccctgacacacggctcaatgtgcttcgggtgacttgaagaaatcactaaaataagggatgccacaagtttatggaaattaaataacagactcctaattaattgagaaaataataactggaaaactagaaaattctttgaattaaaataaaaaaagaccagggtgtgggggccacatgcctggaatctcagtatttgagatgaaggcaggagaagcagggtttaacacagcctgggtagcataaggccctacctcaaaaacaaagcaaaacttttaaagacaaaatacactataaaaaacataaaagatgaacataaaataatgttaagaccaaaacttgcagctataaataactctactaaaaataaagatttttaaatcaataactgtttctaacttaaacaggaaaagagaaaaattatatccaaagcaacccaaaagaaataattaaagtctgtagaataaaaaaatagaaaaataacatggactagtaaacacaactaaaacactataatttaaaaacaagaaaacaaaacccaaaacctagccagagccaggcagtggtggcacacacctttaatctcgggggggggnnnnnnnnnnnnnnnnnnnnggggagcagaggcaggtggatctctaactttgaggccaccctggtctacagatcaagtttcaggacagagaaaccttgtctcaaaaaataaataaactaactaactaactaactaactaactaactacaggtgaccaagaaaaactggaccagggatgggtatatggaaatcattagacatcatgagcaaaggcagtttatccaaggactgcaaagttagttcaacatatggctagaacataatagatcacatctttctaaacaatcacatgtccatctcaataaataacattgaaaaagcttttagcagtggggggaaattattttacaaaattgaaccttttaagacaaaactctcaacaacacacataaaagttgacaaaaatagattaaagcctttacacatacagtctataactgtacagctctcacaaggcccagtgtagtgagtgctccaggtcattaatcagcatttgggacacagaggcaggtaaatttcttgagtttcaggccagccaggggtacatactgaaaccctgtttcaaaacaaaaccaaaaagaaacattgacaaaaaaaatcgactctcaaaaacaaaacagaaaaaccacctgcagcaacaacaataataaaataaaataaaataaaaccaggcaaatctttctggttcttaggcaatggtttctttgaaatgacaccaaaattacaagcaacaaaagaaaaaataaatgacttaattgaaatgaaaatgaagaaacatgaaaaaggacatctacaaaactccacagttggtatcacactctgtgtctatgtgggaggtcaggacaggagattcaacattcaacagtggactggagatgctaaccagagcaattaagcatggggtggattgtgctgtgcctgcctgcgtgcgtgcgtgcatgtaaagaaacaagcacacttcatatctggaaaggaaaaaggaaacatgtttgtttaaggataccaggattgtgcacagaaaaaattctaacatacacaaacacataagctattaactaacagataagtttcattcacagagctgcaggatacaagaacaaaataaaaattaactgtatttctgtaagttagcaataaataatctaaatacagaattctgagaaccgtcacatttataaaagcattaaagcatgtaggaatacattttttaatataagcgacctataaaaaactgtaaaatactaaaaataaacgacagctcaattaactagaatgctatcagaagttcatgaatcctaacctgccttcaggttcctcctgtcctgcttgaattgagtccttgtcctgacttcctttgatgatgaactgtgatctggaagggtaagccaaataaacccttccctccccaagcttcgccacagttatggcaaaccctagtatgacagtggtcaaggctcccagtggctaacaattaaaagagtcaaggacaatgaaagtcccaaatgcaaacaacgaagccgacgttacctcacagcacaattaattaaaaatggatcaaagctgtacatgtcagagctaaaagtatacaattctcagaagaaagctgactgtagtggcacactcatagcacttggaaagcagaggcaggtggatctctgttagctggaggctagcctggtctacagagtgagttccaaggcagttaggactgcatagagactctatttcaaaaaaatacaacaaaaacaaaaatttcaaaaaaaaaaacctatgagtaaatcagtgtgccttgaagttaagcaatatgtgtgtttatatgtatataattagtgtatacattagaaattatatcaatagcacaagaaacaaaataaaaatataaatgaactttactaaaatgaaaacctttggggccagtgagatggctcagtgagcaaaggcacttgctgttaagccttcccatttgagttcaatcctaggacctgtacggtggaaagagcaaatagattcttgaaggccatcttctgacttccttaaatgagcacgcacaggcacacgcgcacgcgcgtgcgcgcgcacacacacacacacacacaaacactgtaattttaaaagattaacaactttgaagggcactatcaaggtgaaaagacgagaaaacatctccaattcatttaaggatgcagtgtttagaacatatataaaacctcttacaagacaactaattgaaaatgagaagttatttgaacacatataagtggctaataaacacaaacactaccattagtcactagaaaaatgaaaatcaaaaccataaagtaatactttccactaagattgttaatattaaaaaaaaaagaaagaaaaaaagtaacaagatgagagtctagaaagatagttcccgaggtctcaggttcaattcccagcacatacaaagcagctaccaactgtaactccagttccaggccatttgactcctctcttctggcctctgtaggtaccaggatagaaacatggtttagacacatatgtgcaggcaaaacacccatacacataatttttttgaaattctttttttaaaaaacccacacccatacacactttttcctaaggagccaaggacggtgacgtacacatttcatacactgccagtgatacagacaggtgggtctatgctgggctcgaggccaccctagactacccagcaagttctagatcagtcagaactacagctgcacagtgagcccttgtctgggaaaccaaacaaaaatag

SEQ ID NO: 1617 - DNA, 1134 bp, Mus musculus
gggcagcaaagcagctcgacacggagtgggtccttccgaaggaaggcagagaggaaatgcaagcaatcaaggaggaactgtggcaaggaggaagaaaaagaaaatctttggtgagggggcaaacgaggaagaggagaaacacaacagttaaaagagaatctctcctggggcggagcgggcagggcggctggcagcgggcctgaccctctgttctcttccttttcgccgcccgcaggtgctggggactcttacagggcggacgaggccgaggccaacggctacagcagcggcagcggtcgcagcccgaccgcggacagcgaggatgaagcgccggaggacgaggacgaggaagaagcgcccgaggtgcaggatgctcagggcacggaggagcctcggggaggcagcggcggtctcggggcccgcgggtcgggctgccccggagcggccgaggtcgaggcttcccctgtggacgatactgcggccccagggccccgtgggaactcgcccggagccccgggcccgcctgcaactgctacgggagcggggagcgcggggagtaccccgcagggcgccgccgtgaccaccaagcccaagcggaagcgcacgggctcggactcgaagtccgggaagccgaggcgtgcgcgcaccgccttcacctacgagcagctcgtggcgctggagaacaagtttaaggccactcgctacctgtcggtgtgcgagcgcctcaacctggcgctgtcgctgagcctcaccgagacgcaggtgaagatctggttccagaaccgccgaaccaagtggaagaagcaaaacccaggcgctgacaccagcgcgccgaccggcggcggcgggggccccggcccgggagcggggcccggcgcggggctgcccggcggcctcagtccgctcagcccctcgcctcccatgggcgctccgctcgccttgcacggcccggccgggtacccggcgcacagcccaggagggctggtgtgtgctgcgcagctgcccttcctgtccagcccggccgtgctgtcgcccttcgtgctgggctcgcagacgtacggcgcgcccgccttctatgcgccccacctctgaatctcggtgccaggaccccggtggggaccgcagcacgcggcc

SEQ ID NO: 1618 - protein, 319 aa, Mus musculus
GGKRGRGETQQLKENLSWGGAGRAAGSGPDPLFSSFSPPAGAGDSYRADEAEANGYSSGSGRSPTADSEDEAPEDEDEEEAPEVQDAQGTEEPRGGSGGLGRSGCPGAAEVEDVDDTAAPGPRGNSPGAPGPPATATGAGSAGSTPQGAAVTTKPKRKRTGSDSKSGKPRRARTAFTYEQLVENKFKATRYLSVCERLNLALSLSLTETQVKIWFQNRRTKWKKQNPGADTSAPTGGGGGPGPGAGPGAGLPGGLSPLSPSPPMGAPLALHGPAGYPAHSPGGLVCAAQLPFLSSPAVLSPFVLGSQTYGAPAFYAPHL

SEQ ID NO: 1619 - DNA, 29572 bp, Homo sapiens
  misc_feature (1)...(29572): n = A, C, G or T/U
caggcccacgacagaggccccggacacgctcaagccaggagcagaaacacacgcatccacgcgcacaaacccacggacgcccggacgctcacacaggccgtggttggcatgcaccgtgcggtcacacacggacacggacacgcgtggatgccccgcaatgcacacgatcgtagggacacgtggatgcggacactcggacacaccgcgcggtctcaggcgcacgcacccactcggagatcacaggtcggacgcgcgggacggacacccacgcgccactcacggggtcctgcgggtgccgggaggggccgaggctttgcaggggacggggggatccgcgaaggtcgcagagaatcagaaaatgtaggggcggcgcggggagcgggcgagggcggggccggctcccaaccgccgagaggagcggnnnnnnnnnnnnnnnnnnnnnnnnnnnnnnnnnnnnnnnnnnnnnnnnnnnnnnnnnnnnnnnnnnnnnnnnnnnnnnnnnnnnnnnnnnnnnnnnnnnnnnnnnnnnnnnnnnnnnnnnnnnnnnnnnnnnnnnnnnnnnnnnnnnnnnnnnnnnnnnnnnnnnnnnnnnnnnnnnnnnnnnnnnnnnnnnnnnnnnnnnnnnnnnnnnnnnnnnnnnnnnnnnnnnnnnnnnnnnnnnnnnnnnnnnnnnnnnnnnnnnnnnnnnnnnnnnnnnnnnnnnnnnnnnnnnnnnnnnnnnnnnnnnnnnnnnnnnnnnnnnnnnnnnnnnnnnnnnnnnnnnnnnnnnnnnnnnnnnnnnnnnnnnnnnnnnnnnnnnnnnnnnnnnnnnnnnnnnnnnnnnnnnnnnntccacccacctcctgcagacaggcgcccacccttaccccctcccgcggacacgcgcccacccttaacccctcccgcggacacgcgcccacccccacccacctcccgcggacacgcgcccatctccacccacctcctgcagacaggcgcccacccttaccccctcccgcggacacgcgcccacccttaacccctcccgcggacacgcgctcaccccgactccctcccgcggacacgcgcccaccccgactccctcccgcggacacgcgcccaccccgactccctcccgcggacacgcgcccaccccgactccctcccgcggacacgcgcccaccccgactccctcccgcggacacgcgctcaccccgactccctccctgcgggcggccccaagcaggcggtggcgccagaatcactctccaaggcttccgcaggagcgttcctcaaactcctaattatgattcacgcgcgtgatgatgataatttaataatcgcggagctgcgggaggcattaacctcaattaagctcattgtgcggcctgacccgccctccctacgcgccctccgaacccagagcggccctgcagggcgggatgacggtgccgaactcgtttattgagcacctgctgtgtacctggcctctaaccccttactcctccttcctccccgcacccaccctggaagctccctgctcccctgcgccaggcaagggccgccttctcacgcctggagccctcccagaccgcatccgccgcctccctcctccctgaaaggctgcggtaaccgcggggtctccctgagcgcgctcatccctgccccttacgaccgccacagtgcccaccctgtcggaggagccacgaggagccccgtgagtgataacgggggagtgggctcctcgtggggcacggcgtgctggaagaaacgctggcacccgcgtctggggtaacggtggggaggatagaggtgaacgcatggaaccctgtcacagagggagaaactgaggcagaggagccaggtgagatgggagccaggtaagagggtgggctccaggcagacgcacggtggtggtgctgaagtcacgtcttctcaaccccaagactcagcggcctgcagtggccagggacaccacttcttccaggcgggtggtctctgctacaatgcctctgggtaacaaccccgaagacagggtcgaagcggcaccgtctcctgctctgggctgtggtcggctcagtgtgtctgcccttggtgggctcatcaggatgaaggcttcgcattggatccagttggctccacgccttcattccaagtcccaggctgagggagtaattgctccctgcagcacgttctcatggaggggggtctccaaccgtcagggggcccttatggcctgagctcagaacccacacctcaccactctgcccactgcgggtcatgggccaagaccagcttcagcgtggctggaagtgtttgttccccagaggaaggccatggattgcggagagggtaaagggaggagaattgtgggtaaattctcccatgggtcacactgctgattcaattaacgcttccccagttggatggggctgcaatgagggaagacgggccctactgtgaatgcacaccacacatcctggctcctgatttgagctggagccaagctccacagcatggcagggatgaccactccccctgtgcaggggactccccaggtctctgtttccatcctcttcctgcaccgcctctggggaagacaaagccgagccagaggcagggattcagatgtgttcagatgcccgggacttaccaaaggcagggatatcaagagggagtccaggaaagacagagccagaactggacaaaaatacctctctgtaaagtcccccgtggcctgatccgagggcagctcgggggtgtaaatcccaccagccgctcagccatggaggagggggtagtgtgctcccaggtgtctctgggggcccagggaagttcctccaagttaagccatgacacagcagcccagagcaggggtccaccagcccacacggagaaaatggatcagtgccagaccacactgttcgtggaggacagagtcaaggtggccagagccgtttccctgcccaggggctagacagatggaccaggatgtcagacaactaaaagggtggaggtggagtgcacaggctgaaacactgccccacctgccagcattgggcccttcactcttccctgtcccagaatgcttttgccttttgcatcctgcctctacagtctcgggggcacgggggcggggggggggatccgccagtgaacagataaaggtcacgtgacgtgttaaggcagaactgtgaaagcttgggttggaggggtgcacaggatggcacctgccttacttgaggaaatcagggtggcctccaggtggtgctgccacgaaggggagcagggatgatgcatgtgcactagtgagtggctaagggcaccgagaggacatggcagctcggccatccaggcacagggaggggctcggagtaaccaccagcagagaggacatggcagctcagccatccaggcacagggaggggctcggagtaaccaccagcagagaggacatggcggctcggccatccaggcacagggaggggctcggagtaaccaccagcagagaggacagctcggccatccaggcacagggaggggcttggagtaccgggtacaggcctagggagcatacaggatagctggaaggatccagccaggaatggcccctgataccaggctgcagagcctagacatggtccctggcacttctggaaggggaggagtactattcaatttacattttagaatgatggaaagcagacaggaggcagccagtctggggcagtggcaggcagaggccaggcggccaaggcacccccagacccccactcaggaggggtctcctgaccatgtgtctccaggcaacatgactctggtgattcccacacagacccctagacgactgtggcagccacagacaggagaatgcctatgcttcaagccctgagtaccagcaggagcttggggacaagggagggaatgtggccatcccaggcaggctccaacctgggcatgctgctgccccatgcagtgtagccagtggcaggcagaggccagagagggcaggggcaataagagagagtctggagggacagagcctgaggagtaaggacccctctgggcttggatgctttctctcagagaccagtcacacaattacctatgactttgcacatgaaaaacgctgtgtgaaaggaacccagcgttcacataaaaatcctaccacttaccggccaggggcactgagcacagcgtgggtcctcactggcctcaggctatgcatctgtaaggtggtaatccctgccccggcctgaccctgtggtcggtaaaccctcaggagccagggtgctctccaagttcaaccagcagcacccgggagagggagccagccgcggccgcctctgcagccctgatgggaagccaggcgtcctgccctccacatagcacccatgtccccagttgttccaattgtttgtatcttcttgtttttaagtttaaagggtttcagcctcacctttgcatctctggtgggctcctcgccagaagccaggccctgtgccacgtgctttccctccttaactcgcgcagcttgcaggtaggagaatggaagcccacgcggtgaacggcctggtaaacttctggccctttggtggatgctggcttggtcgaggtgaacgggctggcttttgatcgggctgtgtaatgtacgccgtgccaagactccacacacagcctgccgccctcttcctcccctggggcatcccaaagtttgagaaggagtcgagggcggggcagggaggtcagagacggcgggctggaggccaggagaccctcggagtttctggcgctgtccgcggtgctgaacacggcccgagcccgtggcctccgggggcgaggtgggagcgcgctgtccgcggtgctggcgctgttcgcagtgctgaagctgccctgtgcggaggcacacgaggctggggccgcgggtctccagagctgacgtgctctcgaggtcagagcctgtgtcccctctcgcttctggtgtcccgagtgtggtacactcattctggaggagtcacaggcccctaagtgggcatatcttagagaaggaacccaggcctgaaagcagagggctcccctctgacttcccaaactccggtgatcaacatgggtcgccgtggcgcgagtgtgtgcaggggcgagaagaggggacacaggagcctccttccccgtcctccgcccgcaccccccgcccccgtccggccgatgcaaggaggtgcacagcgaggctgtggggccaagtgtggggtggagtgcacttcgcacgaggcaaacactatacaaagtggaggtgattatgcctctgcccaaccctagagcccctgggaccctgctgcctttccagcctatccagctaaagctttccaggcaaagagagaagggacttccctccatgcaccaagtaaaaggctgtgaccttgtcgtcatcattcaccccatgaggggagggtatcaggacctggaagctcgcatgggactcaacccctacaattgacagatgaaaaaaatgcggcggggggtggttcataaacccatgctgagttcgtggcagtggtggctggctccccctcttcctcttgtccctcaaactttaaaaacctctaatgctggggagaaaatcctcgaagtctcagctcccacccactcctttcctcatgctcccttctaagaccctttaccaccacccatacttctgctcctgtcccaggcgtgttcctgccaacgcccacacccaagcccatcgtgaccccacctggacctgcagcgggggagagctctgcaatggagggaatgtttcctgtgcactgggcaggcaggggcagcccacccccggcactgatttcacctgtcagtgcccacctggggccctgcaagtgaagctggtgtcttggagataacccgagatggcagatgggcagagattgcacaaatgggggtctaattgacaatcaattgtgattaggagtgaaaggacgtctttatagccccagacatgctaggttgagatcggggaggggaggtatgtttctggggatctgagagaggaggaggggtgccctgcatctctgtggcttaccttgttcctcagagatgggggaggggtggggcaggggagcatgcagcgatgccgtctccaagcctttcccaggggaggcgacgggaggtgccctgtgtagctccgggggtcccctcaggctccaccacccggcccctgctcctctgaacctgactgagaacttcgaagttcattaccctgcccgctgcggctcacacgaggatggtgtggggcagagaggggaggggagggaaggctcgaggagaaccttggggcccacaaacttcagatagccacgtgctttcgtcaaagtggcactcaaccctggccagcccccgcccccatcagggagaacattctgcagtgctcgatgtgcacgtgtttgctgggaaacgagtcataattgtatattataacgcaattccgttatgctattccctatcgtatttaatgtgttatatttactatgttttagcgacaaccatcatacatacttcatctatgttgtataaaacatcttttccatgtgattgtgttcgttttgaaagttgtactaagagggctgtgtgcccattacccatcccttcctcacgcgcaggtgttccaactgtctgggacccggcagggtgggtgtgtggctactagtgggagatgtttggctgaggtcaggccgtggcagggacggaagctttgagtgggttgtgcttgcagggagaccggcagccaggtcaggggtatgcccttgagacctgcccggccctccccgacccaggcctcgcccgccacccagcggtctcctggggagggggcgcagcaacctggaaagtgtctggtgtgcccctcctcgggaaacagtgaaagaggaaccaacaccagcgcggagctggcgctggcgctggcggggaagagggagatgcagggatgccagcgcgtttgtgagggctctgcagggcttgtgtgcctgggtgctcgtgaacggatgctcgtgaacggatgctgggtgcttgtgtgtgctacgcacttgtgaacgagtgtgtgtgtgagtggcgtgtgcacctctatatccaaatttagctgggggagggggagagagtgaagaccaaggtgtgggcaaaggagataattgcctccctgcgatgggagattacccaccctccttccccagaggtgatttataagttaaagataaagaataatcaagtcctggcaaggaaggacacggtgnnnnnnnnnnnnnnnnnnnnnnnnnnnnnnnnnnnnnnnnnnnnnnnnnnnnnnnnnnnnnnnnnnnnnnnnnnnnnnnnnnnnnnnnnnnnnnnnnnnnnnnnnnnnnnnnnnnnnnnnnnnnnnnnnnnnnnnnnnnnnnnnnnnnnnnnnnnnnnnnnnnnnnnnnnnnnnnnnnnnnnnnnnnnnnnnnnnnnnnnnnnnnnnnnnnnnnnnnnnnnnnnnnnnnnnnnnnnnnnnnnnnnnnnnnnnnnnnnnnnnnnnnnnnnnnnnnnnnnnnnnnnnnnnnnnnnnnnnnnnnnnnnnnnnnnnnnnnnnnnnnnnnnnnnnnnnnnnnnnnnnnnnnnnnnnnnnnnnnnnnnnnnnnnnnnnnnnnnnnnnnnnnnnnnnnnnnnnnnnnnnnnnnnnnnnnnnnnnnnnnnnnnnnnnnnnnnnnnnnnnnnnnnnnnnnnnnnnnnnnnnnnnnnnnnnnnnnnnnnnnnnnnnnnnnnnnnnnnnnnnnnnnnnnnnnnnnnnnnnnnnnnnnnnnnnnnnnnnnnnnnnnnnnnnnnnnnnnnnnnnnnnnnnnnnnnnnnnnnnnnnnnnnnnnnnnnnnnnnnnnnnnnnnnnnnnnnnnnnnnnnnnnnnnnnnnnnnnnnnnnnnnnnnnnnnnnnnnnnnnnnnnnnnnnnnnnnnnnnnnnnnnnnnnnnnnnnnnnnnnnnnnnnnnnnnnnnnnnnnnnnnnnnnnnnnnnnnnnnnnnnnnnnnnnnnnnnnnnnnnnnnnnnnnnnnnnnnnnnnnnnnnnnnnnnnnnnnnnnnnnnnnnnnnnnnnnnnnnnnnnnnnnnnnnnnnnnnnnnnnnnnnnnnnnnnnnnnnnnnnnnnnnnnnnnnnnnnnnnnnnnnnnnnnnnnnnnnnnnnnnnnnnnnnnnnnnnnnnnnnnnnnnnnnnnnnnnnnnnnnnnnnnnnnnnnnnnnnnnnnnnnnnnnnnnnnnnnnnnnnnnnnnnnnnnnnnnnnnnnnnnnnnnnnnnnnnnnnnnnnnnnnnnnnnnnnnnnnnnnnnnnnnnnnnnnnnnnnnnnnnnnnnnnnnnnnnnnnnnnnnnnnnnnnnnnnnnnnnnnnnnnnnnnnnnnnnnnnnnnnnnnnnnnnnnnnnnnnnnnnnnnnnnnnnnnnnnnnnnnnnnnnnnnnnnnnnnnnnnnnnnnnnnnnnnnnnnnnnnnnnnnnnnnnnnnnnnnnnnnnnnnnnnnnnnnnnnnnnnnnnnnnnnnnnnnnnnnnnnnnnnnnnnnnnnnnnnnnnnnnnnnnnnnnnnnnnnnnnnnnnnnnnnnnnnnnnnnnnnnnnnnnnnnnnnnnnnnnnnnnnnnnnnnnnnnnnnnnnnnnnnnnnnnnnnnnnnnnnnnnnnnnnnnnnnnnnnnnnnnnnnnnnnnnnnnnnnnnnnnnnnnnnnnnnnnnnnnnnnnnnnnnnnnnnnnnnnnnnnnnnnnnnnnnnnnnnnnnnnnnnnnnnnnnnnnnnnnnnnnnnnnnnnnnnnnnnnnnnnnnnnnnnnnnnnnnnnnnnnnnnnnnnnnnnnnnnnnnnnnnnnnnnnnnnnnnnnnnnnnnnnnnnnnnnnnnnnnnnnnnnnnnnnnnnnnnnnnnnnnnnnnnnnnnnnnnnnnnnnnnnnnnnnnnnnnnnnnnnnnnnnnnnnnnnnnnnnnnnnnnnnnnnnnnnnnnnnnnnnnnnnnnnnnnnnnnnnnnnnnnnnnnnnnnnnnnnnnnnnnnnnnnnnnnnnnnnnnnnnnnnnnnnnnnnnnnnnnnnnnnnnnnnnnnnnnnnnnnnnnnnnnnnnnnnnnnnnnnnnnnnnnnnnnnnnnnnnnnnnnnnnnnnnnnnnnnnnnnnnnnnnnnnnnnnnnnnnnnnnnnnnnnnnnnnnnnnnnnnnnnnnnnnnnnnnnnnnnnnnnnnnnnnnnnnnnnnnnnnnnnnnnnnnnnnnnnnnnnnnnnnnnnnnnnnnnnnnnnnnnnnnnnccctgcgccccacctccttctcggtactggtacatgctggaccccaacaagttcaacagcaggaggcgtcgttgcgtgctgctgggcccagtggctcccgctgcgtgcgccccttgcgcttcggccccatgcgcccctgcacccgccgcctcgggacgcccgccacgcgcggaggagctggagcgccgcgccctcgccggcgccgggggagtcggagccgccggatctgagccgccgagtgagtaggatgcgcccggcaccaggtcgcagggacgggggaccggaggcttctatgcgtttacgaccctgggacaccgtggcgagttgggtctggcccacgccgaggctccgtggaaagttcgctgagcgccgggtccgcaccagcccacccgtggcctccatccgacccggactgcagggcctgcatcgccaggctcctctggagaagcttagccgggtcaggcccaggggctgcagggctgtgaggccggtccagggttcgcctccgcgcgtctccggcctagaagggtagttggtgcaggaggcgaggggccgctcgcggtggctggcccgtgacctccccgcccccactgtgcccgcccgaggcctccctccctccctcctttctccctctctctctttttttttggacaaatcagactaattgtgacaaaacgctggttatcgctggaaaaacaattaaatcccttcgattacagttaaggggaaatgtgcttagcggcggaaagcggccggtaatggggcggcccgcgcccccggtcgggtcgatatcccattacggcgcgtgcatatctctttcaagcaccttgcaaactccccccgaacatctaaattatagggtcaaaattcggataattactcgattaaaacctattacacttattaggggccgctattgatcgcgaattgcattcgacctgctcctgattgctttttgtgtcccctcctcctccctccaactttccggccctactgaagcacagggaggacagcgcggggcggaccgggctgggccgcggccaccggctctgcgcctggaggctgcgggccgcacctgcgcggggcctcttccgggtcggccgagatgaagggcgaacaaatccggctgagtggaggggaccctacggactctgcggcggctgcgctcagagcctccacctgcggggagtctatggggcggaaggccgggatcccgctgaagccgggaaggcgcgcgcatactacagccggggagtcatctgggccaggcacccggggcagggctgggacggcgctcgcggtcgtctaggggcggatcctactcctgctgagggtcgcggggacccagaccacctgctggcctccatgccaggtggccagtcgccctggaggaatctgacaggagcgattggtcatttcttaccggagatttcggttccgacctggccggagagcaggccgcggctgccgctgggcagctctgtggagggcacctgccccgactcctcctgacttaggcccccagtgccggggcataggcgaccctgcctgggagagatgctttcttccaaatttcagagactcaaaatgcagtcacttcagggcctctgcttggaggatgcggagctgctgttcagactcggccgaccgggcctttaggccgcggggagccactccgacctgcacgcccgcccagccctcctggtgaggccgagcagggccctacccgcggcaactctgcgcaggggccgaggcgcgggcaggggagcctgggctgaccctcgcgaccgaagctcagggcctggaggcttgaggtagggtcggggccagggcataggatttgggtcccccaagccccattctctcggccggctccggccccaccgccgggcctgttattaaatgcccggcaattggctggccctgcgccggcggtaattggggggtaatatacgccgaaataaattaaatggccttaactagtttgtacactacacaaaatgagtttaattaagtgtgtatcagccctgcggatcgatcagagcttccactccgctgtgatctccgcagccgggcccggcccgcagcacccgtccagccccgctcaggcaaaaacgcccggcgccgcgagaacgggcagcgcggggcgagggggaccctctccatagaaagaaacaagcaagggaccgagaggagacgcgggcggcgggagggaaggacaggccgaggggagggaaacgacagagcgaaggagagagagaggaggcgggtgacgaagcaggaggcgctgagcagggggcgggagggaaccctgggggaggaagcggggcgcgcggagggcgggatctgggaaccggccggtcctaactgccctgccctgtccttgtccctcccgcccgcagacgccggcgaccccttcaaggcaggggaggccgagaccaacgacaccaacggctacagcagcggcggcggcggccacagcccgagcgcggacagcggggacgaggttccccgacgacgaggacgacgacgaggacgaagcgcccgagacggaggcggcgcgaggcgcggaggaggcgcggggaggcggcggcggcctcggggcccgcgggtcgggttgccagggcgcggctgagaccgacgcgtacccccggagccaccgtcgacgaggcagcggcccccgggaccccgcgagaactcgcccgttgccccgggcccaccgggaggtgcagcggcgccggggggcgcggggaccaccccgcagggcacggcgacggcggcgaagcccaagcggaagcgcacggggtccgactccaagtccgggaagccgcggcgagcgcgcaccgccttcacctacgagcagctcgtggcgctggagaacaagttcaaggccacgcgctacctgtcggtgtgcgagcgcctcaacctggcgctgtcgctcagcctcaccgagacgcaggtgaagatctggttccagaaccgccgaaccaagtggaagaagcagaacccgggcgccgacaccagcgctccgaccggcggcgggggcggaccgggaccgggggccgggcctggcacggggctgcccggcggcctcagcccgctcagcccctcgccgcccatgggcgccccgctcggcatgcacggcccggccgggtacccggcgcacggccccggaaggcctggtgtgcagccgcgcagctgccgttcctgtcgagcccggcggtgctctcgcccttcgtgctgggctcgcagacctacggggcgcccgcnnnnnnnnnnnnnnnnnnnnnnnnnnnnnnnnnnnnnnnnnnnnnnnnnnnnnnnnnnnnnnnnnnnnnnnnnnnnnnnnnnnnnnnnnnnnnnnnnnnnnnnnnnnnnnnnnnnnnnnnnnnnnnnnnnnnnnnnnnnnnnnnnnnnnnnnnnnnnnnnnnnnnnnnnnnnnnnnnnnnnnnnnnnnnnnnnnnnnnnnnnnnnnnnnnnnnnnnnnnnnnnnnnnnnnnnnnnnnnnnnnnnnnnnnnnnnnnnnnnnnnnnnnnnnnnnnnnnnnnnnnnnnnnnnnnnnnnnnnnnnnnnnnnnnnnnnnnnnnnnnnnnnnnnnnnnnnnnnnnnnnnnnnnnnnnnnnnnnnnnnnnnnnnnnnnnnnnnnnnnnnnnnnnnnnnnnnnnnnnnnnnnnnnnnnnnnnnnnnnnnnnnnnnnnnnnnnnnnnnnnnnnnnnnnnnnnnnnnnnnnnnnnnnnnnnnnnnnnnnnnnnnnnnnnnnnnnnnnnnnnnnnnnnnnnnnnnnnnnnnnnnnnnnnnnnnnnnnnnnnnnnnnnnnnnnnnnnnnnnnnnnnnnnnnnnnnnnnnnnnnnnnnnnnnnnnnnnnnnnnnnnnnnnnnnnnnnnnnnnnnnnnnnnnnnnnnnnnnnnnnnnnnnnnnnnnnnnnnnnnnnnnnnnnnnnnnnnnnnnnnnnnnnnnnnnnnnnnnnnnnnnnnnnnnnnnnnnnnnnnnnnnnnnnnnnnnnnnnnnnnnnnnnnnnnnnnnnnnnnnnnnnnnnnnnnnnnnnnnnnnnnnnnnnnnnnnnnnnnnnnnnnnnnnnnnnnnnnnnnnnnnnnnnnnnnnnnnnnnnnnnnnnnnnnnnnnnnnnnnnnnnnnnnnnnnnnnnnnnnnnnnnnnnnnnnnnnnnnnnnnnnnnnnnnnnnnnnnnnnnnnnnnnnnnnnnnnnnnnnnnnnnnnnnnnnnnnnnnnnnnnnnnnnnnnnnnnnnnnnnnnnnnnnnnnnnnnnnnnnnnnnnnnnnnnnnnnnnnnnnnnnnnnnnnnnnnnnnnnnnnnnnnnnnnnnnnnnnnnnnnnnnnnnnnnnnnnnnnnnnnnnnnnnnnnnnnnnnnnnnnnnnnnnnnnnnnnnnnnnnnnnnnnnnnnnnnnnnnnnnnnnnnnnnnnnnnnnnnnnnnnnnnnnnnnnnnnnnnnnnnnnnnnnnnnnnnnnnnnnnnnnnnnnnnnnnnnnnnnnnnnnnnnnnnnnnnnnnnnnnnnnnnnnnnnnnnnnnnnnnnnnnnnnnnnnnnnnnnnnnnnnnnnnnnnnnnnnnnnnnnnnnnnnnnnnnnnnnnnnnnnnnnnnnnnnnnnnnnnnnnnnnnnnnnnnnnnnnnnnnnnnnnnnnnnnnnnnnnnnnnnnnnnnnnnnnnnnnnnnnnnnnnnnnnnnnnnnnnnnnnnnnnnnnnnnnnnnnnnnnnnnnnnnnnnnnnnnnnnnnnnnnnnnnnnnnnnnnnnnnnnnnnnnnnnnnnnnnnnnnnnnnnnnnnnnnnnnnnnnnnnnnnnnnnnnnnnnnnnnnnnnnnnnnnnnnnnnnnnnnnnnnnnnnnnnnnnnnnnnnnnnnnnnnnnnnnnnnnnnnnnnnnnnnnnnnnnnnnnnnnnnnnnnnnnnnnnnnnnnnnnnnnnnnnnnnnnnnnnnnnnnnnnnnnnnnnnnnnnnnnnnnnnnnnnnnnnnnnnnnnnnnnnnnnnnnnnnnnnnnnnnnnnnnnnnnnnnnnnnnnnnnnnnnnnnnnnnnnnnnnnnnnnnnnnnnnnnnnnnnnnnnnnnnnnnnnnnnnnnnnnnnnnnnnnnnnnnnnnnnnnnnnnnnnnnnnnnnnnnnnnnnnnnnnnnnnnnnnnnnnnnnnnnnnnnnnnnnnnnnnnnnnnnnnnnnnnnnnnnnnnnnnnnnnnnnnnnnnnnnnnnnnnnnnnnnnnnnnnnnnnnnnnnnnnnnnnnnnnnnnnnnnnnnnnnnnnnnnnnnnnnnnnnnnnnnnnnnnnnnnnnnnnnnnnnnnnnnnnnnnnnnnnnnnnnnnnnnnnnnnnnnnnnnnnnnnnnnnnnnnnnnnnnnnnnnnnnnnnnnnnnnnnnnnnnnnnnnnnnnnnnnnnnnnnnnnnnnnnnnnnnnnnnnnnnnnnnnnnnnnnnnnnnnnnnnnnnnnnnnnnnnnnnnnnnnnnnnnnnnnnnnnnnnnnnnnnnnnnnnnnnnnnnnnnnnnnnnnnnnnnnnnnnnnnnnnnnnnnnnnnnnnnnnnnnnnnnnnnnnnnnnnnnnnnnnnnnnnnnnnnnnnnnnnnnnnnnnnnnnnnnnnnnnnnnnnnnnnnnnnnnnnnnnnnnnnnnnnnnnnnnnnnnnnnnnnnnnnnnnnnnnnnnnnnnnnnnnnnnnnnnnnnnnnnnnnnnnnnnnnnnnnnnnnnnnnnnnnnnnnnnnnnnnnnnnnnnnnnnnnnnnnnnnnnnnnnnnnnnnnnnnnnnnnnnnnnnnnnnnnnnnnnnnnnnnnnnnnnnnnnnnnnnnnnnnnnnnnnnnnnnnnnnnnnnnnnnnnnnnnnnnnnnnnnnnnnnnnnnnnnnnnnnnnnnnnnnnnnnnnnnnnnnnnnnnnnnnnnnnnnnnnnnnnnnnnnnagctcagacttgctcggtgggggtccatgagggaaggcgagccacctgcaggtggccaagtgtagccagagggtcgactcacagctgaagccagtgcagcgggcttggcctaagctgggcactggggctgctgagtgggaaagcagctgctgcgtggccaggaggaacccaggtctgtgctgcaagggccttcccctttgctgagcttgctggaacattccaggagctcacagccccacagggagatgatagaaggtggctgcgacggtgcaggccagattcagacccactcagagccgggccagaccgctgtgtgcagccctcccatggagcttagatcctggctccccgtccctccagcttccacatgcccccaccctggcctcctctgtctcctcccctcaagcctcagccagaaacacagagccacaccggagggccctctagcagtgcccctgggctgcaggatgggatggagggtatgggccgggggctgtgaggtctgggaagcaatacccccctccttgcaccaccccttctctaagctccctggacagcccacagcctcatgctgcaggcatggggggcatttcctccagtctctgattcacagtcactctgcagcggaccctcgtcggagtcggactgcgtgcaaagccacctgagcctcccactgtgctttgctgagagtcacatgtgggaaactgaggcccggcagtcatggggcttgctgggggcagtgccagctctggtgccagtgggtgccctgctccctcctgaaggagcctccactttttagcccacactcctactgggtccccaggcccccagtctccctgggagagttggggagccattcccttgcctgcctcccagggagccctcgggctgccccaccatccccatttccaccaggtttgggcctcccctgcccgccatttccagtctaggctgcctgtgcctgactcagtttcagctccctgggcctgtgctgcaggcagaggtgagcgggagccttgttaggggtctcaacgtgtcccccactttggtgtcagggccgtgagggaaggtctcaaccccaggatctgagggcactcttccatggaccctcctcctagggctcaggacccatcttgccctggaccacacctgccccaagttcccagaaccacacacatgtcgttgctgcaaagccaggcacagaaggggcctcttgtcaagcgagcatgagcccagacaagggcggcgtttgctctcacgccctgggctcccgtctcctgcccagggaccgctgagcccagacggtaaggggcctcccattgaggccacctccccacccccaccagccgatggtgctgtggtccattgctgtgtgggtcaggcctgggtttggctgcgtgtaagagaaaacctgaatgaagagagttgaaaggagactgtttactttctctttgtgagggaattctggccgtggcagccctgggcagttttgagaccttcactgagtccttggagacccagctcctggctctctgtgctgcatcaggcctgggcgggcctcagcctcacagaccccaatggaaactgaggctccagccaccacatcctcacccccggctgcaaacaggaagaaagggagtggccagcaacacccctctcttttaaggagctttcccggaagcccacacaacacagctgcttatgtcccattggccagagctgggtcacgggccctctcttagccaagggaggctgggaagtgcagtctccccccaggcatctcactcctagtgaaaggtgaggatggattggggccaccggctgcccctgccgagcccccctgtgctccccacccatgcccacctgcccacacccccagccccaggcagctgggcttctgaagaaagtcgccctcagcccgcctggtcttttccgaagcccagggcctcgaccttggtgggcacccagctcctacaccctaaggtgtctggtgtaccctctccataaccccaccctgggttggccacaggtccaagcccatcttccagccataggatcttgtcacctgcctgcgtcctgccaggggagacagcccctgctgggcttcagatgcgtccagtgtctccaggcttaggcataaccctccctggaccccgtgtggcctccagctctccccctttcctcccagcctccagccaaagtatcgaaagagccgtctacacctgctgtctacacttcctcctcacttctccacccctaaggaggctctcgccgtcactcgggcccttggctgccccatcctggcgtggcctcctcagccccctgctcacttggtggctggttcctcctgctccgagtcctgggcagcctgggcttggggaaccctcatcctccacttgccttcctgccatggcaatggtgtgcctggccctgtccttgccccgcgatgtcctggcaatggtgtgcttctccctgtccttgccccgcagtgtcctggtaatggtgtgcctcgccctgtccttgccctgcgatgtcccccagggggccaggggccctccaggcaccacaaagccagaccaagctcctcccagaccaagccagccccacagcctcagagcaaaccccaggcaccaagcaccctccccacatccaacccaatctacccatatccagatgcccgaaaacaccctgcatccaacctgatctacccacatccagatgcccgaaaacacccggcatccaacctgatctactcacagccagatgcccgaaaacaccctgnnnnnnnnnnnnnnnnnnnncctccacttgccttcctgccatggtcaatggtgtgcctggccctgtccttgccccgcgatgtcctggcaatggtgtgcttctccctgtccttgccccgcagtgtcctggtaatggtgtgcctcgccctgtccttgccctgcgatgtccccccgggggccaggggccctccaggcaccacaaagccagaccaagctcctcccagaccaagccagccccacagcctcagagcaaaccccaggcaccaagcaccctccccacatccaacccaatctacccatatccagatgcccgaaaacaccctgcatccaacctgatctacccacatccagatgcccgaaaacaccctgcatccaacctgatctacccacatccagatgcccgaaagcacccggcatccaacctgatctacccacatccagatgcccgaaagcacccggcatccaacctgatctacccacatccagatgcccgaaaacaccctgcatccaacatcccccctggccaccgccacgttgtccccccatccctaggacctccctgcggtgctcaggcctccccacacccagtgtcctgcttgtgatggccacctgggtcccccatctcttccctggtgactgagtgccccctcactcctggtctcttctggccagctgtgcacagcgtcagctgggaggcggggaggtgaggctggacgaatagctcagcagcagagggaggtgagcacagggaggaaggggcaggggtgggcagccaggcagggctgcaggactgcacctgagggaggaggcagggctgagccccatccctgccctcacgaccactgtggcccccacctgcctctggcactgttgcccctcccccatcccaaggtcaccttttcatccacagaggcccgtggggtgggggcatctcatccactggggggggaccttgctcatgggtgacaacctggggatgtccatgtcccacctcctcccgactgccctgcagtgtggtcccctttggagacagctctgctggtgcagacgccttctctctttccctgggaggctgtggctgagcgctcatctcagatgagctgagctccacatgtcctgcctctggggcagcaggcagctgggtgctgcctgtgactaggttctggccaagtcgacatgaacagtgtgtgtgggggtaggggactgagaaggctccttatgggaatcagctcagaggggaggcaaagccctcctccttccttctgcagacctggtgatggctggagccccagcagccaccttgggccatgaggtagccttggggttggaggccacgtgctctgatactgagccaggaactggaaggtgcttgggggcgcctacccttggaccctgattcaataggacacaaacccttctgtctacgagccactcttatttggagtttctggttctgtgttgctaaccctgacaccactttccatggtggcccatccaccccagcgctggggctgtgacccatgcccaccagtcctcccttggtcactcctcgcactcaccccctgctgctctccgggccaacctcagccagtctgccctggatgagggcagcagcatgctggaccagctggcacgggccccctcccactgtgagccgtaccagtagcccctacgtgcatctgcaggccagacccccccaggctcctcccccccctccatctgcctggctcatggggacccaaaccactttgtggcaagtgtgggtggaaggggtttgctgaggggatctgaggagggcccacccccagcacccccttagtgccaagtcactgacagtgccctgagcccgcagtgctggagctgctcccaggtgcacaggccccacccctcaccccaccagccagaagggccggcccagcacccccaccccacagggcccctcacttggtcacaaacactgagtcacaggtttgtcttttaatcagcatccatgaaaattcattaaaaggtctgatacgaaaagcaccaggctaacaaatcagtcctgaattcaattttacaaaaacaccctctcctcttccatctcatccctaatattcctacgttatctcgaggtgcagagaaatataaaagggatccttgacataaaaacgtattaaaaagccaccatgagtagaatgtacggtaacagcgtctgactcggccggcaggacaggaaacctacagaaccaccatgccagggctttgtgtgagcaggcgggcactccacatgggcacgtgtgtgagcaggcaggcactccacatgggcacgtgtgagcaggcgggcactccacatgggcacgtgtgtgagcaggcgggcactccacatgggcacgtgtgagcaggcgggcactccacatgggcacgtgtgagcaggcgggcactccacatcggcatgtgtgtgagcaggcgggcactccacaatggcacgtgtgagcaggcgggcactccatatgggcacgtgagcaggcgggcactccacgtcggcacgtgtgagcaggcgggcactccgcgtcggcacgtgtgagcaggcgggcactccgcgtcggcacgtgtgagcaggcgggcactccgcatgggcacgtgtgagcaggcgggcactccgcatcggcacgtgtgagcaggcgggcactccgcatcggcacgtgtgagcaggcgggcactccgcatcggcacgtgtgagcaggcgggcactccacatgggcacgtgtgtgagcaggcggcactccacatcggcacatgtgagcaggtgggcactccacatgggcacatgagcaggtgggcactccacatggacacgtgtgtgagcaggcgggcactccacatgggcacgtgtgagcaggcgggcactccacatgggcatgtgtgagcaggtgggcactccgcatcggcatgtgtgagcaggcgggcactccacatgggcacatgagcaggcgggcactccacatgggcatgtgtgagcaggcgggcactccacatgggcacgtgtgagcaggcgggcactccacattggcacaaagcgagggctcatgcataagaggtgcagggacacctggacagctatttgaaatttaaaaactgggtttcctggctcacattttgtatcaaaaactagaagtagatcaatgatttcaatatgaaaatgaaacccataaaagtactagaagaaaacatggaaaacatttcaaatataatctttaagggggaagagcattctaactagaacacaaaacttagaagccaagaaagattgataattcaactacataactcatgaaaggaagatctgaggaacgagatgcccacagtggccgctgagaagctctgccacactcctggaggcatggaaggctgtgcccacacaggcacagagctgtgtgtgtgcccgagaggaacctgagctgccctggccctcacctctggctggctttgtggctgtgtgcaagtaagaagtgaaggcaaaggcacagttggcagctgcctgctggagcactgaccacatatcaactgcgtgtcagcagaaccgcgatggagcgctgaaggcacactcaccacgcatcaactgcgtgtcggcagaaccgtgagagttactggtgcaaagcacttaaaggggtcctctgtccagtcactggctgaacatgaagctgatgaggtggacacttcaaattagtccagaacacacactaaacaaaaggtaacagcaacagaacaacaataaactcgtggagagggtatctgatttccagagttgcacagcacattattaaagtgtccagtcttcaaaaaatacatatatatgagaccacaaagaaagagtatgttatttccttggctctgacatgggaaaaaaggtcatcaataggaacttcccctgaataagccctgatgttgaacttagtagacaagtcacctatctatcttatcttatcctatctatctatctatctatctatctatctatctatctatctaatctatctatctatctagttttgaaagcgtctcgctctgtggcccaggctggagtacaatggctcgatcctggctcactgcaacctctgcctcccgggttcaagcaattctcctgcctctgcctcccaagtagctgggattacaggtgcacaccaccacgcccggcttagacaagtactttaaatcagcttctacacatatgttcaaataactaaaggaaactgtgtctacagaattaaagtatgagaatgtttcactaaacaaagaatatgagtaaagatacagaaattataggagagagccaaatggaagtttggagtagaaaagtacaataactgaaatgaaaaattcactagagcagcttgacatcaggttttgtttggcaaaagcatctgtgaccttgaagataggtcaactgagatgacccattctgagaagaagaaaaaattccggaataaaggaaagtcaaggaggcctccaaggctgtgcccagctccacatcaacacacgtagctggagtccaagtgggggaagagaacatggacataaaatatttcgagaaacgacaacctaaaatttcccaaatttgcagaaccacaatggagcgctgaaggcatactcaccacacatcaactgtgtgtcagcagaaccatgagagttactggtgcaaagcacttaaaggggtcccctgtccagtcactggctgaacatgaagctgacaaaaccgaaggattcaatacccacattcaatatcaatataactaggcagaagatcaataagtgaagagaagacgtaaacaatcagactacaagaaatattaacctctatatccaagaagctcaaagaactgcaggtaggacacactgaaagatccacaattagacacaccacagtcaaacagtgagaagctaaaaagagactgagacatggtgcggtgctcccgccatggaaaccacagatgccagaggcagtggaatgacatctatagaggactgaaagaaaaagagggccaaccaagtcagccatatccagcacaattattcttcagaagagaaggaaaaattacaacattctcagataaacaaaaacaaagagaattcattgctagaagatctgtcctacaagaaatacttgaggctgaagtccaagacaccacactcaaatccacacaaagagcaccaaaaaagacaactgcaaagccagcaacagagacagcagaaactcatttctgtttgtacatcttttcttcttctatgtgatttaaaagacaactgcataaagcaataattacaagactgctgacggacttacaatctaaaaggtagcatttatatgacaaatacagcaccaagaagctgagaggaaacaaagctacttgaagtgaaggtttttgtacattatattaagttcatctgaacacttgattggttttacgttgttactgtaatactcagagcagctgctaagaaagttacttttaaaaaaacccagtaaaacagacaaggaaattacaatgttacaagagaattaaatgtccatttaacacaaaaaagtaatggagaaataaaggaagaaagacaaaaaagacaatatagtaaacaaatttagaaatggcagatacaaatccaactttctcagtaatcacactgaatgtaaatggattaaacatccctctcaaacagcagagaccagcaggacagatgaaaaacatgatcccactatgtgctgtctacaagaaacacacttttgattcagagcagagaccagaaagacagatgagaaacactatcctactatatgctgtttacaagaaacacactttagattcagagatacaaagaaagttaaagggtgaaaaaagataccatgcaaacaataatcaaaaaagagctaagtggctatactaataacatacaaaagggacttaaagacatttttttttcactaaagacaaagaaggacatgtcataatgataaaagggtctgttcatcagaaagaaatagaaatacagatgcacttaacagagcttcaaaatttatgaaacaaaagctgacaaaactgaaggattcaatacctcacattcaatatcaatataactgggcagaagatcaataagggaagagaagacataaacaaccagactacaaaccaatcagacctaacaggcttctatacaacactacaaaccaatcagacccaacaggcttctatacaacactacaaaccaacctctgacccaacaggcatctatacaacacacacaccaacctctgacccaacaggcatctatacaacactacaaaccaacctctgacccaacaggcatctatacaacactagaaaccaatcagacccaacaggcatccatataacactacaaaccaatcagacccaacatgcatctatacaaccctacaaaccaatcagacccagcaggcatctatacaacactacaaaccaacctctgacccaacaggcttctatgcaacactacaaaccaatgagacccaacacacatctatacaactctacaaaccaatcagacccaacaggcatctatacaacactacaaaccaatcagacccaacaggcatctatacaacactacaaaccaacctctgacccaacaggcatctatacaacactacaaaccaatcagacccaacaggcatctatacaacactacaaaccaacctctgacccaacaggtgtctatacaacactacaaaccaatcagacccaacaggcatctatacaacactccacccaacaagagcaggatagatattcttcaacactctgggacagaaaatacggtatgccaataaaataactctcaatacatataaaagacgagaaatcatacaatctatgttttttagccataatggagtgaaataagaaatcagtaacaggccaggtatggtagctcatgcttgtaatcccagcactttgggaggcaaaagtggcaggatcacttgagcccaggagttccaacacagcctgggcaacatagtcggaccctgtctctacaacaaaatttttaaaaatttagccaggcttggtggctcatgcctgtagtctcagctactcaggaggctgaggtgggaggtcaaggctgcagtgagctgcgatcactgcactgcactccagcctgggagataaagtgagatcttgtctctcaaaaataagaaaagaagtcaataacagaaggaaacctgggaaattcacatatatgtggaaattaaacaacaaactcttaaataaccaagagataaaagaagaaatcaccagaaaaatcagaatatacttttagatttaaaaaagggaaaacacaatatagcagaacttaagggatgaagtaaatcagtgctgagataaaaatttatagctacaaatgtctatatgaaaaagatttcaaatcagtaagctaattttccatcttaagaaacaagaaaaagaagagaaaataaaacccaaagcaacccaaaggaaataataaagattacagtggaaattaacaaaataaagaatggaaaatcataggggataataaacaaaaccagaagttgtttctttaaatagatcaacaaaattgataaatctttagctagactaaggggagtaaaagagagaagaatcaaattactaaaaccagaaaatactatgaataggctgggagcattggctaacatccacaatcccagcactttgagaggtcaaggtgggagggtcacttgaggccaggagtttgacaaagatcagcctggacaacacagcaagatcctgtctccacaaaaaaattttaaagaaaattagggctgggtgtggtggctcatgcctgtaatcccagcactttgctaggctaagacaggaaaatttcttgaggccaggagtttgagaccagcctagccaacatagtgagaccccatctctaccaaaaataagcttttaaaaaattagccagtcatactgccatgcccctgtagtcttagctactcaggaagctgagatgggaagattgcttgagtctgggaggtcaaagctgtagtgagccatgattgtgctactgtactccagcctgggtgacagagcaagactctgtctcaaacaaaacaaaaccaaagacagaaaattagctgaatgtggtggtgcatgcctgtggtccttcctactggggaggctgaggtgggaggatcacttgggcccatgagtctgaggttggagtgagctatgattgcaccactgcactccagcctgggcaacagagtgagaccttgtcagttaaaaaaattttttttaatgctatgaaccattatatatgaacagattgcaacaaagaacctagaaagggacaaactcctggaaagatgcaaactactggaactaaacagatctataataaatgaagatactgaattagggaaaaaaatcccacaaagaaaagcccagccttcactggtaaattccaccaaatgtttaaataattaacaacaatctttcacaaactcttccaaaaaataggaggggagggaacacttcccacctcaatctatgaggtcagtagtgacgtgactaaagctaaagacatcacaaaaagactacagcccaatatccctcatgaatacagatgcaaaatcctagcaaaccaaagccagcagcatagaaaaaggattatacaccatgaacaagtagaatttgccccatgaatgcaaggtcggttcaatatatgagaaacaatgtaatatactgtatcactataataaaggacaagaatcatactatcatctcgacagatggagaaaaagcatctgacaaaattcaatactttatgacaaaaacactcaacaaactaggaggagaaggtaactttttcaacctgatagaagcatctacacaaaactgcattgttagcatcacattcaatggtgagagaccgaaagcttcccgctaagatcaagagtaagacgaggatgtctgttctcaccacatctattcaacattgtcctggaggtactagccagagcaattaggtaagagaaataaaagaaatccagattagaaagaaagctgtttgcagatgacatgattttgtgtatggaaaatcttagggaacatacaactaattagaatgaataaacaagttcagcaaggaatgctggatacaagatcaatacacaaaagtcagttgtacttccacatattagcaatgatcagccccaaagtgaaatttggaaaacaattacatttgtgattgcttttgtaaatgcaatttataatcttttaataatttataattgcatttatagtccttttggttataaatcaaaaataataaaatatgagtaaatttaacaaaataagtgagaaacttatatactgaaaactacaaaatactgttgaaataaatttaaaaagacccaaataaatggaaagataatcagaagctcatgactcagaagatttaatattaagacggtaatacatcccaaagcaatctctagatttaatgtaattcctatcaaaaatctcagctgctttttttttttttttgaagaaactgatgagtggatcctaaaattcatttggaaatgcaagagatgcagaagagtcaaaacagccttgaagcagaacaaagtaaaacttctcacaacaaagcagcactgatcaaggcactgtggcactggcataaggttaaacaggtcaatggaatagagtcaagtgcccagaaataagcctgtacatttttggtcaactgattatcaataatggtgcgaagataattcaatggggaaaaataatgttttcaacaaatggtgctgggacaactggatatccacatgcaaaagaatgtgggctcttacaccacacacaaaacttaattcacaatggatcaaagatctacacataagagctgaaattataaaatgcttattagaaactaggtgtaaatctctgtgatcttggattaggtgatggcttctgaaatgtgacagcaaaagcataagcaacaaaagaaaaaaacagataaattgctgtacttcatcaaaattaacttttgtgcttcagaggacactatccagaaagtgaaacaacagtatggaagaaagtttttgcaaatcagctgagtgcggtggctcacacctgtaatcccagcactatgggaggccgaagtgggtggatcacgaggtcaagagatcaagaccatcccagccaacatagtgaaatcccgtctctactaaaaatacaaaaattagctgggcgtggtggtgcgcgcctgtagtcccagctactcaggacgctgacgcaggcgaatcgcttgaacccaggaggtggtagttgcagtgagccgagatcacgccattgcactccagcctggcgacagagcaagattccatttcaaaaataaataaataaataaataaagtttttgcaaatcacatgaggatctagtatccacagtatacatataaactcctggccaggagtggtggctcatgcctgtaatcccaacactttgggagaccgaagcaggaggatcgcttgaggctaggagttcgagatcaccgtgggcaacacagtgagacctcatctctacaaaaaatttaaaaaattagccaggtgttgtggtgtgtgcctgtagtcccagctacctgggaggctgacgtggaaggatggcttgagcccaggagtttgaggctgcactgagctatgattctgccactgcactcagcctgggtaagagcaaaagcccatctctaaaaggaaaaacaaaaaaaaacaactgttacaactcaagataaatcattcaattaaaaataggcaagaggtttgaatagactcctctccaaaggagatacacaaatggccagtaagcccacgagaagatgttcggtatccttctccaatgctgctgtgaacatgggtgcacaagcttccgcatggacaggttttcacctcctttgttttatacattggaggggaactgcatggataaaccttaaaaacaacgccaagtgtaagaagccagggacaagaggacacatgtatgaaaaggcacatccagaaacagaaagcagatgactgaacggttcactagcctttgtgtttgtgttaaaaacagcatttgcacaaaagtgggtttcccagagttcctctgagtggtcgcctcctggctggggaatgcacgctctgaaggctgagctgcacacacattccgtccgtgctgaaccccacaccacgacaagcactggcctcacgaggactcgcagaagccctctggaacagggtcgctgcctgtgttcacatctccaggcccgagggcctcttctgcgaggccagacccatcaccagacgatgccgaaccctgtagcagcagagcggccgtaccttcagggcattgcaacacaccatttctttacatcaaacacagtaatagacaaagcatggttactgcccagacccacgcccactctgctgtcctgagacactggcagagggagaaagtgctgatggccagtgcactgggccccgctctctagttcagtgcgtagttaaactggtttgaaaacttctcgtgcttcttctggtccatccggttcatggctgccactaccctccgcacagctgccctgtggggaaacaaggcaagat

SEQ ID NO: 1620 - DNA, 753 bp, Homo sapiens
atggggcggcccgcgcccccgggcacggcgacggcggcgaagcccaagcggaagcgcacggggtccgactccaagtccgggaagccgcggcgagcgcgcaccgccttcacctacgagcagctcgtggcgctggagaacaagttcaaggccacgcgctacctgtcggtgtgcgagcgcctcaacctggcgctgtcgctcagcctcaccgagacgcagggaccgctgagcccagacgatgcccgaaaacaccctgcatccaacctgatctacccacatccagatgcccgaaaacaccctgcatccaacctgatctacccacatccagatgcccgaaagcacccggcatccaacctgatctacccacatccagatgcccgaaagcacccggcatccaacctgatctacccacatccagatgcccgaaaacaccctgcatccaacatcccccctggccaccgccacgttgtccccccatccctaggacctccctgcgacctggtgatggctggagccccagcagccaccttgggccatgaggtagccttggggttggaggccacgtgctctgatactgagccaggaactggaagcgctggggctgtgacccatgcccaccagtcctcccttggtcactcctcgcactcaccccctgctgctctccgggccaacctcagccagtctgccctggatgagggcagcagcatgctggaccagctggcacgggccccctcccactgtgagccgtaccagtag

SEQ ID NO: 1621 - protein, 236 aa, Homo sapiens
MGRPAPPGTATAAKPKRKRTGSDSKSGKPRRARTAFTYEQLVENKFKATRYLSVCERLNLALSLSLTETQGPLSPDDARKHPNLIYPHPDARKHPNLIYPHPDARKHPNLIYPHPDARKHPNLIYPHPDARKHPNIPPGHRHVVPPSLGPPCDLVMAGAPAATLGHEVGLEATCSDTEPGTGSAGAVTHAHQSSLGHSSHSPPAALRANLSQSALDEGSSMLDQLARAPSHCEPYQ

SEQ ID NO: 1622 - DNA, 113354 bp, Mus musculus
  misc_feature (1)...(113354): n = A, C, G or T/U
gggaaggagactcggaacagatcgtgttcagggagccaatcagaatgctacagagctgctgtataggatggcaatctgggcagagtctggagctgccaatagagggggtggcaagtctgatgggggagggatgtgctttggagatttaaccatccaaaactctcttggaagtgtagtgtagctgccactgtgacaggctcagatgaaatagtccagagacatgctctgcctgtctgcctctctctcaccttctgcagtgggacacgctgttgctgtcttggatgtctcagcttccagaatcttttgtttgtttgtttgtttgtttgtttggagacagggtttttctgtgtagccctggctgacctgaaactcactctgtagaccaggctggcctcgaactcagaaatccacctacctctgcctctcgagtgctgggattaaaggcgtgcaccagaatcttgagagctatattctgtacagttgtcccagcctcaggcctgttatagcaatgcttacaggctaggttgggggcctaagggtggaagcatttagtaaggctcagactctgtacaggaccttctagagagccttgcctcacacttctccccaaaggaaggaatggatctcatgctgcttgtgggaaggtgaaatgtagacgacacatgtcactgatgtggtcccctaggaagccaggtagctcccctgaccgtacctgctgtaaggaggtgaatactgtctccacgaattgctcaggattgtcctttccaggcttaaatttgtcaagctgctttatcacaatctcaatgcatttttcatagtaggtcatctttggagcagggtcctaaaacacaccaacacaagtcacgttatccacagcctctgagttgccagtttagctgttggcagaagtagttgcaggacccttctccacaccaacaggaagtccacgagggttctgggttcagcagtgagattttggaggtaggggtttgggctcaggtaaactcaaacccactatttggttagttcatcttaggcctctgctgcacagggggtctgtttggcctcggtgggcccactgttaggtcactacttagctccagcctcagctctctgtgccctaggtttcaaggcagccaccaaagcctcacggcaggttgtgagtagggtgacccctagaatgggctcaggtcagaaagcaggcctctgaacactcctcggtccaggtgggtggctggtttcccagcaggttctatccagagcaggcaaagatgacagggtcaggaaaggctggggagtttccaggtgctgtgtcatgtgaatagcatgacccatgttcacacatccaataaatagaaatagtaagaaacatttcgattaaaatgaaaaataaataaatggagagagctgagcactaatacacactcacccctgtttcctaactgtgcatgtgatgcgaccggctgctgcggctcctgctgctttgacctccctatcaggatgggccaagacttgaactgtgagattaaataaaaccttttctccctgaagttgcttttgttagtattcatcatagaaacaggacaagaaagcaaggtcccctgtgtgaaggccagtcctggccagccatgccaagcctagtagcttatctttgaagatcaaggagctattattctaagtggtcaaagtaccaatgagagtttaagaaagaagagagaaagaggataggaatatgctcagaactgaaggatgcagctttccagaagggtgaggcctctgcagaactcacactaagttagggtactccagtgctctcagtagggattgggattagaaccagagggtcatctgtcaaaggtcctgcttgacccctgagcaatccagagaaacaggcaggggtctgggaagctgaggttgaacccaagggaatgtggttgtggaggaaatgcagatggctctaaatcagtgttcttaaccttcttagtgctgtgaccctttaatacagttagttcctcgtgttgtggtgagccattttcactgctactccatagctgcagtttcgctactgctgtgaatcgtaatgtaaatatcaggattcccgatgtacgaccccgtgaaagagctgttcaagtcccaaaggggtcaagacacacagactgagaattgctgctctagggtaacagccagtgggtgccaagacaaagaagccagaggaagaggatggggtttttctgacatctttgggggatgcctctatgtggaggagctgccagggaagcttcagtgaatagttgggggggggggaggctgggatcactgaggaccagagccccgtgtaccctggctgcattctgggccagcatactcataacagggctgcagacacacaggcaccaccagcctcactgagaaagaccccatggagtccggaaacttgtttgaagccttggtaccatgaataggatctaggggcgcaacaaggaaactccataggtacccaggaaaggcacagctaggactccatccctgctcagcccaagacgacaggtaacagggcaacttttcttatgcctagaaactctcagtgcaatctcatggtagattcctcgtgggttagtggggactttgatgataaaaggcaggaggagacatatcacacacagatccacacctgtcaaatgcagccaggtatggcattcatgtagggagaggtctagggctgacctgcaccctgtgaaaccgcctccctggagactgtccactggagccctctaccctataaggatcatttactgttggagggctggagggtaggagaaagactctgagggctcctagggtcctctccctctctggtcactcaagttactctactgagcttcctggtgagagacttgaatgctgagaggaggcttctgggaactcctgcctactctgctccccactgcatgatcattctgaatgagcaatagatgggcttcatgcccagtggccatttcaccctctctctgaatgtggcttctcttgggagggacagaaaaggccagacatttagctatgctgacatggttagattcaagcatgggaggccaggatcattttctgggacattgcctcatagactgggagacctgtggcttcccctctggcgcgctctctctctctctctctctctctctctctctctcttttgtgtgtgtgtgtgtgtgtgtgtctgtctgtctgtcagggagggggagggagggctggtgatctggccattattcaaggagttggagctagagcccctccctgagactatacctaccaggcagtaccctggaggtctgctcctgtcctggctctaccccttgtctggtcagttctgcaagccctgatgtcattggctatgcaggacctttgccctctttatctggaacagttcttggggccctttgttccactcgggatctctcctaagtagaaaacaatctcagacactccaggaatcttggctaaaggcagcctgtgggtgtggggaggtccttcctcctttgtgtgtttgtatgtatgtgtgtgtgtgtgttgcaggggaattggaggggtgggggtgagggtgaagagggaggatagctggactcccgcaagcatttaccaagtactccaactcctagttactagtgtcctggtggcaaacacggcactgacaggtagctctagagagaacattagttctgaaaagattatccacctctatagttttcagcgccccagcaaaacagtttttcccagccaggtgcagctagtggacaaaagacatgtctagacacagtaagcactggctctcacttcccatgcctctgacagtatcagagtccttgctggaggtggtagggtgcaggctgccaactcaatcagagtcagttacttgtgtgcatggaatccttttcccctggcctcacttttgagatagaggatgtgtctatgtgaagtcttaattacattcacctagtctcccagcccggcccctcccaaggcaccaagactgagctgaggttcctgagggcattgggtggggtgggaacagcagtgggccccagggctttggctttgtctgttatgggagaagtggagaggtgaggtctcaagagtctgttcccacgttctgttgccgtgggacccagagaggtctctcagcatgtgacaagcttcagtccaaagtcttctctttcactggggtctttcagtggctaagaagcctctttcttatgacccctgaacctcaaatcctccaccctttctctacccattagcttaggggaatctctcaacatcgagttacatgcttacactgccttctctgcctgggagtccctcaaggaaacctctgaagtcaattaaacattcattaagtcttggtaagtgtggtgagcaggtccccgcctgtcacctaaacttggcctaggcctagagtgatctatgaaggatgaacacaaaaatagaaaaaggtgtaagtagctaaggcaggttcctcatctgatctgaaagacagtcacaggtggccaggataaaaccgacaagaacacaccgactaaacttaggacctccgatatctaggtttctgtcaccgagtttcatctagacccagacttactttaaaaaaaaaaaaaaaagaaaaaagttagggttgttgagatggctcagtggttaagagcactgactgcttttccagaggtcctgagttcagtccccaacaacccaaccgcatggtggcttacaaccatctataatgtgatctgatgccctcttctggcacacaggtgtatatgcagatagagcactcgtgtacctaaaataaataaataaatctttaaaaacaagtctcttatgattagacagtttcgtacatgtggacaatatgctttaacctcactcatcccacacaatgactttttttttctttttttcgagacagggcttctctgtgtagccttagctgtcctggaactcactctgtagaccaggctggccttgaactcagaaatcctcctgcctctgcctcccaagtgctgggattaaaggggtgcgccaccactgccctgcacacattgactttataaattgtctgcttttactaacttttactaacatgagtcctttatacaagacgtttcagttttattgtctcatttaactggggggatagattctctgagagtattttctaaggaaacaagagaacaagcccatgttgaggagtttggagtggggaatctggttccctatccccaaagagattttctttctgtgagagcctggggtgtggcctcaaatgcctcacttgctctgtcaaagaagtgaggtaaaggagaccagtacacacatagccaggacccagagcaaagaacacaggcaggcaaagaaagcatttttatagactcccagttaaagacctaggaatggggctcagccaggaagcactagcctaaaaagccaagccttggattctatcgtcagcaccaaggaaaacaaaaccagaacagaacacagagcaaatgtcctggacacagtgctgagaagtggctgctcttctccacaggttcaaggcagcagttcgtgactgcagggagtcaaggtagcaggagcctggccaatgaccacattgcatgcagaatgtgaaaggaaactaaatacatctagtgcacaaaggaaaacagagggatggtcgcatcctaaggttcggcttgccttctccgcagtaattgtaatcattgtgtacagcccaggatccctggtgggacacccagaccatggactggtcctgctcacagttaaggtgagtgagtctttccacagggttaaggtaatcaagattacaccctcccacccaggcaggcatgtccagtggtctctcaggttgtcgaggtcctatctacatgctaactatcattagatactctgatgggaatattagattttcctttttcagtaagtttccaatctggaagcccaggtcttgggctgaattgatgtggatgtgttgcccagggtgccagggagcaaagactgcttcctgctcccctgctatggagcctgtgtgtctctgcaaaaagggtgggtcaagtgcccgaggctgacctgagtcagggaggatggaaggaattaattcaagccctcccaggtctagagttgaccttggtagaggatccaaatggaatggaccaaagaaccaacctgaaggtgggagggagctcccaggagccagcctgaccctctgctcactgtgtggtggaggctgccttgccccacacctgggcaaagagcaggtgctttgtgagggtggatagactctgaatcccctctgaaattcacctaaagtttgagaaaaacaatcatatctgcgactggagaacaggcatgggctcagccaactctgaagcatgcttcgagcacctcaactctacactaagttttggtttaatttttttcttgtttatttttgttttggggaaggtggtcttgatatgtagtggagtctggcttcaaaatctccatcctcctgcctctgcttcctcagtgctgggatcacaggcccacatatccacagccagactcagctttacttaaaataattgtctgtttacttgcttttagtgcaagagacagaacccacagcatctcctacactgggtaattggtccaatactgagccacatctcaagtatctcagtattatttagtttgcgggtgagaattgagatctaactcctaagtggattgattacctttaaatatggctctttaactccattctcgaatcagggctcaatggtctggcccttgaggtaacctggaaggcaggctgaagcaagcaaggagggttcgtttctatcagatgcaatccacttcaacagcttaggccatatcaaacatatgttagtgaaagcaccctctttccccacaactaaagctgctctgctaagtgtggcggctactgttgaggttttgtcttttactgtgtatcacaatgttaagtgttgggggaggggaaagaccaggagtctgcacatagacctaagtgaccctgcccccaggctatttctgattggtatataaagatgccaatagctaatagctgagcagaagagacatcggtggggtttagattttctgggcttgggattggagaagaaccatgagaagaagaaggtgcaggaggaaggagaagccaccataggtttagatgagctggcctcgagggctggccaattgaagttaagagcagcccagatgaaacatagtaagtagtaagtaataatttggggttatcaataggaaagtagattctaattgcatataaggtaggtatctgctcagctgttgtgctgtttaaggcttattgtaaatataaaggttgtgtcttttatccatgaactaaatggtcaaagactgtgtagaaaccccaggttggaattaaaaatttctacaacaggctatgaagccactccttgcagctttctcttccctcctgaactacaaagcctgactctcacttgggcctattgttacccaaccggtcagtgacatttctcagcctccttgaaagctggctatggtcgtgtgtacaagttcttccatctctcagaagtactagagaataaactgtgggagcattagcctgaagtgtaggacatctctttcttctcttttccagtaggttcatgggcttaggaggcgatggctagaaccagtgcagccatcctgaatcctcagtaaacaggtcaaggatggtagccagaaagctggttcctgttgcatgtccagaattacctctgcacacatctctctctcttttttaaagatttatatgtaagtacactgtagctgacttcagacacaccagaagagggcatcagatctcattacgggtggttgtgagccaccatgtggttgttgggttttgaactcagaaccttcaaaagagtagtcagtgctcttacccgctgagccatctcaccagccctgcacacatctcttgaatgtgaacaaatctgtcatgctgggatctttctgcctatagttaagcctgatcctgatatacctacctccttgggctcagcctttatcttgggcacaacttccaatatgaagcatagaaacagcttctgcacagtaatagccccaggctttggagttggccaagggtgaacagacaccagataatttattaatctacttactactggacatgaattcatgtgtctgctcaacgtcttcacttggagaagatgatggctttgggaagagctgcttttagttttcttttaaaatttttttacttatttttatgtgcgtgtatatatgggtgcatatgtaagtgtgtgcacttccatggggcggccagaaaatgaccgtagtgtagccctggctgtcctggaactcactttgtagaccaggatggcctcaaactcagaaatctgcctgcctctgcctcccaagtgctgggattaaaggcgtgcgccgccacgcccagctccaccttgtgttttgggcagagtttcccattattgtggtgctcaccaactaggcaataggctacattgactagtgaaccccgtgggtccatcttcttagcctctgaagtgcagcgattgtaaatgtcataatgcctggccttttttacaaaaatatatttatttcttatgtttatgtgtatttgcctgcatgtatgtatgtgcatcacatgcatgcagggcccatgaagtccagaagaggggtttgattatttggaggtggagttacagaaagttgtgagcagccatggaggtgctggtgactgaatctggggccttgccaagagcacccactgctcttaatcaccgtgctatctctccagtccatgcctagggtttttgtttttgtttttgtttttccagtgagttctggcatgctgaaccttcttccactaattaggcaaacacgtcactgattgagctatcttcccagccccacaagcagtttttatgactgagagagtatacagttgtggacatgttgactctaaggtgatctgttagttgtacaaatagtgaagaacaggcaaacatctgaattcaagcatttaggctgggagggaaaaaaatnnnnnnnnnnnnnnnnnnnnnnnnnnnnnnnnnnnnnnnnnnnnnnnnnnnnnnnnnnnnnnnnnnnnnnnnnnnnnnnnnnnnnnnnnnnnnnnnnnnnnnnnnnnnnnnnnnnnnnnnnnnnnnnnnnnnnnnnnnnnnnnnnnnnnnnnnnnnnnnnnnnnnnnnnnnnnnnnnnnnnnnnnnnnnnnnnnnnnnnnnnnnnnnnnnnnnnnnnnnnnnnnnnnnnnnnnnnnnnnnnnnnnnnnacgagttagggagaagaggatgggctgtgcctggctccctgtggcggcccctcaccttaacctgcctgcctacctgcgggcctcttggccttccttggctttaacctcgtagtctgtccaggcgccgcgggcgggagcgttcactggccagctccggtacccgcagatcgcctaggcatcgtttgggcgccgtcacctagcaacgccgcgcaggccctgcccgcggtgggcgccgggacctgtagtcctgagcctccctcccttggtgcgcgtcccgggtggggtacggcgtggcgttgggcggggattggcggcctcgccgggctcgccccatccaccacttgcagcgggccgggggcgtgcggcgcctccggcgcatgtgcggtcgtgaccggcggaggcgctgggtgctcttaagccgtgaagcaccgcgcgccctgtgcccgcgcctttccgcgcgcccgcccgctcgcgggtttgggtcggccgcgcgccgcttgctgagcatccttccggccgcgcacctgccccgcgcacctgcagccagctgctcggcgctaggcgccgcgcacacgatctgcttgctcaagcaggtcccggccctgcctgcgtgtccaccccgcgccgcagccggacccgggcgcagcgctgcagagggcgagggccgcccggagcgtggctcgggccggcgcggcgatgatgaacagattccgaaagtggctgtacaaacccaaggtgagcggctccagctgcggaccatgtcccggcgtcgcgctttcccccctccagatcccttatcctgcaggtccctccttgatagatagacctcgtttccttggccctgtatgaatttctttctccagttcatgggatgccctttccctgcattccgcgacttggacagaccatgtacctggcgcgcattgactgctcttttccagtaccagacggggctctttctttcgggcctgggtgtactgtcatgtttctcctcgtctggatactagatgggctggctccagctcgcacccagcggtcccagcctgcgtgctcagagcccctacttctcttggttccctctagcctcaccgctgatgctccttcatcttttcgcaacacaattattctgtcctaggatagtgggtctcccaccctcccttcgcacttgggaaccgaccgtttcattcccctttctccaaccttaggctttggtcagactctttcttcccgtatcttagaggtccctcacgccgcggtctggtcctctatcccaaaacggagtaattggatcttggtccagttctcatctctatcctgttccggtagccgcctgcacccttttggatctccgaccagtcctctgcccagtcgcggggtgaggctcgtggagcttgaagcttcagtgggccggaggtgcgattcaccagccagttcgggtccaggcggcgcgccccggcagccgtgccagtcgcactgcgggcgctgcgtcccgctgcctgcctggggctggcagcccggagccggacccggtgcgctctgttcgcagctgggcgatgcaaagctaggatccagcgaagatccaggacgcagctgcggcgtccaaagctgcgtgttgggggttggcggagtctggggacgccaacgctggaggtcttcagagggtcacgacctgggtggggtcactgcaaagactaagggcgggagcagtgcagcggctgcgtgctggtatctccgaagtcagaggcctccttctctttggcccacccaaggaactgaccgctctcccgccgtgactagccacatttcttgatttagggtttctgtcccagactctgtgaatggtctctcggagtggggcgagtattctggagagacagctggtctgtttggaagactggcatttgaggtttaggggactttcagggatctgaatctgttacagtttttgtctgccgaggtcgggaagtttttccttaggttagagaatgttggggtgaaggcttacaaagcatggggctgcctttgatcagcctcggactggacagaaggtattctggagtcttgtgcgctggtgcagcagcggctcgtgctcctgtcttcctggttgtgggcaaatatactggggggtggggttgtgtgtggggaacccttgcgacccttgcgatgggtgtggtttgagtcttgcttgcccttagccacgccctaggcgtctggcactctctttgctgcaatcccttcaatgtgcacagtcctgcctgctgatggttagtggnnnnnnnnnnnnnnnnnnnnnnnnnnnnnnnnnnnnnnnnnnnnnnnnnnnnnnnnnnnnnnnnnnnnnnnnnnnnnnnnnnnnnnnnnnnnnnnnnnnnnnnnnnnnnnnnnnnnnnnnnnnnnnnnnnnnnnnnnnnnnnnnnnnnnnnnnnnnnnnnnnnnnnnnnngttagtgggtttgctagcggctgcagcagctcctgctctgcttatctgcacaaggagtgccccccgccccaattgagtgaatttttagcacaagaaaaacaaaaccaaacgacaacaacaacaacaacaacaacaacacaagttcagtactgaaaaagtcattgcagaggtgggatttactttttcaataacaaatgtcaggggagcaggtgggagtgtttgcatgcccgagctacgtccctgtctctcagaatgcttctcagaatgtgtaccggctagttttgtgtcaacttgacatagctggaattatcacagagaaaggacttcagttgaggaaatgcctccatgagatccaactgtaaggctgtaaggcattttctcaattagtgatcaaggggaaaaggccccttgtgcgcccccccccccccaatctctaggcaggtagtcttgggctctactagagagcaggctgagcaagccagaggaagcaagccagtaaagaacatccctccatggcctctgcatcagctcctgcttcctgacctgcttgagttccagtcctgacttccttggtgatgaacagcagtatggaagtgtaagctgaataaactctttcctccccaactgcttctttgtcatgatgtttgtgcaggaatagaaaccctgactaagacagaatgcttgtggggcgctggggcgtccaggtgccattccagcagtgctacagtaggaaaggtgtgttctgtgaccctccttaactgtttgaaaggaaggagcagtgcctacttaaccattggttatcactcacagttaattcacagtggtcttcctttgttgtgccccaaagttaagtatcatgtccataacgttccctgttgagcagtagattgctttctaggtacagaccatggcaagtggagagctgagttggtaactttgggtgattcagcccaaagccatgtactttttagaagggaagagataggttagaccccccccccctgcagctgtcctcttcctcattgtcatttctcaataagctgtctgttactgtccttgacctctggacttgagccatatctctgtctgagatcttgctctggccatgactgtctccagagctgatgccctgtggccagtctaatggtgaggcatctctggtttgagattcattgttgaatgtcggtgtcttgattgtttgaagcatttgggttgcggtaggtcatcctagtagtttttaatttttcaaaccaaagcttagatttttttcccttcagttatgaagcgattatgtttctccttcctatatttgaacatattttggcacaagtgaattgagagttggtcctgaaatgattctgggcctggaagagttaaatggtggcaggagtggaggtggggtgtgggggaggaggggggctgtctggggagattgcttcagacttgatcccctttcacttcctatttagatacactatttaaacaacatttaaatgtaactgctgctatggtttaaaaccgaacacatacagaccatgttcataacttgtggtggaaatattttgaaaaatgttgttattcctacagttcagagaagcaatgggaaatgcttagattattttctaaatgacaaaaattttggtttccaaagcactaaaaactgagttggaggaaaaatatacccggtgaataatagtttatgttaaaatgacatgtcaaagcattatattttcattgattttcttaaactcagcctttgaacagctcccccccctccttgatgaagtactattagactcctgctattctgggtttggcgtctgtgagagaaaggtgtgtggtgaaggctcagaggctgagctgtccatattgcttagagagtgcaggcaaagactttctcagaaaggatgtttgtgttagaaagtccaggcaggtggtgaccttctctgactgacctgggtgacattgctggttaccaagggaggaagttggcctaagaggataagaactctaggctaagaccctgcctaagctgcaattcctggctgccctgggtgagcctattgatgcacatgaaggatgcatttgtactttctatctttaaggaggaattgactggcaggtactactgcttgtcaggggtatgggaatggtggctgtggtgtctagtttctgcacatgcgccccacaaagagccttcttgtctcagctccaaaccactaccaggggcgtggctattgacctgcatgccgctcctttgctgtggagtctcctagcagtccttcactgtgagaagtggagatgctgtttgcaaacatttagggttcaggttacagatgagatggacctcaccaggggaagccagtgagactcactgggtgtcttttctctaacagttcttttaaatttttatttgtttgtttgtttgtttgtttattgtgcaggggtctgtgcttgtcaaggtgcacacatggaggtcaaaggacaactttcaggccttggttctctcctttctccatggacatacacagatagaaattaggtcttcaggattagtggcaaggacctttttacactgagccatcttgccagtccttttctattaattaattgattaattaattaatttgtgtgtgtgtgtgtttgggtcaaacattgaccttgaacaccttctttgattgctttctgctgtgtttttttgagattcatatctcagtgaacctggactcaatgttttgactagactttctgtctgaagagccgtgggaaccctcttggcccccacttcccagcagtgcagttccagatgtccagtgctgtacctgactgttatgtggtgctgggaaaccaaactcaggacttcacggttgcacaacaaactctttacctaccaccgtattctgtcgccttagttggtcagggtccagatccacagtcaggaacctttcaagttcttactcttcacagcccaccctaccacagaccatcctattggctgccttccattcaccagctatctccttacatgtcccaccccaccccatgcttcttgactaatagccaacccgtgtgttacctggaagcgcaggggtaggtggaggcaagtctggagttggggcagagggtagtggttcccaacacctgccttcatctcccaccccttccagagcctttcttcaggctcagcattctcaggctgttgtagggtgggctagggagcttaaagtggcttcttaggcctcctctgcagcagggctcccagcaggaagccgctctcacttcccaggccgtcctgtggtttctgtagtagggagtgtggggcctcacagctcctgtgaatctgcagggtgaggggaggcaggaccagtattggtttctgagggactttgtcagtgcctgggctccattgcccagcagagcagcagacttactggaaatgtgtggtacgatttctgttaaatgggcgagtcacagctggaagtcctaagctccacttaattgatatttggagatggcgtccaggaaggtcgcgtgggggaagggaggcagggctgtgcacactgccccgcactgtatggggcagtggttacattcattcagcctgtggaggagagatggtgtttaagatgactttagtgcctgcactgagaactactaggacagcagcgatgcttctcataataggacagagatgtacacctaagagcccacccgtgtagcatatttctgccttgttggaactgatagctacatggagccggtgtgttctgtgccctgcaggggtgagggacaatgaactaaaccccagctcaaagagaaacagatgcttaggattctggggattataaggtttttctctcattttaagttgtcccgagtctttgttctggccaaggcttctgtgactgtaatagcactgggtccagagacgaggcagcaggggctttcctcactagggcctgagtggggatcctttgcctgtccttcccagctctgtgccttagtttccctagctgtcaggtggaggtgttgggacctgctatacagagttgttgggagtaaaggcccatgataatggtagctcagccccaattgctgccagtgtcagtattctcatgggcaggataagagggtgtggcctcattgcagcagcctcagaggccatgagggacttcagctgcttctgtcaggtccttgtgaggctgaaagagtctccacagttgtacactgccctgcccttttccccccatagtgctgagagcagaccttggtgcaggttaagacagggatcctgagggacttaaccatggggacctgtggcacatgagagccacactgcccatccattttctgagggtgagagtgctggctgccaagtattgttgtattgtcctattgtccaggcaccgccatcctgttatagggatggctaggactgaatggcagccaccaagacagcaatggggccatcttgtcaagcttggccccaagtctcttaagtcatcctccaatggcttgtgtcccttgctccgtggctggaggctcagggtcccagggtaggaccccagagccacagggggcagatctcaagggggaagnnnnnnnnnnnnnnnnnnnnnnnnnnnnnnnnnnnnnnnnnnnnnnnnnnnnnnnnnnnnnnnnnnnnnnnnnnnnnnnnnnnnnnnnnnnnnnnnnnnnnnnnnnnnnnnnnnnnnnnnnnnnnnnnnnnnnnnnnnnnnttcatgcttacaaatgatgtcttggaaaggacaggtgagcttgatgcagcttcacagccatgttgaggcagagctgaggcctgtcagacctcagagtggaaacagaaaccatccatgtcctttgcatgtcagcagagtcccattttctgcaggaaggaagtgtggctgttgtcagctcttaaatggatcccatttggtgagacaattacttttgtgctttccacagttgggttgcaaagaaacttagatattgatgggcagtccaagtttttaaaggggaaagaaaaaaatgaatagttccccccccccccagtgatctgaatagattagggagtagtagaatggatggagcatttcctatgatggtaatttatgtagagccatgtgagctgatgaatgggtgggttccccttactgtatttgaagctcttccatttctcattgttttcatgcagggtggaggcaggggggtgccagggagtggaggttctctcagctccatgtggccagtgctgtgtctctgccatggtgagtttctctagctgagcccccgctccgctctgcttgccaaccagacagggtgctgcacttttttctcagggagttgggaggcagtaaccgtcagcgagtgagagtgttcgggttatttttaggactattacgactaagaaaccatctatgatcacgattaactgcataaatgccagttagactcttatacaaaccacatccatgttcttagcagtgttatgaatagaacatagccaaaaggtagggacaggtcaagtatatgtcaacaggctagtgtgggtccctgggactgaactcaggtcatccgggttggtagacaggacattttatcacatagccatcttgcttaccctgtagcttttggttttttttttttttttttttttcaagacggggtttctctgtgtagccctggctgtcctggaactcactctgtagactaggctggcctcgaactcagaaatccacctgcctctgcctcctaagtgctgggattaaaggtgtgcaccaccactgcccggcttttttaaagatttattttatttatataagtacactgtggatgtcttcagacacaccagaagagggcatcagatcctattacagatggttgtgaggcaccatgtagttgctggaatttgaactcaggacctctggaagagcagccagtgctcttaaccactgagccatctctccagccccctgtagcactttttgaggctaatagatagccaaggtaaaggtattcagagtcttggttcttgaggtgctagctgttctggttttccagctgccatccactcatctggaaacgatccctgccatccttgatgggagcaggtcactgtagcaactcggaggaggatccctgctgatctgctctttctgcttgggcagctctggctctttacctagggcttctaaaagatgcaagtgcattgatgatgtgtcttggattgattgttgtgggttaattccactacagccacacacataagttgctcagctgagtgtagcttagctcatttgcagtttgtcagcaagtagggtgggaatggagggtgctggctccctaggaaatctgggagttgttcagtcttgtgggcctgacccggagggacagggtaagcctcatataggtggccctttagctgggatggtggaaggacagacagcagtcagcagaatgaaggcaaagggagccttactgcagggagcacctgagatgtaggtgggtctagctgaattgttctctgtgtccagagcactggggatgaagtggggaccacagagacatcagctcagcttttgaggatcattcaagccttaacggtgaaaagagcaggactggcagttggggacacggtgatgttagtgcagggacagctggtggctcctgatggatgggaagcctgggcagggctgagtggggtctaaatgggaaagagagagctagggacactgtttgtagaatgggaggcatggaggagctggttggtaggaccggagttggattttggactggcatgtttgaggggccaggcgtagatgttacagatgggcagccacaccacaaatggtctgaaatgtgaggaaaaaacacaggacaggtagaggtttttcaatttcaaatgctttgaccccatttctatcctaccatccaaaagtaagggggaagaggtggtaaataggacagtgagtgtgtgtggggtgtagacttatttagaagtagttttgggggggcaattccagtctctgttgtcgggataccagcagtgcagttctgtagtgtcaccaaactcaaataagcagtggcagcatgatccgactgaaacagccaggcctccaccaaatccgagtgagtcagcagagcgaccagaaccagcgggaatgccagaagttctctgccgctgtgcctctctcatcagcgaaggagagagagaccaacaaagcattgcaagggtagctgtgcaagcgtggcatggctgtcctgggtcctgcttatactctctccaaacatcaccgtgtcctctcagcaacgcgtcacttgagtctgcttcaggagagcatcacatgacacaactagaagtttccacttcagacaggtcctaagtactgactgagctggcaggagagaaggttagtcctctagatccaggagtgagagccagctaaagcccaaggctggtgacattggttgggcgtgtgtgtcctatggaagcttcggctgggcaggatagtggagctgggccatggaggaccatggaggctggtaagatggcttctgagcagcattctatggtttctcattctgcaggaagctcaattgagattcccccaccgcccacctccagcacttgacatggagcccaggacctgtgtgtacaagctggggtgcagtccactgcagagctatactccaagcactggaggtcttctgaagggagattgtgggtagcagaacaaaggtggcattgcacatcccaggctcagcatggacatcacatagcacagcatcattgtgatgacagcgtcactgtggtggcactcacgggaccagtcaccaaaatgtgtgtacacagaaatatcctgggaagcacttagagtgttggcttaggctgagagatgggaggttagcattgggcagccctttcagagtgtgtcaaatgggatttcaggagaacagaatggaggtggaagtgctttagcttgtgactgggagtttcttgaggcaagtgatggagtttgggaagcccaagtcccagatggggaagtggtaccaagcaggtctatgagtgagactgtgggttagactcagcagcttcatcggagacgaggcttatgagacttacagttttggaggtttaagtctgtgctggttagtttttgtcagcttgacacaatctagggtaatgtgggaagagggaacttcaaatgagaaaatgtccccatcagattggcttgggaggtatttcctgttgtgagagggtccagcccgttgtgggtggagtcatcctgggcagatggtgctgggttgtttaagaagcaatctgagcaggccagtgagcagtgtttctccatggcttcgctttcagttcctgccttaacttctctgggtgatggattataagctgtaatgtgaaataaactctcattttaccaagctgcctttggttatagtgtagaactaaatcaatatacgatagccccattggtttagctgctgctgagagctgtgactgacaggcagtgtgtgtgtgtgtgtgtgtgtgtgtgtgaactttcattgccaatcatgaagtcagaggggctactatgtgtaggcttagatttttcaaaaaccactttattaagggttcaacctcctagcccaccatctaccagaggtagtggaaaagaaagcttacaaaggaactggggttgtggacctgtttagaaatagttctttgggctcttccaatcttcgtggtcagcagtccagttcactaggcaatcaccactcaggaaaagcagtggccagttcgatccagaagaaactatgagacactgttactagacccgagtccttggaagcaggaggaagccgctggaatatggctagaagttctttggtgagtgaagtcacaatgaagattagcaacacaatgtaaggcaaaccaatacaaaagccttgtcagcgaagacttgtgaggcaatgccagagccatgtccaactgtctgaggggtcatatttatattcattctaaacatcatgtgtcctctcacccgtgtctgctttagcaaagcatccttttatctgtctgccccagccaaaaaaaaaaaaaaatcatatgacataactgagttttcaaagaaaccaggaatttctacttcaactctcctgtcagtggtcccagtgacttaagaacctcccacctagtccctcctcttaaaggtctcatctcccaagttttcagtttccgtggatgcttagaggacactgccgtaccttaaccctcacattgcagaacacagagatctaaggagccagagggaaaaatactgagctggtaacagtctgtctccacttgtgttaacagctggtttgagtaaacactggaggcccagaagtccggggacgagatctttttgggctagaggaatagagtcctggtctcagctaagctgtagttttgaaagaagactgggatggaagacagttttagatgaagataaaaaagtaaccacccccaaaatccttgctgaaaaagccctggaaagtagtctgcaaaagaaatcaaagtcagaaggaaggagtgggaggcacgaagtgctggtgggcagggatgcctgagtgcacgtgggcacaaccaaatggcagtcgctgtgtggagtgatgggagccttgcgtctcaagaaggagatgaaggcctgatgggttggagcagctgtgggatgtctaagatggctgactgcaggccatgattttattgtatgaattaaggtagggcaaagactgggataatgggtcttgtaacttctggagggacggagatgagagcaggaagatgccatcaactgaagcattgaggaggggacagggcagaaaagcaagtacagtgaatcagaagcagcagcagtggacgaaccacacatgcattggctgttggagatgtgagcaaagctagcccacctgaccagactcctggatggcgtttcaaaatccaaccgtgagccgtaggctgcacctgatccctgggatctacagagcggtgggaagagaggaaatgacttgcttgtcatttccctaagtgagggagtgagtctttgttagtgttgggaagctgcctgcctgctctggagcctggcagtctggtgcacatgtgcgtgtgtgtctgtgtggtcactggccttctgggagagctggctctgggaaggaggttggcccgcaggacatttgctgaagcctttcggaaggaagggaaggaggcaagattgggaatagtgaaagctgggcttcagtgcaggcttaagctgacccagtagtttctggaagctgaaatgactcttcagggtagcccacagctggaccaggcttctctacttttgattgacaggtttcagatggggctaccatgcaggagcctttccctaactgtggatgggtggggggtattggctacagtgctagaaatactagtttgtagtgttggttacaacattagaagctctggggaacaaggtttttggtgtagacatgctctgcacaagcatttcagggtcacctgtccttgtcactgctggaatactctgatattggcctcactgcctcttgcgtcagcttgaagctgctgggaaggccaggttgacctcacacctagcagaagttgatcagattagctaattcagcacggcaaatctcgaataagcatcccttccttctgcctgaatctgcgtttggagagagatggccacatctagctcttggtggcgactccgtactcagagctgactcttgatgtgaccgcgggactttttgctccattgggtgcctgttattttgtggtcttgagaactgtctcagcattgtgagcaggcatcaggaatagctacactttccaaggctgatgcgattctgacagttggtcttctctgtgcaggtttctttcccagctctggatataaacccaaggattctgtaattgctgtgagggcttcttgctaatggctaaaccatggtttgggttctatggaagatagatgaggttagacacgtccacattcgttgcaggggtccaggaactgttctggactccccgaggtctcagtttcttctgctgcaaggtgacagccagattccctgtgctttgaaccaaacccagaggctcccagaagacccaaggcctaccctctactccagcagctgggcactggcccctgggagcaggcggctttgtgctaaaactgttctccgagtctcaggccagggctctgggctgggtagactgggactgcgtctcgtgggtcagatggagcccttagaggacaccagtccctctgatgcctgaacttttggatgtgcttgtgggtaccagggaggctttgagtggtttctcagtagtgggaatggtaaggccctagctcttgagtgtctccacaaagccttctctagatggcccccaagccaggtcagggatcctacagcccttgggggacctctctcagcactgacaggacttctgttatggattaagggtgtatgactacatgtggcaggttttataatttgttgttgttgtttttgtttttgacttctagccttcatcccagcacagccttcagcagtgctggcgctggctggctgataccatctgcccgcttgctccctttccacgttgcttgcttgttgtcttcctgtggctattttccatcaggcccacaggtccctctataaaacatcgtcaaagaggctatctttctgatagtggctctggcttgagaacttcatttgttgggtttctctttgtcgctggtgttattgattatgtctcaatgacagcccttcagaatcttccggatcagaagcacggctgtgtttgtactgtatatgtaatagttggggggttccaggttggagctggagtgaccatatctgagtgaagaggggaatttcaagctgactgggagtgctggattcttcccagctctgcacagatggtgtttcacactgagaggctacataatttcatccacttcttggaaggaagatagcttttcacagctgagtgaagttgtaacgttcatgggaaagttagccatcatggtggccagccatatccttggcactgggtgtctgtactgtgccaccaccatggggggcggggatgctgagcgatctgcagagcagagaagagtgtgcagctcctggtgtcttgctgggtgtcagcatgaggacactgactcaaaccctgtgctgtgtggtgaccattcatatgccaggagtccacatggacccagaaaccaaggctcctgtcttgggactacgagctggcttgcaagcattctcctttgttaggagatgtggtgtctttaggacaccaggtgcagagagccgtcacatcgaatggtgtctgactctgctcacacccacctcggacaagaaactcagtggcttgaggggtcctggtaccacaactgagtcacccctgcccttcccgcctagccttgtgaagtcctttgagccaggtcctagaaggcctgacaggctcctggggtctgagcagagcagtgcagctgcatctggtttaacagtggtcctcagatcttcccctcccctccaatccctggagaccctgatggaaggttgctgtatggaagctgaagccgtggaactgtggctgctaaccgggtgtctctcggttagtgggatttccccagttaattgggaaggtcctgaagttacaagtgtcaggtgatagtcagggaagtgagagaagatgggggtcagagggaggtgggacagtggagggccagagaggcaccgttgcgtgctgtgagtgtaagtggaggctgttgtgtgctgggcccagatctggggcacgagaaagcccagggctgccttgctgctctctcgtcttctgcacaggagacattatgctccactgttctcaggcacagggtttgccgcagttgattaacagcagctgctggagttagctctgcctccagagatacactagggttcacgagttcatggagccctgctcaggacagtaagaaaccagaagtcccaggtgtccctcaggtcatggctgatggaccatggagtgtccactctggggctgggctgtggtatgagtcacagtggagcagggtgtgaacaagtctcagcagcatcatgctaagtgcaaaacaccagcctcaaaataccacatacgcatgacaccctttttatagagttaaaaacaaccaaaaatacattttaggatgacatatggcaacaaccaagctgtctggaggggccagaagagctgggctcaggtgaagtctgtgttgtaaggtggggtggacatgaccgagcgagttccaacatttgtatgttggccgatggactcaggccccggtctgaaataacctttgtaacctttaatgtttttgcagagttgaaaaagagtatcttcagcctgtgcagcctcccttccagggagttcccaggccagggatttaaaaataattgttgtccacagcactgtgagagaaacagcaagctttttggagagtaaaactatctataattagccagaggcgcaagtgttgtttgactggtggtcagctatgctgaggtgacctgatagtccgcgtccctccccaagctgtatgtccaatgccaaggaactgtaggaaaccctgagtgcgttgtgctgagcatcagtgtgggcctctgggtgccctgaactgaattgctaggggagtcctttgggtgccccaagtcaagggactcccagtctctgcacatgagaaagaactgactggctctaatcaatgagatgtctttggtggtgagaaagacacaacccgtggtccttttagtgggagctctgtaaatttgcttccttccaaggcagaagcaaaagagcttttttcttttttcttttttttttttttctgaatatagaaaggcataaaatctcttttctcggaacgtcaggatcgatctagtgggcccatttatccacatttgtgagttcttcctccagccggggtgtgtgatgcgtgactctcattgagctgatgggtcaaagtgccagtgatgtcagtttaagtactgggtaaggggaatgccaggtgggcgttttgacaaaattattaagaaacctgatgtcgttcccctccataacagttatgtgaagagttcagggaagggaagaaagctataaatgatgcactgtgagctgtgggttttagctgtattaaaataattttaggtgatgtgtgatgctgcacacctgtaattccagcttactgggaggatgaggtgggtggattctccagtttgaggccagcttggactagggagcagggtcctgtctcaaaaacattttccttttagatgcatgagccagtaagacacagaaagatggtctcattaagagccctaaacttggggctggagggctggagggctggagggctggagggctggagggctggagggctggagggctggagggcttggctgctcttccagagggctggattctcagcacccacgtgcctgctctctgtaactgtctgtaaccacgccagtcccagaggatctagtgccctcttctggcccctttcggctctgcatgtgcggtacacagagatacatacaggcaaagcacccatacacataaaatacaattttaaaaggcctaagtttattttctttctttctttttttgtttttgttttttttgtttttgttgtttgtttgttttgagacagggtttctctgtgtatccctggcttcctggaactcactctgtagaccaggctggtcttgaactcagaaatctgcctgcctctgcctcccaagtgctgggattaaaggggtgcgccaccactgcctggcctaagtttattttcttcaactctaaaagacaaacctgtcctgaccagttttgtaaacgttgagtttaaattgtctttttcctaaatgattacacccactgtacataaggattaaaagagactggtgtaactgtcttgtctgtttcctacctcttggttcatgtctgtttctgctgtaacatggagtttacttggttactggatttctgatgggtctgggaagtgattgcctggtgctgcttatttacagggaaggcgggaggtaccaggtgcacccacactgagttcttccagtgggctgtaaaggaggcggcttctccaggctgcaccttcacagggagagtcaggtttcctgtctaggacttctttgtcatcgtcattgctgccactgcctcctcctcctcttcctcctcttcctccttcaaaaaccctcagagttggagagttgctcagtggtgaaaggcacttgctgttgttgcagggctgagcttagattcccactatccacacgggcagctcatagctacctgcaatgctagctccagaggacctgatgcactctcctatgtgggcatccacacatggacacccatacacacgtggcatacaatcacacagatacacataacacataaataaaaacaaggaaataaatcttcaaaaagtaaaatccaggtatcataaaatttacttctttttcttctttctcctttttttttcttccttcactcttcttttttctgtgctaggaattagaggcagggtgctatgtgctctggcaagtgtcctaccactgagctacacttgagcttcaaattgatcactttaaagtgagcaattcaggctggtgagatggctcagtggttaagagcaatgactgctcgtctgaaggttctgagttcaaatcccagcagctacatagtggctcacaaccatccataatgagatctgatgctatcttctggtgtgtctaaaggcagctacagtgtacttacatataataataagtagatcttaaaaaaataaagtgagcaattcaagcatttagtatagttgcagcatgtagctgctcccctttatctagttctccacattgcatcttcccaaaaggaggctttgtattggttatgcagcctctctggccaccttggaccttcctgagttttctaggagctgcagtgaggaacagtcagaaagagggtgttagtgtttgatgacttgtcacagcaccaggggtgaacggctcaggacagaagggagcaggacctgtctcacctgacccatcagtaccaggagccactgtgtaactttgaccagaacttggtctttctgttcctccctttccaccccatcaatgacgtcagtttcagcacctcggaccatgaataggtgcctggggaaccgagccaagtgtgcagatctgctgttgcttccagaaatgcgaagcgttgtgatgggaaatagacccaacactgaagaaaaacactctgtttgtctgtaaagaagctaaagacacagcacacttgagagtcttagatacagcgggaggaccgctgcttgcactaagataaggacagaccccggggaaacgtcatatcacccgaggagggggaaatgatggcagtttgtgcatcttgagcttgcacagagagctgagctcgtggggcagggcagatcatggggtgcaagaaccacatgttaaaactggcccctgaaattccacactctagctctcttgtatgtgatgacattttaggtcccgcttcatcacgttgtggctcggtactctcctcttagccatgcagtgcgtctggttcagtattcaccgggaactggcactgtctccagcagggcgtagagagcagagaaagaaggcagcatgttaggttgctgctgagggagggaggggcacactagaggcatgttggagggagcctcacatgtgccatcacctggtatcgggttctgccagctacctgggtgagtgagcctggacatggtttctcttcagtagattctcacagagcagagagcgtgagcatgtggtacctggcatctgacccacagagctgtgccctaataaaatgggtcatgtcgagtggcaaggtgggtggcagtttgttacttggcagacaaaatattcaggatgacagatggactgacttctcctggggtagcaagcccttcccgtcagggaactgcccacggcccattcacctgggcagtgaagagagaggagcagttgccatagacgtgggtaggaaaaaagcagacgctaagcacgttccactctccattgctcttctccttgtggtggccgcttgacatagctggacagacggaggaggggtttgtggtggagaggattcagtcccagagtttcttggtcccatgtggttgggtatagtttcatggtggcaaaagatatggtggagtctgtgatgtaatttcatatccaaaccttatcagagtcttttcttccctccctcttctgattccttctttcctttcttatgacagtacctggtgacaagatctgtagcccagccagcatgggccctgggaggccacatccacagatgctaaagcaagtaggttggccttgaactcactatgtagctaagggtgatcttgaacttctgctctaccttcacctcccagtgttgggattataggcacacactgtctgtcctggcttatgcagtgctggggtttgaactcagggccttgtgcaagcattccaactgaactacgtccacagtactccacagcaggctcctaaacacctggcttgcctgtataactgtggagtccttcggagcttggattcaagtcagtgaacgacagaatgaatgtacagggtttttactgccttaggaagtcattaaaatggacaacttgggctggtgagaaggctcagtgggtaagagcacctgactgctcttccgacggtccagagttcaaatcccagcaaccacatggtggctcacaaccatcggtaatgaggtctgattccctcttctggagtgtctgaagacagctacagtgtatttacatataatcaacaaataaatctttaaaaaaaaaaaaggacaactcctggcccagagagggcagggcccagagcgatcagggccagagcaagagagagaaagggaagggggaaaaatggacaactccatagagacacagggcacagaggttgcaaagggctggtaggagcagggggatgaggagtcactttaatgaaactgtttcattttaggatggagacaggttgggcagggtgttagacaatggtgtgaactgctcaacagtgaactgcatgcttaaagatagtttaaatggcaggccttgctttttttactcactgctatgacgaaagagaaggttgaacttagtgatagttgaccctagacaaaaacagtaactctttctggctttgtagctcccgtagcagtggaggtgtgcccaataacagtgctgtggccttgccttctttagggactgaatacaagtcttttttttttttaaagagataatgacaggaggcgcacttttgcctccgtcccacctgggagcaccccagagcatgggaagacatgatgaatctgctgaacattggctgagggagcttcaggcagcttacaccccagagcagccatcggaaagagctgccaccaagctgcccgtgggaacgatgtggcacttggtggtggagaaagtggggaaagagaagggcagagaatggctgggacagtggagagtggagttgttggtggggtggggtgggtgggggtggatatggcctctcagtggtctttcaggacatggtagtgtggggtcatggggtggctctgagcacctgttgatggccttaagtttgctcccagttctgagacagccttcccgtatgaaatgattccaagatgacaccaagcaaggaaacaaccagcccaaggactgtccagaggaggatcccacattcagggagtcctaagctaatgcagtgtggggcctgttttcttccagaaagaaaacctcccttactaaggactttatgcttatctttaccttcagagcatactttagaggggctgtagctcagccacgagtccttgcctagtatgtatgaggtcctggattcagttccaagctcacacacaaacaaagagaaggcacacccacactgtgagttgtaacagctgctgcttgctttttgcgttgtccgggtcctggtgctgagtagcctcactgtctggtcctctgccgctttctcagtctgacccctgggaactgacctctgaaacctccagtgtgcttaacatctagtgatgcccactgtcaccagtcattttaagagacattccattcgccgaaagcctttctccaaatgtagctgtcacatgagcaggaaggagacccactgagaacagacctgggcttgttcatcagaggcatcccttccattgtggtgtgggtagtggcaggagcatccttctgaagagagctttagctcctgtctgagagagtgtgctgtctcattgctgtctgcgacctttttcttggctaccgagattttattctgtgaggtaaccgtgcttcgagtcagcattattgggagtgaccttgtggaactaactggggagctgactttgtgaaaggtttccgttttcctcactcgatgggatctatgtctaacgtcattgtcattgctgagttttatgtgtcttgatgtcttaaaaatgtattcctggctttgaagggaatttgttgcagcaccactgtgggataaaccaagacaggttttcttcgtggctccggggcgacatgagctgtgtctgtctcgctgggttggatgtacattaaagtcctgtgtttgggtgtctcacaaaccagtgcttaatctgtgaggaaaacaaacaagatcaagtcaggactgtgctctatcagagaaatatgttctagatggttaaacatctcactggaccaaagaaaccaaaattatgacagaaagatgcacagacaaggatctctctcttggagcagaggagctctgtagacacgtggggttggaagtgggagaggcagcctgagagtggattaaaaatcatgagtcctgatagcttagactgggagtaaactaccacatagttcaaagatgggggtgagaaaggcaaactctgtaccatcacaatgacaaatctaccacaggccacttagaaattcggcagggaaacacagacagaggtcaaagcctccacaagtcaggcctggtgccacacagtgcaaagcaacctgcagcccagggtgcagttagggtagctcctccatcctcggcttgtagcctagcttctgagaccaagatggtttctgagagctgtgagaatccaaggccacacccaggctgaggctgaggccacttcctgctgacagtgacctcactggcttgtcacaacttcagcctctatttcaactttgttagctattcctggttattaatctccgctgttttaggttccaaacgtgaattctgttttctagtttgggtattgctcatgttagtaaactttctattcttgtaacaaaatacttgaggtaaccaacatgcaaagagaataaataggcttgggtcctgggtaaggctccagcccatagttttttttttttttgttgtttttgtttttgtttttgttttgctttttgttttgtttccaagacaaggtttctctggttgtcctagaactgacctggaactcagagatctgcctgcctctatctcttgagtgctgagattaaaggtgcgcaccaccactgcagggataatggtgtttttttttttaatgtgtttgtattatttttaattgtatgcgttgtgtgtgtctgcatatatgcttgtgtatgtgagtgcaggtactcacagaggccacaaatttcatctagctgaaccctgagatatagattgttagtcgcctggagtgtatgccaggcctcagtacatattcgtaataattggcccccatggttgattcttgcagtgaggctgtacattgtggcagactgccccgctccctcagagaaacaaagaggaggatagatgttaagatcccaccgtctttcttccactggatggttttggctcccttgtcgaagatcaagtgaccataggtgtgtgggttcatttctgggtcttcaattctattccattggtccacttgtctgtctctataccagtaccatgcagtttttatcacaattgctctgtagtaaagctttaggtcaggcatggtgattccaccagaggttcttttatccttgagaagagtttttgctatcctcggttttttgttattccagatgaatttgcaaattgctccttctaattcgttgaagaattgggttggaattttaatggggattgcattgaatctgtagattgcttttggcaagatagccatttttacaatgttggtcctgccaatccatgagcatgggagatctttccatcttctgagatcttctttaatttctttcttcagggacttgaagtttttatcatacagatctttcacttccttcgttagagtcacgccgagatattttatattatttgtggctattgagaagggtgttgtttccctaatttctttctcagcctgtttattctttgtgtagagaaaggccattgacttgtttgagttaattttatatccagctacttcaccgaagctgtttatcaggtttaggagttctctgttggaatttttagggtcacttatatatactatcatatcatctgcaaaaagtgatattttgacttcctcttttccaatttgtatccccttgatctccttttgttgtcgaattgctctggctaatacttcaagtactatgttgaaaaggtagggagaaagtgggcagccttgtctagtccctgattttagtgggattgcttccagcttctctccatttactttgatgttggctactggtttgctgtagattgcttttatcatgtttaggtattggccttgaattcctgatctttccagaacttttatcatgaatgggtgttggatcttgtcaaatgctttttctgcatctaacgagatgatcatgtggtttttgtctttgagtttgtttatataatggattacattgatggattttcgtatattaaaccatccctgcatccctggaataaaacctacttggtcaggatggatgattgctttaatgtgttcttggattcggttagcgagaattttattaaggatttttgcatcgatgttcataagagaaattggtctgaagttctctatctttgttggatctttctgtggtttaggtatcagagtaatagtggcttcataaaatgagttgggtagaataccttctacttctatcttgtgaaaaagtttgtgcagaactggagttagatcttctttgaaggtctgatagaactctgcactaaacccgtctggtcctgggctttttttggctgggagactattaataactgcttctatttctttaggggatatgggactgtttagaaggtcaacttgatcctgattcaactttggtacctggtatctgtccagaaatttgtccatttcgtccaggttttccagttttgttgagtatagccttttgtagaaggatctgatggtgttttggatttcttcaggatctgttgttatgtctcccttttcatttctgattttgttaattaggattttgtccctgtgccctttagtgagtctagctaagggtttatctatcttgttgattttctcaaagaataacaattggtgctggcacaactggttgttatcatgtagaagaatgcgaatcgatccatacttatctccttgtactaaggtcaaatctaagtggatcaaggaacnnnnnnnnnnnnnnnnnnnnnnnnnnnnnnnnnnnnnnnnnnnnnnnnnnnnnnnnnnnnnnnnnnnnnnnnnnnnnnnnnnnnnnnnnnnnnnnnnnnnnnnnnnnnnnnnnnnnnnnnnnnnnnnnnnnnnnnnnnnnnnnnnnnnnnnnnnnnnnnnnnnnnnnnnnnnnnnnnnnnnnnnnnnnnnnnnnnnnnnnnnnnnnnnnnnnnnnnnnnnnnnnnnnnnnnnnnnnnnnnnnnnnnnnnnnnnnnnnnnnnnnnnnnnnnnnnnnnnnnnnnnnnnnnnnnnnnnnnnnnnnnnnnnnnnnnnnnnnnnnnnnnnnnnnnnnnnnnnnnnnnnnnnnnnnnnnnnnnnnnnnnnnnnnnnnnnnnnnnnnnnnnnnnnnnnnnnnnnnnnnnnnnnnnnnnnnnnnnnnnnnnnnnnnnnnnnnnnnnnnnnnnnnnnnnnnnnnnnnnnnnnnnnnnnnnnnnnnnnnnnnnnnnnnnnnnnnnnnnnnnnnnnnnnnnnnnnnnnnnnnnnnnnnnnnnnnnnnnnnnnnnnnnnnnnnnnnnnnnnnnnnnnnnnnnnnnnnnnnnnnnnnnnnnnnnnnnnnnnnnnnnnnnnnnnnnnnnnnnnnnnnnnnnnnnnnnnnnnnnnnnnnnnnnnnnnnnnnnnnnnnnnnnnnnnnnnnnnnnnnnnnnnnnnnnnnnnnnnnnnnnnnnnnnnnnnnnnnnnnnnnnnnnnnnnnnnnnnnnnnnnnnnnnnnnnnnnnnnnnnnnnnnnnnnnnnnnnnnnnnnnnnnnnnnnnnnnnnnnnnnnnnnnnnnnnnnnnnnnnnnnnnnnnnnnnnnnnnnnnnnnnnnnnnnnnnnnnnnnnnnnnnnnnnnnnnnnnnnnnnnnnnnnnnnnnnnnnnnnnnnnnnnnnnnnnnnnnnnnnnnnnnnnnnnnnnnnnnnnnnnnnnnnnnnnnnnnnnnnnnnnnnnnnnnnnnnnnnnnnnnnnnnnnnnnnnnnnnnnnnnnnnnnnnnnnnnnnnnnnnnnnnnnnnnnnnnnnnnnnnnnnnnnnnnnnnnnnnnnnnnnnnnnnnnnnnnnnnnnnnnnnnnnnnnnnnnnnnnnnnnnnnnnnnnnnnnnnnnnnnnnnnnnnnnnnnnnnnnnnnnnnnnnnnnnnnnnnnnnnnnnnnnnnnnnnnnnnnnnnnnnnnnnnnnnnnnnnnnnnnnnnnnnnnnnnnnnnnnnnnnnnnnnnnnnnnnnnnnnnnnnnnnnnnnnnnnnnnnnnnnnnnnnnnnnnnnnnnnnnnnnnnnnnnnnnnnnnnnnnnnnnnnnnnnnnnnnnnnnnnnnnnnnnnnnnnnnnnnnnnnnnnnnnnnnnnnnnnnnnnnnnnnnnnnnnnnnnnnnnnnnnnnnnnnnnnnnnnnnnnnnnnnnnnnnnnnnnnnnnnnnnnnnnnnnnnnnnnnnnnnnnnnnnnnnnnnnnnnnnnnnnnnnnnnnnnnnnnnnnnnnnnnnnnnnnnnnnnnnnnnnnnnnnnnnnnnnnnnnnnnnnnnnnnnnnnnnnnnnnnncctctccccaagccccacctcctaaagattcctcctcctcctcctaggaaggaccaccctgaagaccaagtctttaacactcaggtgcttgagagcagtcagtatccaaaacttacatctgttagatgtaagtgccagtgtatagactgaccaattatggattagcgagttctattcagttctgacaagtgccctcagtcaccgattcctttttgaaacttattttaaagaaatggccgtgttgatccgggaggatgtgggaaagatgattcaaatgtctttctgttcacaattgcaaaatgctggcaaagtcctccctttgaaagctgtattagtgctgtgattagaaattaatttcgagggctcaatcagtaagcatgagggcctgagttctatccccagcactcacactaaacaacgaaacaaaccaacaaaccagtagacctgcatatagtgatgctatgattgtaattccatctctggggaggcagagagaagctaaaatctgtgctagctgcccagctactttagcttactcagtgatccccaggttcagtgggatatcttgtctttaaaaaaaagcaaaggagagtatgaggctggagagatgctcagcgggtaagagcatgtactgctcttcggaggatctgagttcagttcccagcacccacatcagttatagactcacaattacctgtaactccagttcccggggatccggcacttctgaccttctctggttttttacaaacatatgcacatacccacctagagttgcacacacacatacacacacacacacacacacacacacacacacacacacacaattaaaaaaaaacaaacccaacttaaatcttaaaagtggagagtgaatgaaaagggtccctgatgttcacacacacacacacacacacacacacacacacacaccacacacaccacacacacacattcccctacacatatatgtatacacctagaaatgcacatctatgtacacacagtttcagcattgcgatggagtaaagcttcatgcagccaaagtattagtgtagtccagagagctggagagactcagactgaagaggtggaatttagagagtgtggacgtcccagtacaccgaagacaattctccagttgtgtctcttgatgtatatttattcttttctcctgtgtcagtgcttgtgggtaatccttgctttcttatattaaaagaattatttttttgtttttgtttttttgtttttgttttttttgttttttttgagacagggtttctctgtgtagccctagccgtcctggaactcactctgtagaccaggctggtctcgaattcagaaatcctcctgcctctgccacccaagtgctgggattaaaagcgtgtgccaccaccatcgggcttaaaagaatattttgtgtcaatcacatcttagtgtatttttaagaattttaaaatttgtttattttatttatgagtccactgtagctgtcttcagacacaccagaagagggcatctggttccattacagatggttgttagccaccatgtggctgctgggaattgaactcaggacctctggaagaacagtcagtgctcttaaccgctgagccatctctccagcccatcaatcacatcttacttgtgtagaagagcactagaaaaagaaatagaaagattttccatttccttcatcataggcattgttttcagagctggtgaggggcctgctcttctgtggggcaatgaaggtggtgctgctccctgctagggcaaccccgggagtggagactatgtagcatgttcctagtaggcgaccgggaaagtagttccatccacggtgggtctcttggttccttgcttctgttctggcctctccagatcctgtcagttgccaccagtcttccattttttccccctgctgctcagatctgtttctgttctaaggaaggagcaatgacatgggggtgggggtatctctggggcccctgcagatgaggaagggtgcaccatgggtccccgtgggtcttccctggagaagttgagtgtatggctgtccaggctgggcctttggaaagcctgttatgttgtttgtttcatgctttgggctggaactactcaattttataataaatgtaaaataatcaggacagagtccttaccaagatggtggagttctcggaccagttcccacctcccatcatttcttgaaaagccaggattccgtttgattcttgtcagggtagggttgttctgggtaggccagagaatgatgtacactatctgttcttttcaatgtgtaattaatgagtttgttaaggatagtcagccataatagaagagtaaatagtgaacagcagctgagaggaaaaaaatatgacagcaggtgcttgcagtatccagcagagacaagtgcagtaaacagccacacaaccaaatcagtcttttttttttttaagatttatttacttattatatatatgtaagtacactggagctgtcttcagacaccccagaagaagcatcagatctcattacagatggttgtgagccaccatgtggttgctgggatttgaactcaggaccttcagaagagcagtcagtgctcttaaccactgagccatctctccagcccgatcaaaccagtcttaaatcacccagcagacattgactggggaagtcctgtggaggctgccactgggcattccccagggagagcgcaggatggaagagagtgtccctagggtgaggctttaaagtagaacggaaattagcaaatgtaacaccatggagtcatgcttaagctcacccaccagaaatgacaggggaagccttgaacagtcagctggcatccccactgaaagtcccaggcagaccagagcttctctccatgagcaaacttctggcttcttatcctcactgcaggcatcatgggataaacaatagtagcatgggttggaagctgccttccactgttctcaagcccacagtcttttccctatggctccttttctgttctacactcaccctcccacccctgcctgctgttaaagctttgggggccagcaggacagggtgtttggggaccttggagagtaaaatgcttgagtctgatgtagggaggggagagaccagctttcaaagcctgcttccagtgagttcaaatggctcaggacaatttaccagtgagagcttggcaggtgtcttgcatcctgggtgagggagatggctctaggccttggtctcttttgcctctgcagagttttaaaaaagtcacagaggtgatttaatcctctttctgttcacagacatttttgtgttgctctgggcttccttgctgctcactgttcccgaggctcactggcaccgcagggcataactcagggctttcccccgtgactcaggcccactcctgctcccaaaccgcttgccacagtttaacctcagcctgtcctgaccctggctgcataaggcacggttccttctcttgtcagggtggtcacttgcacccgactattggcaacgtccagaagctctcagacactgtaaaaaaaatgctttccttttctcagatgagggggatttcttctagaaagttcattgtcagcagtgggcctgggagagtttctctgagatgccgagggaagggggcacttgggaatagaccctttaccagtcttggcagccatctcgccttaggtgggtcccaactctgatgctacatcttctgtgatcctgtctcctcaaaactgctctaatgggggtggggtagggatgggctggagagagcgcttagcatttaagagcatttgttgctcttccagacacccaagttcagttcccagtattacatacacagacacacaatccatataattaaaagtaatataagtacatcttttgaaaaattgctttttcaggaaagtaggccatggctcccaccttgacatcttttgaaaacccctctgtgcaggttggcaggcctggaggaggcagtgctagtgttggggaagcctgagggtcagcctgagggtcagcctgagggtcagcctgagggtcagcctgagggtcagcctgagggtcagcctgagggtcagccttctgtcggtgcttgagctgaagcctgagtctgcatgctgctggagacgggcactcagtgtccacactgctgagaacattactactgaagctttgctgaggatcgatagtttaccaatcttgtcccgcgttgtggctcactcaattgtctgctaatactttcacaatagctgagtctagaagatctaaaagtcatgagagactttgaaaaaagatttaatttcatttaaatttgtgttgctgagaagtttgatcagtaaaatacttttaagcatataaatacaggtcttgggggaggtttggtagtgtacaccttcaatcctaacactcagaaggcataggcagagcatgtgggagttctattatacatagtgagttccaggccaaccatggccatgtagtgagaccctgtctcaaaacaaacaaacaaacaaacaaacaatcaaaaacagcaaaaatacagttcttgaggactatatgtcatgggaagagagctggaaaggagacttccagaaggcagaggagctgaggcgatctgcttctgggaatctctgtgcttcaactgctgaggcattttcattgcacctcgatggccgaagcacagaacagatgagctgtgccctcctctctgcctccccgcttcccttctctttatttttttgtgtagctcaggatagcctcaaacttgctgtgtagccgaggataaccttgaactctcaattctcttttccaagtgctggggttacaggttctcagaaccatgcctactcctaaatgagcccttttccatggctgcagcctttaaagacaccatcgccactaccttccctgtctagttctatctgtctcgtcttaggggtggcagcttggggttttcaaccctgctgagttccaggtgggttaggcagactcacctcatgcctcttggtcccacacctggagtcatctgtgtatggcttgaatgacagatatacccccaaggttcatgtgtttgaaaatatggctctgagatgtagactcgggggaattgtggaaactcttaaaggtgtagggccagctggaggccataggtttctgggcagcatcattggaaagcacagcctggtcctgtcaaggtgattgcaaagatgtaagcgaatagcctgtgtggatgctgctgtaccctttccaccgtgaagctgcgctgaaataagtccttccttccctgaactgcatctgtagcgtattttgtcaattacaggagaagtaactaatacagtcccctaattaatataactaatatagggatatgaaccctaacccagggtgtctgtccccttctcagggatagcccactcctgtagtccttctcaaggacctagagctgtgatccagtctttgcagctccctctgttgagggaagattgtgtgggcagagctagccggtcacctccatcctaccactgatctacacacacagtgtctgccttcttgtacactacctgcatgttttgagattcatccatattgtagccaagtcagtcatctatttattgctgagttgtgctgtgttgaatggatgtacttcagtctgttaacccatccttatactgaatttacattttgggttgtttcttagattgggatgaacatttgtataaatatttgtgtgggcatgtgcatccaattctcttgggctttccagagaggcaaatcataacggaataggatttcttggcatgaaaatgtctggcatttgcctcttctcaatgtattctctctgctgttgtatctctgtacatccgcactggtggatcgctagttagatttagttacttaagtcttttgtactttagaattcagttgttaagctaggcagtggtggcacacgcctttaaatggagcacttgggaggcagaggcaggtgatctcttgagctcaagggcagcctggtctacagagagagttccaggacagcctgggctccacagagaaaccttatcttgaaaaaaataaaagaaaattcagttgtctcattagttccttgtcctgttgatgctacaaaatacctgacagaagttccaggaggaaggaagggtttgccttggcttacagtctgagtgcacagtccgccatggcgcagcagtgtaaggcatctgggtacattgcatctgcagtcaggaaggaggggagagggagggagacagagacagagagctagcagtgtgaaccccagcccatgaaatcatgccacccatatttaaggtagatcttccctccacaattaacctaagctagaaaatccctcccagatgtgcccagaggtttgtttccatagtgatttgaaatctcattgagttgacaatccagatcaactttcagcaggtgagacagctcagtggagaagtgcttgaactgtaagctagataacccgacttcaaaccccagagggagcccaaggggaaaagacagtactgactccctgaagtagttctctggcttgcacgtgcatgtacatgcatgcacacaacaataacaacaacaataataataatggccagcgaaatggctcagtgggtagaggtccttgtgtgcaggcctaatggcccaagtatgattctcagattccacaaggtggcaggagagaacagactctgactgttgtcctctgacctctgtgtttgctgtggcatctgtatgtctgtagtcacaacacatacacacatacaagataagtaataaagaccctttgcgcatgcctttaatcccagcacttgggaggcagaggcaggcagatttctgagttttgaggccagcctggtctacagagtgagttccaggacagccagggctacacagagaaaccctgcctcgaactccaccccacccccgaaaaaagattaattttcgtaattttcatcttcccactaaattgtatttccccctgtgtctgtgtctgttggtgttatgcatttgtgtatgcatgttgacatgtgtgtggacacacatgttttgctgtattacacatgcgggtctagggattcaaaatctgatcctcatgttaacatagcaagggctttcgtcactgggccctctcccactaggctgtattttcaaagtgtcagtcctctgaaaaggtctggcagatcagtacatagtctgtggctttttgttccttaacagaattttaagaatcagatcttttaatgatgataaagtccaattttctgtccttccccccccccccctttgtataaagttcatggatttctacgtgaccacagacatcttttgggagataggccaatttctgagttcgagaccagcctgatttatggagcaagttctaggatagtcatagctacacggagagaccttgtctccaaaaactaaaatgagtaaaataagttaaatataaaaggaaacctctgtcaggctgagagctgggtggagagaggaactggcccgtggcatcctgcagcgaggaaatgaggtcatgggaagagggtaatcgcagggatgcctgaggaaggacagcggctccctcacgcacacacaggcctgccactcctagcccttccatctgcagatggtggaagcagcccccacctgcctgctctgcagcctcctttcatgctatgtgttgttcaagttatcaaataaataaaataaaacgtagaggcacctggcatcaactgatgccatcatgatgggagaggaacccgaatttatacatttatacataaacacacacacaaaacaacccaagtcacacaaacacaggcatggtagtgtgtgcgtgtggacctagtggagacaggaatgtccctgggactcatgaccagcagaccttgatgaattttaggccaggggcagactccagggatcacccatctccacctccaggcactgagattacaggtacacaccatcactcctggcttttgtgtgggtgctgcagatctgaactcaggtacccatgcttgctcagcaagcaatttaccgaccgagccatctcttcacacccttcccccgtcccttgtcttataaagcagttagtgcagctctgggctcccacatgcataacctcacctaaccctagttacctcgcaaaggctttttcttcagatgccactaaggtaatacttggggagttgtgttcaaactgggaatagacattcagaccatgacatgcttcatggtggataaacctttaaagaagccagaccccagaggttgtatattctatgattctatttacactattgcccagaacaggcaatccacagacagccctttggagctgatcagagggtgactgccaggtgtgtgggtgtatattctctctctctttctgactctctcagtctctctctctctctctctctctcccccctcctcaccctcccccactcctcttcctccccccccacctttgtctcttccttccttccttccttccttccttccttccttccttccttccttccttccttcctagacagggtttcttggtaacagccttggctgtcttggaactcactttgtggacccaggctagccttgaagtcacagatatccacttgcttctgtctttcgaatgctgggactaaaaatgtgtgtcaccactgcctgactgtgtgtggtttctttaggataatgaaaatattctgtaactagatcctggtgacagttacataattagaaatatgctgaacgccatgaaccacaagctctaactggaagaattttacaggatataaggtacatcttaataagctatttgccaaagcagatttcttccttttggggactggctgcagggcttggcgtccagttctgttagactgacaattgagtagccttggggaatgctgcagaggatgacctcctgggggaggggcttagtggttgcaggaggcagtgagtttagcattaagtctggaacttcagcttgctcactgtggcattggtctgctaactggcctcaactctccctgcctcagccagtgaggttctataagtcctggcttctggtcacatgcccccgactccccctgaattctgttttctctgtgtagcagcctaagacccaggcagggtcatcccaggatctttgtccttcagtatgggataggcctcttccaatccactgtgtcccaggcctatggacctgctaggtagagaacatggggcagtcctagacatttgggcttgagcccacagagcagacaccagggtgcctgagctggctactaaacccagcttcagtaatccacttgtcttaactcaggttgcaggcttgcagggcaagcccttttacccactcgctgtctgcacaatcccatcaaatgcactttttaagtgtcttttaatctattgaagttaaaacatatgatcccccaccccaccccaccccagtttctacacccacctgcctgccgggcaggcggtttatttgttgacagcatcctccttcatggcccctcgctgcctgtagtctctccctgtgagtggttctttggcttcattccagccccacacagctgctttgttgaactgttggcagttagtgtatgaacagcacttgatggggagtgttattaggaaattaattttccttttgaagaccctttgcttagccaggcttattgatgtacagctatagtgtgggttactagggaagctaagacagaagaatcactcacttgagccccggagtttgagttcatcctgggcaatacaacagagccctatttctaaaaacaaaacaaaacaaaacaggatgaaaagaaccaagttttctaaatggtgtgtggtggcttgcagaaaaaagtgtgacagccaggccaggggtatcatttgtgttgctgctgcaaggtccttgcccagtagctccctgacatggggtatcctgataggagaaggctgtttatcctcatgtgatcagcccaccctgcagggctgggatcttctccgtagcctctctctccaagatgggggtctgtctccatatcatagagtagactgaggttacaaaggctcctttgttcccggacagggtggaggccgatgcacttggacactaactgctgctgtccttgtgtgattagcggttgtgggaaggctgcagactctcccacaccatcaaggccttctgagctggctttggcatctgttgcaagcaggaatgagactgggaaaaggaagatattttggagagacagtgggtacagggggtgattcttattggggtgtctaagctagatctaaaaccttaacttaccagattgctgagaagccagagaggcatagccttgcctgcagggaggcctaagcaccatctcagagaatatcccattgggcagcacttgctatagaagattttcaggaaacgtaggattctggctctcagaatgtatggtgaatctcccaggtacggataaggttccacagggaccactagccagagttctttattctcaaatctttctgatgtggcatattttggtggctatctctttctggtccaccctcagttggtgtgtttggcaggggctgtgctggagctatctttatttactattgagtgcgattgtatgatcttttggtttggtttctgctgtgttcagctgaggaggaattatcttcccctactccctgcctgtatgcctatgcaccttttgtgtagtagagggttgctcttcgcccaatataatggaccacaggggccagaaaaaaacacatatagtgtctcttgtatgtctcctttctggaattcagccaacaatggggtctatttgtgttgactagctcagtaacccagagtccagccaagactaaagctggagggccccactgggcatattggaaccaatgcctagctagccagtactggccatccatgagcctgagaaagaaaagctttgtgacagcacctggggtcacttgtccccagatcagtttcaaagctctgaaaggtaatagatcgaagatgctgagtggaccagaagcagagacagggtttctgtgggacagggctgacctgggagccaccaggtagcattgggaagtctgtgagatgacagcctaggttgctggagaggaaagcctcacatgcctgcctgcacctgaggccctgtggcaggcagcacacgtgggaggtgtggggtatcatggcctgtgtcgcctgtgggcatggggcagacccacctggctactttcctgctcgtccttcaggaatgtctgtcatgttcctttcctatatgactccatgagaaggaaatagcaccaacccctcactaactttatgtcatggaaatgtagctgccctccagtctctgcccacttctgctcagggctaccccagcctctccctcctttgcctttgtgaatcctagaagttctaagactacttttctgtctctgggatgctgtgtcccatttgttaccctgcctcatcctttcttgaagagtgccttgggcctctgtccaaggttgctgttgcagtggtaggtggatagctcagcttgtccctaactgggccactcagtggacacagagcacaggtacttcctgctgtctgcacggttctcaccgtcactcttgagaggatgctgattttactttgcatcatccgcctcatgcagcccaacccagtcatccctgattcaggtcagggatgccttgtggggggtggggctccttcttgagggaaggatatattgtagttggctccttttcctggccagctgtttcttgctgtcattcttgtgcacactaatgagggcactggggattgtatatacaacttactggcagtcatgatgcctgtcacagtgttgcaggggtacttagcagggggtggaccatgggtttgggatttgagcttggagccaggccacctggtctcttcagtctatgctgcagattattctcttccctcaggccgttgttcctttaaccacagcactgaagtggtttgtttgtattttaccacagtgtcggtgtttgctaatgtgaacaaaaacaaaagtgtcacttggccttcagagagtgctatgaaaggctaggagaggttgtgctgttacctaaggacagacagggctcccagtggccccatacctccaaggacaggccagctgtggatctgggtcaggctgaagggatgtgagggatgctgactgtctctaggtacttgtgtgaatgagtggggtaagggtaccctaggagagcctaggtcaatgtttggagacaacaagcagtcccagccttggggatgtgttgcctgagacctgtgcggctgttgggattagtagttgtgtgtcgagttaaggttccttcagagcgttttcttgcttctctgtggagtgcagagtttagcgctttcctggagacctggtccaggagaagtcaggacccaggatggcattatgggtgaccatcccttcgttgacctctccagtctcttttcgaagtccatgtatgaccactgtctgtggataggctgagacagaaaggtaatgtaccagggctccatgttctgaatattgagtggcccttagctggttatgaggaagggttcccggaagttggtattcagaccccagctgacattctgacaacatctgcttgaggaagaagcagctggactctgtgtcacttgtgggctgacccggggcaggagctgtcctctctggtctgccacgcttcctgtgctgcttgctacctgtgcagatgtcacatcctgctgcctgcctgttattctcttacctcgagcctgaccaagaccatgaggttgctctctagagctacagagcatccattagtgtcctctgactgcagtattcatgtaatttttaggaagcaggagtgtgaacagggtctagccctggcactggcctaccctttccttccaccagagaggcctaggggttctcactctggccctgggtagaagtcctagcttcatggcatccagcatgcaaaccatgtaaaccaggccatttgttactttcatgtgcttcgacctccctgcctggactgctgcacagaagactctgatgagcagtgtctgatacggggctgggcctgacttccctggagtggctcatggtaagcaaggcacaggtgctttgatctctgattctgtcctagtccacagaagtcctctgaactatagggaaacacttcagagtcacccatggctactcagagggcccctgtgagcaggacccaagctcacactgtgagcatatccacactgatagccacactcaccaggaaccaggcatctgagtgaatacataatgcagtcaacttcttgtagttagggctgcagtagtccattatgtatcgtgactttaactttataagtgcccggtatatctgtgagtgagtgtgtgtgtgtgcgtgtgtgtgtgtgtgtgtgtgtgtgtgtgtgtgtgtgtgtgtgtgggtgtgtgtgtgtgtgtgtgtgtgtgtgagtgagagagagagagagagagagacggtgtgtacgagagtgctctcatgtgcatgataacaggcaagctcacatcacagggagatcagggcacaacctcaggtgtcactccttgccacccaccttgttcaagtcagggtctcctctttgttgttcgctactgcacaccccaggatagccggcctgtgagctactgaggttttcctgtctccacctctcttttctccagaggagcactgagtttacaaatgtgtgccaccatgcctggttttttaaggtgggtcctggggatctgaactaaggtcctaacctctgcacagaaatttatctcatgagctgtctccccaatcctcaaaaattgttttaaaacaaaattctttatgattaatttatgaataaatgtttgacttgtatacctgttttatgcacttatatatccagggtgatctcaaggtttgttgggaaaggttttttctagtgaaaaaaagcccaaggactcttctaaccttttttctctctccttggctgtgggtgtagttaagacagtatccacacagaattgttttaaaggcattcctgtagttagagtatgcttttacaatgttgcagtttttatttcaaactttttcacaaagtacctatctcttgctacttaaagtaacctctttttgtacagtttcttttgggacatcaaacacttaaaatcttgcctggagagatggttcagtggttaagagcactgactgttcttccatagggtccaggttcaattcccagcacccacatggcagttcacaactgtctgtaactccagttccaggggacctgacactctcacacagatacacattcaggcaaagcaccaatgcacatgaaataaaaattaaaacaaacaaacaaacaaacaaacccccaaaccacaaaatcagcatgccgcctcccagtatcagacctgtgagccaacctgcatggggccagtgcccaccaggctggtggagcactgagtggtgagttggtgaattggttctttgggccctactcagcatacttacaattatagacttagtaaccaaaattttctcttggatcctttaatcaggaccaattgactctcattggttttgttaactcatttcctgggaccccctgcctggaggcttcctcttgcacagcacctggggcctgggataggcgtgactggcacagtaatttagaatccatcctgctcccacactttggcttgtggggagacacagaaggactttggttctttagtctgacaaagctgtcctgaggggcctggcgctctcactccattggcagctaaaatttaaaacagcagacattttgcgtttttgtaacattttctgaaagctcttactttcttctgctctaggtgtatgcatgcctgtgtgtgcattataagtgtgtgtgtgtgtgtgtgtgtgtgtgtgtgtgtgagagagagagagagagagagcaagcaagcgagcaagagcgagctttggtcacaatggagaatatagggcagagggtgaaacttgactagcatggaatataattttgaatgctaacgggtataggccttctactttaggtccttcccatactgaacagttaactcacacatttgtgcacacataaatgcatgtacatactaatagaaatgcatgtaaatatacacatgcacaatgcatatgtatatagccattcgcacactcacctacgtacacatgggtgctgttggtttctgcagagcacaacaagagggaggtaggtgggtcaacatgttgtcctcttgacaggaggctgggtcccctccttggtgatgggttggtttcaacctgggaaactgtgacagatgggactttcctgacacccctaggccaatgtcagctgctctgctccttgtctgccaagccttcctttctagcatttcttggtggggagcttgtgggtttgaggtcagaagggaactagggttcgttgacctggttgaccaccctaagctggctgaccagtaaagtggatcatactgtgtacagcacacatctcttgggtgagcagaaagtttgtccctgcttgagaaggagtcagaccccttctaggagaggggtgtagcaggaggaagctatggccatctactgggaaataggtgtgtctatgactgcccctccttcctcagggaatgtcagcaggccctggctcctaggaggcaaagctagggggcgacacaagccagtctaggatcctgggggctgtgtcagagagtgagttggcctttgagagttgtggccattagaggaaagaatagggagttggccagactgtgcggtgggaagagaggaataaatgcgtctcttgtctcccaccctgcccttttcaaaagtgatttttattttatttgcacatgtacacagaggtcagtttgtgggatctgggtctttcctttacaacgtgggcccagggacttgaactctggatgttgagcttcatgtgctgagtcacctcagttgtgcgcatgcacccatggcttggtgtagtgacattttggacaattctgggattttgttttttttaaaaacaacacagaaacattgtaagaatgtgtttccattttaatcccgggtgtggggctgcttcagactgtcagtagcagctgaccaccaggcatggttttgccaactgcagttagtgtctgtgattgtgtgatatttggaatcctgggaactttccagagggccctgagagtcaaagggtggttgttggttgtttcaggaggttggttgtagtttgttagtagctatggtcaaagaagaaaaaaaaggaaagaaattagattcagggaattttctagtgctctctcccccctccatccttgtttttctcctatctagtactgcggaggggcaaggtgggggaggaggaacaggggataaagggtaggaaaaagaagaacccacaagtaggaaagaccagctacaggttggtgtctgtgaatatgagtgggtgtacatgctacaaacatggaggtcagaggacaatcttggacattggtccttgcccttgatcctgtttgagacagggtctctctgttgctattctctgtgcataggctcaaagctttctgactcatgagcttctagggcctctcttatctctgcttcctatcttattgtaggagtgctgctgttacagatgtgtattaccatgtctcatgtgggctctgaagatttgaacttaggtcattatgcttgcatggcaggcctgtacccactgagccatctcccagacccccagctatacatctggatctcctctcatcccagtctcttgtgttccatagctctcctgggtatggcagtagcttgagaagtcagtccaggtgtggaggggtaagtggccagcgctgggtgcagcatgtggcacaaggggcctttctctctctgcctataggatgtcaccaaccaggtaaaggggaaggtgatgcatctgcatctaaaccagatcacgcaggtctgggtgttcctactcagctctgcaggatgtcttgggaaggtctgctacccatctggactaggcactatagcagtctgtgacatgctatgcaaattctgattggtgactttgctggctccagccccatgaggggctgcttggccacatctgggggttcccttccctccccagtatccttgactggttgggaggttcatatttgtgaccaaggtcttatagttaaggaaaagccttcctaagtcttagggaaggggcagagaaagggactgtgaggaaaaggaaaggaaaggaaaggaaaggaaaggaaaggaaaggaaaggaaaggaaaggaaaggaaaggaaaggggaaaaaggaaaaaggaaaggaaaaagaaaaggaaaaagggaaggaaagggatgaaaaggaaaggaatggaaaagaaaggaatggaaagaagagaaattatgaataatgcccagaagttaacacactgaggtataaacatagacacatgcatgggtggaagagagtggggcgggtgtcagcatgtgtgctgtgtgagcatgtgtgcacacatgtgagcagcattatagcaaatttgggtttggtacctttgtgtgtattccactctcttgggtctttgggttttttccttctggtattggaggctgagccagagccttgtgcatgcgaggcgaatgctctgcctcttgagccatatatcgctcctcagccctcccccaggtctttcttcctggagtcatgagcaccctttatcaggacatgttggggcttcactacttcttcttcatttctctgagccctggactgtcagctctagtggaaggagtccttcatactgaggagcctagggaaccatggtgcgaaggcccagactggtgggtgtatgtgtagaaaaataagccagtcagtgggctgtagcagagagacagtgggcagatattaggtgaatggaagagacagggagcctgggttctcctcagagtttggctgttgcgagaccagaaccagaacacctatgagttagtggaaggggggacctctgaggtgaggacactggtgctccccagtgttaagaaatggggctgagagggcagggaagtctccagagggcagggaatggaggactgattgcaaactctgccagtcactttcatttcagtggagtgaaataataataatgataataataataggctccttccttcagtgattgtcctttctatgtagacttgtggattaaacaccttttcttggacaaagtctcattacataactcaggtttatatcaaatacacaatcctcctgcctcagcctctctagtggtgggatggcaggtacgtgccactaggccttgtttatataatttttatttcccctaagaggttttccattatcccagggccctgggcccctctcttccccttttctgggattataatgaggaacttgacgtaggatgaactaagtgggcatgatcccaacagcctggcttttgctctagttgtttgcctaaaattcttgtggagaaatttgatgagatggcttctgcttggggtaggagagtccaggttatccccaggcttagccctaggggtcatcacaggggcaggctgccctgtaggaacaaggccaccagctatgcatctcctccagcagttaccacctcctcatgttcctggcacctctctctcctgcagaggtcagacccacaactgctggcccagttctactatgctgatgaggagctgaaccaggtggctgcagagctggacagcctggatgggcggaaggagccccagaggtgcacactgcttgtcagccagttccgctcctgtcaggtgagtgggacggtgggggcatcggggtatgtgtccccctggggagttcgtagggggaaattcttgcttgggtaagtgtctgtaaccaagggtggatgctgtgacctgtcctggtaagcatgtggctttgccacctgctcccaccctgtagagatgtaattgggaccctggaaataatgaagagattagacccaagaggagagtggtcttggacagggcagggtcatgtgggatggggagctaggttgcaggtgctaactgcataggacacgtgggaagagcagaagctgagaccggagagcagctggcttgggaagggaggtccctgctctggccgctctgggtaacgtgtgcagagttagcagtgggggatgtcactgcactcggctgctgactcacggtgctgtgagcttttgctgcataattcagagacagctctggaagctgctgctaaaaatacctcgccagcagcattttcttccagtgcacgaaacgttcacgaggcatttccagcaggaacaaagttttgtcaagtgacaagcacggtctttcgaaagttcaggaacttgctttgtgtattttgcctacaagttcttcctgggtcctctattctgggaggtgggctggtgcatgctcatctgacagagagccagcccataactgtcactctggtcctcaaagccttgctgcgtctgatctctacaaagtagccaagctgaacacattccaggctgcctcgagggcatcatttcctcctcttgttcttgtgtacggcctgttcccttggagctccagtgtaagggctcttctgtctgagggtcatgatctgcttcttctttctttgtgctctttcactctgagctgttcaacacagccttcacccaccatatgtctgtttggatgttccaatagatgccctaggctcctccagggctggcctccctgattccaggagcttgtgttagaagcagttcctgtgagggctgcagaggtgagaagctccacaggagagatgctcagagggactgaagggtcctttcccccttgctcctgtctgttgggaggcaggacagctgtagtcacttgggacatggctgtggccagcttaatgtctcactctaagctaggtgttcattggtatcagcaacaaagtattattttaggtaggttggggaaagggctgtcaagctgggagtcccttcttaggtcaagggtcagggctcatcacggtgaatcttgtactgtgagaagggtctggggggaacacttaggtccaggctgtgtcctaaggacacacattctttccttgtcttgagggctgggaaggaacatggggacaggaaattgtacacacccatcaaggcttttccttgtcacttgactctcaggaccctgtcccctgtctgctctcatctgctgtcacttcttccacactctccagcctcttaggcccgggattcagctctctgctccttttggctcctccatggtcatgctgtctgtgttgactcagtttctgccctgccccgatccagacagtgcttgccagccagattgggacctgatggatggatggcccaggctcagcatacacagctgggactccagttttcatccttggcaccccatgcaagttttgctcatgaaccaagaatttcatgtctcttcatgatgttctgcctggcattgctttttcaagattggtctctgagtgcttgatgctgctctgtagaaagataagggacagctataaactcatcttgtgacctgaggccttgtgatctgctgtcccacggtaaggcctcaggtcacactgcactgttcactctgccctccattcttacatggtcctcaccacttctgacagtagaaacataagatttcccccatccatatgggtgccctcagcccagggcttccgatgcttcctgtcagaattgaggagagtgcctcctttacatgtcatatttgtggtatgacatgtgtgcacatatacacatgagtgaagagcactcagggtgatatctggacattgcctgagcagggcattcctgtctctgtggagttggaagatgctccatcttagattacagatcagcttgccaacctagaagccctctggaccctgcaggtcctttgtttatggagggttcatgcacaggtgtggttaataccccctcccccctcagagtttgacagttaaagttgaaaatctaggtctgtgtcatgtaatggccagccctgccctgaagctactcaaagcctggctacctgcaacttctctaacgtaagatctattaattacctcagagatttcaaggagtttaggaattgtacgtcaagaaaatgaaagaagggctggagagatggctcggtggttaagagcactgattgctcttccagaggtcctgagttcaattcccagcaacaacacacatggtggctcacaaccatctgtaatggggttcggtgccctcttctggtgtgtctgaagacagctacagtgtactcacaaacataaaataaataaatcttaaaagaaagaaagaaaggaaggaagaaagtaggaaagaagatgaaagaagaacacacatatttttgaggtgggagtctctgtatgttgcttaagctggccttgaacttttgagattcagtgatatttctgccttagcaagtagcttgactatgcctggttcctaaatgtatttcatggatcactttctaactcactcactggctttgacatcattcttttagagactactagacttttttttttctataaatgatttctgcaaataaagttttgtgcgtcttttaaaaaagatttatttttaattaattgtgtctatgcatgtgtagtgcacatgagtacaggtgcctgtggaggctaaaagaggggatgcccgatccccctggagttagagtgacagacaactgtgagctgcctcatgagggttctctgtaagagctctatgcactctgaaccccagaaccatctctccagctccagccttggactccttctcgcttccctggctgtcttggttttgtgttgtgtgccgtgccctggttcctgagaacctgaccggctttctagtcagtgcttggcatatgtggtgagtagacttgttcttaccttgggagaggcagctgtctgtcttttatcgtcaagcatgttagctgtaggatttctgcagactccctttatcattcttaggaagttgccttctattttatatcttgctgagggctcttatcaggaatggatgctggagttttgtcaatactttctttgtgactattgggataatcaagtttcttcttatggtaagtgatatggaatactttcatgtaaaatactgactgttattattctctctgttgccctccctgctgcatgcaggtgctgtgaggacagggctctgtctataacatccactaggtcacccccagtacctagcacatatcaacacattcaattatatgagtggctgacctaaaatactgtccctttctcttcttccttctgtcccctcttccttccccctccctctaaggtattttgttgtttgtttgttttgatagcgccttgcttagtcaggttgggcctgaactcataatcttcttgttctagcctagtatagttgcacaccaccatgcctggaggttttcttctttaatgatgtcctttgtctatttgctcactttctgacaataatcagggcatcacataagtgtaagctgtgtcaaactgctgaaagtttgaataccgtgccagtatacacacccgggcatctcatcatttctatatttagggttacaattatgtagctttggaaggaatcttggacctacctggtcctgctagttgtgtatcttcagagaaggtgactcctacattgcatcattacatatattctagcaaaaactcagtgccattgaaagctgcctataagaaagctaacaccccagcagaaagagagtggagaaaccaagccagcatcacacataagccagaaagataagacagcatttgaccatactcttaaccaaagtagacttttaaaactgtagaatggctgggatatagccccatgataagaactcttgtttattgtgtgtaaggccatgggttcaatgcctgtgaccagccacaaatagagaaacaaagcagaattggtcagacatgctattaagatgtgcagaatagagcttctctttctactctcatggcacaatgcccttttttaaattattttaatctcctcaagttgctttaagaatttttatacgtaacagttaggtgtgctgtcgcgtacctgtaacccagcactcgagaggcaaagacagattaggcgtttaagaccaaccacggctgcacagtaagtttgaggccagtctggtatatatgtttctgcctcaaaatgtgaatttaaaacaacagaagttctgcatctatattcatgaagattactcatccagccttgttttggtatcaggataacgtgcgcactatacagtgttttggagagattctcacttctgcatttttgcaaggagggggttgtgagtttgtgtcaaattggtgttatttttctgtttgaatcttgaggcttctctgtgggaatatttttaacttcagcttcattttattgaatacgtatgaggcttttcaggttttcaaagtcttcttgaagagttttggtagtttgtatagttcaggaaattctgtccacgttgtcggcgtggattgtccgtggagtcgttttttaacatctgtagaatgattagcgatgccttctctgctggcgtaagctgtgtcgccctgactatgctggtagaaccttgtcagctttattcatcatctctactgaactttgctaattttctcttccatggggctctttatcttacagtgtgtatatatagagagagcacacctgtccctaatgacctactcccatgtgtgtgtggggggcagtgggaggtctcacattcagccactcaggagggtacctcttgtgttttaagggcttaggctgatcagagctgtgctagtccaagccaacctctactcaccgtgataagatatgggttactcctagttgctctgagatgtgcaagatcttactctgctggccccatgagtgtctttactgctcacaatcttcttttgtctggttcctgctgaatccaagaggggtacctcctgtctccatcctcagggctcttgttacatgttctctgctgctgtccctggagtccagctgccttggtcccactgggttccacatccccatgctgtacagggcatgcctggtttccttccatcttagagccaatgcccattctcatctgacatgtgaagcccatgcctgagagccattgtttcctctgctatatggtgcagagcaaattttagttctggcaactccaccttggctgggttcagaattcccagtcaagggctgaggagatggctcagtgggtaggagtgtttgctatacaaatatgaaggtctgtgttcaaattctcaactatcgtataaaaagctggctgagctgtatccgtgcatgtctgtaattccagtgcagtaagcgatgtggggaatagaggctctccaggacatgctagatagtcagcccagctagaggttcagggagagacccttttgcaagagaactcagagattgatagtgggacacccaacattctcctctggcctctctgtgtgtgcagacaggtgtacacacatttaagtcacacactcgtatacacacacacacacacacacacacacacacacagtgcagtgggtgtggtgatatacttaggaagcagaaataggattcctacaagtccctgcccctccccaggctacaaaatgagaggttgtgtcaaataaaacaaacaagtagctgagcatggcaggttcccaggttttacagactgtagcttgtgtagcctccaggctactatggttctgtgctctccagtttgctgctgagaatcagaaaagtcgggtgtcctgccatagtttgtacagcctttggggtagaggtggagctgcccttttattgacaggcggggactttcctgttctgtctgctggtcccagagcaggtaggagggtcactgcttggtgaaggagtagggtctgaaagtgctgacccaacagactttccttatgcggtcctaaggtgtgtgtttgtgcccctgtgataaaactgaggttcagacaggccaagggtccccagctggttgtcattggtgcttggagactcttttactcatacttgatgttaactctgttgtaaaaactgacattgccactctgaggagattctcacatagtgaacgggctggcttcacacgttagccctcagcactgtctctgcctggaagcaaatggacacatgaaggatagcctacgcttgttatgggaataatagtgatgaagaaatggacagcgaaagtcatgtacgtgtgcatgtgcctgtgagtgtgcatgtggcagttgtgtgcgatagggtctctactgaaactggagccagcaagtccccagggctgtcctgtctcctccccagctccttgtgctacggttacagatgagttactgtaccctacttttaagagtaggtgctggggatctaaactcgggtcctcatatttgcacagcaagcattgtatgtgctcagctgtctccccagtccccaaagtcaaaattttataggagcccactgaccaagagaagtatgggtgttcagaggcacccgggatagccatggctccaggcatttagggggacaggcaaggagggaagttgaagactttttttttctaggaagatggttcagttgttacaaagagtgatgtgaaatctattcctcagccatcaaatgagctcagtcccaggactgtgtaccagcaacagaccactagggggcgctgtcgcaggagggggcgaggcaggatgtgctgctggatcacttctgtagtctgggtgagcagtctttctttctgtttcaggacaatgtattaaacatcattaatcagatcatggaggagtgtatccctcaggaccgtgcccctcgggatttctgcgtcaagtttccagaggagatccggcatgacaacttggctggccagctgtggttcggggctgaggtaggggcagctgctgggattctgggccctaaaattgaacatccttttccagccatgtccacgtgaagccacatgaagtctcctctaggggtcctgtcttcccttcgtcttcccagagggcatggtctgagcttccttggccaccagccctaggaatatcatggggagccataaccctgtgctccccaccaacgctggggcagagatgaagtttctcatgtgattgttagactctcgtgtctccaagcatccaggatcctgtcgctgctcctcagattccagtgtgagcatagttctccccaatccactgccatgacagacttcagggggccctaccacatctcactaccctaccacatctcactttagcttatcttcagtgacacaggaaaatggcttccccaggaggtagtaggaccactgtcctccctgtctgggaacttcctatatccttcaacaaagtgaagccccagtgtatctcccttgactgtgttctcaaagcactggaggttcagggctctgactgcggcctgccagccgtcatccctctgtgctgtcctcccttacatccctcccatgcaactgtggcacttccctgccccgtgctccattttatctcacctctccccatccttcccacacctctcataggaaccatctggctggctcttccctgaggttctgattggtctggcagtcacggcctcatcaagcctcagtagtcactgttaaagcatggcccagggcagaggctcctgtgaggaccgtggaaggagacaggcctggctcagttagctagctggtgtgtatgtgtggggagtgctcctgaggggtggcacctggagttcagcgctccccttcaggatacacctgggaagtcagtgacccccttccctcagctgacaggaaattgcttctggtcctgattgatgctaacaggattggctggcggattggttcttgccctaagctggtgaaggctagctagtggactgagcatttatactggaagaagccaactgggagatacccatattccttggtccccaccttgagagtagcaggcaaacgcctatgtttctgagcacaggctggggtctttcacagatgtggggggtttgagggtgcatggaggcctcttcaccaaccagttgtaggatgcttcttaagtatgtcagggagatcacgttcctgttaacttgtgtgtgtgtgtatgtgcttgcacgtgtgcgcgggagcatgcagcacctatgacttcccagaaaggtcatggcctacagggtggctggacccttgctgctgtcctgttccaggacacaaccctgagatgctcttggctccctcccagcagccaccctggaccaggaggcaatgagagtcacattactgggtccctctgtattgaatcccacactgagcactgaggccatgatgagcacagagtcaggatccttctgaggacctgcaactgctaagagccccaggccactctgaagcccactcccctgcccacagtgcctggcagctggctccatcatcatgaatcgggagctggagagcatggccatgcggccactggccaaggagctgacacgcagcctggaggacgtgcggggcactctccgtgaccaggcactccgagacctcaacacttacacagagaagatgcgggaggcactgaggcgctttgatgtcctgtttgctgagtttgaactgaggtgaccttgatagccctgtgctttagacatttggaagaatggcttttgctcatcattttggggtgccaactctttggggccacgtcttgatgtttccatgtagaagatgttgagagaggagttgggtggatctttgtgggtgggtgtaagggaaccttcaaaggaggagggaaagcagagggtttagagtccagcagagctctggcagtcacagaccctgggggacagggctcaggacaggctcaccagagaggcccgctgtgctttatgcaccagcagacaggaaatccatgcctgctgattgtaggataccatgactggcctctagaaggaagtaatctctcagaagtccgagtgcagacgatgagggtgatttccgtgtgtctcatagcaaggagaagaactagagttcctagtttagaaggcatgaaaatgttcttactgggatcaggtaaacaagctgacaaacatcatgtaaacaacaccccagctgttcagccaacaccctttcagccctgtgtatatctggggccactcctaggcagctgaggtacgcagggcccgagtttgtactccatgggaaaggggtctcccaggagcctgctccccgtcatgggtccatatagactgatgcactgctggctcacagctgaggctgaggtgggaacagtcacttcagtgggtgtggtggttccatggcagtcagggctgagcaggggaggactgggggctctggtttaagtggtccctgtaaagctgggagctgtgtatttatgaaaccagtggcacgggcggtggtggtattgagagctggggttttaacttcatgttcttgtttgggggcggcctgggaagctggtgaatgaaggtctgacgcctctgccttgcagctatgtctcagccatggtgccagtgaagtcccccagggagtactatgtgcagcaggaggtcatcgtgctgttctgtgagacagtggagaggtaagggcgggctgctcagggtggcatcttgtcagggatgcccaggtgggaagacagctgcctgctgcttctcatgcctactggtgcacagaaggcagagcccacacgcactcacaccccaggttccctctgctctggttcacacgacaggtgcccacaggtcagtggagtcatgtgacagacgggacagaagtgtgtgccttagtaggcagctgctgtctagcccctcccctcccctgtcccctacttctcttgtccctcacttctctacttcctcatcccccacttctctacttgtctgctgctcacctcagagcctctgtgggcctgtgagggctcgggcctgttcaccacaggtgggttatgactgcagccctgaggccttgtttggtagattctccaaatagtctggggccaagatttacagagattttcaaccgtggtgcttattttgaaactgattaagtcacaccatacgttgttattttttaagaggcagatcgtttgctgtttatgccttcagaagtgtttcaaattgccagaaaacaaggtggctgaaagtacattttgctttgaagtcctgatggctcagcacctgcttctggggtgtttgttgtattgggaaagccacctgcttacggtgggggaagggaactaacctagatttcagaggaggtgctagattggggaatattcttgcctcatgtttgtgcttggcccttgagttgtcttggcttccaggttaggcaaagtactggtaatgacagacacctgacagaatgacagctatcttcccacagattcccacaccccattgcccttccagtccttagtgtgacagaattggaacgagaggaaatcagactgagctgtggccacttgcctggggctttccaagcaaagcatgccttgtcttctgtgtgtaactgaggtggcacaggtcaccttcctcacctgtcccctgggtgtgaatccgagagaagattgggtactctgctccccccacccccatacttggagtctacccagggataccctctcactcccttcccctctgccagagccttggattttgggtatctgacccaggacatgatcgacgactacgaacccgccctcatgttcaccattcctcggctggccattgtgtggtgagtgtcccctgcttcctgggtcctggccatggtcctcacacactgcagactctgctgtggttaacccccagcagtgcacagtctggcttcctcaacagagaggagccaagtattcagagaacttcctgctttcccagttggggtgggtggcactcatattgcagactgagtcagtgagtcctgctgccctgtgctgggacgatgagatggacacacacacagtgcagagtcttttgggtaaacagtacagggctttaagaagacaaggggctctggttcccaaaggagaatatggtttgagtgagtggcttctggtctgtaggaagatggagcccattagttcaggtgagctgtggtctaacttgtgcctgggcccaccaaggggaccctttcccactagcaaggtagaacatatgtggggagaataaggaactcactggtcagacttgagagtcttgtagggttcaagttgtcaagatagaatgtaggatctggggtcttccatacctcaaagactgtgttcaatcacttgctaggaattctgagtatctgggactaagagcaaagcccaagttggagctccatgtttctgtgtgggtgggtgttcatggggttggcggggcttggtgatggctggctggatatgaagactgggagatggcctggcatgcgggagcatagctaagagtgaggacggagagtcctgtaggagaaggagagggaacagaggccaggctgcatccaagtccaggccatgagaggtttcacagcaggacctcagggaatctagagcgtagacacatagcagcctcccatgggaggtggaaacacaggggtggaaaggtggtggttcagaacagccagtgttctgggcctgcaaaaatgggggcactttcctctgttgtataggcaagcactggggtaggtattgggagaagcagagcaggggctggtgccagtccagacactccctgccaggagctggctcgatggcttagatgtcttcagagaaggccttcagggttatgtttgagcactgtctggtgtttacagaactctctaatagctcattcccactcagtcccttccttatacagtctctctgtccttacagagtctcttccttctcttcagcatatccaaagggtcacatcacagcccagggatgccactttaaaatacccttagtcagcagaacctgggaatagcctgtcttttgagcatgttgagccggaggactggacgtccccgatagcccacataaagtgtgcaggagtgactgtttccaggtggacctgtgggcctgggctggctcacagctgtctccggttcattaagaggaagtggtgcactggtttggtcctcatctctcgtctttgaaaaacaaaacagaaagttctttgcaatgtacatcttgttagtgctgaccagcaagggtcttagagtgtttaagaacaggcaccaacccttatctcaatgagcaatgcatctctgagagtggatgctgtagcacagaaaatctcacctctctcttaacagaccattgtaagtgctttgaagtgcagtacccaacacttacccacaacccaggagcatacacctatgatatccaagggctggctcccctggaagctctgcagacccgactgccatatcggactgtgcatttccaccctgctctgacccctgctctcctggctgagtgcaggtgggattggggaacaacttattcagaagcccttgggagcaccctgaggtttatctcaggcaacacactagttttaaaataaacagaggtgtcagacagcccctgcttgcgctgtttccagatttaactctggaatctggttttgttttcttttccttgttggttggtgggttaagacagtttcatatagccctagctggccttgaactcatcatgtgccatcctgccagcagctggatcagtagcccacccagagcactagtcttggagcagagtaagaccgctgtggatgagggcttgattctggggggggttcctcctagaggtaggcatgtagcaccttctcctcagggtgggaggaaggcctaagaaaagagctgagaggattgaaggggtctccaccaggcagagtgcacccagggtgtatgggaaaggagagcagacacaggaacatggcccgcagagcgtggagctttggctggcgacaggggacattgcatagttaactgagagggtcctcaggagctggcccataacctcagagtcaggtatggatctgagggagccagaggtgcagtgtctgtagaatccacccagggagacccactgttggcgcttctctctcaccaccacccttggtgctctctagggccacaaccccatgctctcttaattcttacacttagcagctacccaggaggcggtccaggagagtcctccctgtgtccacatggtgagcacgtattgatattgtgtaaccactgtgtgcctggccctgtacacatcccagaagtcaggccatgcctgggcagggtttgtctggaaagccgctctcctttaggttccgatgtaattttaatgtatttatcttaaaaacaaaaacaaaaacaaaaacagttccttaaaagaataaagaaaccaaaacctatagatccagtagtgactttccagcctgtccatttcgttgaccaatatggcctgtgtcacggggtcactattgcctaccagcccaggatcccactggcctcccctggatcaagtcggcatcaaccatatctccccagaaggcctgtccaccccacagcaacccctgtaattggctctagcacttctgtgcttagagccatctgtgtgagcctgtcccttggccccacctactctttgtcagaacaatagcacctcttagcctagggtagcagtggtcctggaaatattcagataagaagggcactgtacctgttcatacctcgccaagacctcacctcctagataacagacctgcccacgcacgtgggtgccgcagcctagcctctgcctcagtgatccgtaagggatccgtactgcatatccacttctttctggttctgccttcattctttacttccaggttcacataatgatatactcgctctatttggtttttaacacctataagtacagcttcccactatcggaccctttcatgaatttttcagatcatagtttcaccacagctaaacttgggtactggttggcactaacttcagaatagttgtatcacagacacctcaccccccttaccctttgtgggtacaagtgccacctacattcacacatatgtccgagtacattcattcattcattctctccctatctctttctttctctctcaagcctagtttttgtttctgtagaatttccggtcctgcaggtgtataaatagggtttgtgctgtgggtgtgtatccccacaggaaggcaggctcctctccggcactgactggacggtggagcatggtaggctttggtagacttttgccgctttgaattgacaagacttagatgcatatttatacagattacccataaagtagcacttgtaataaaaatatttgaggggatgaatatctaaaactaaggcactgactgtcatacttctgtcactaaaatatgagaaacacgagtgttaaggaaacatcctcactgtgataaatacagagtcatagccaagtgctgtcagtacaagactgattttaaaacgtaattgacttacttcatgttcactgctgtctgcctgcgtgtgtatctgtgtgagggcgttgggtcccctggagctgcagttagagcaggtgtgagctgccatgtgggtactgggaagtaaacctgggttctctggaagaatagccagtgctcttaactgctgagccatctcctctccagcctactttttttttttctttttctttcttttttcttaaatttaagacagggtctcacatgtctcaggctgacctggaatttgctatgtatccaagaatgacctcgaacttcaggtcttcctctctccacctcccacgtgatgggatcacaggcatgcactgatgggattagaaccagagtctcatacatgccacgatagttacctgcacgccatgcataccagctgagttacagccctaaccctctgtaaaaattaacacttgtgtaagcaaaaggcaaaaaaatgtggttttaccatgatgataaactacaaacaaaataaaacaacatcttagccctttaaaaattttttattagtagtgtatatgtatggtgtgtgtgtatgtgtaagcatgtgtctgagtttgtgtgtgtgtatgagtgagcatgtgtgtatgtgtgagtgtgtgtgtctgtgtatgaatgagcatgtgtctgtgtgagtgtgtgtgtctgtgtatgagtgagcatgtgtctgagtatgagtgtgtgtttgtgtgagtgagtatgagtgagcgtgtgtgtgtgtgtgtgtgtgtgtgtgtgtgtgtgtataggtcagtgggcagcccgcaggatccagctctccttccatggtatatattctgggcattgagctcaggttgtgaggcttggtagcaggtgactttacctgctgagccagctggcccccattttaaccctttctgagtgagcacttcagtgttgtcagacactgcccaccaccatcctaaaaatccctgtcaggatggaatgccaccatcccatcccccatcctggcactcactgctcttcttcccatgtagatctgacaatatgaggaattttctgtgaatagagccacacggaatttgcttattttctctcagcacattaaaatatgttaggatttcttccttttcttttttttggattaatattccattgaatgcaattaaatgttatttgaaacatgaagtttttgggtgtttgttgtttgtttgtttttccagtgttggggatgacccctgggcttcgagcatgccaggcaagtgctgtattactaagccataccctcagccttaagtacaaggttgaaaaaacagcattcaaaagaataaaatgactaggaataaatttagccaaggaggtcaaagacatagctactgaggactgcaaaccatttgtgggggaaaaaaaataggaaaaaaaaatctaccaagatagaaaggcagcccatagcctatgttcatggactgggaggctctcgatgctctccaaagtgacctttggattcacaatctctgcacccccccccctccccttttatggaagaaatagaaaagccatcctgttaattctcatggagtctccatggatcccatagagaaaacaaacaaacaacttcaaaaagaaacacgaagaaaaaacgatccacacagcctgtttcaaaacttactgcaaataaaaaatggtggccctgcccacttaggaagatctgatggccagcgaaatggaaccaagatcagaaacccttctgtctgtgcccagatgatcctgggccaggatgcccagagcttcctttaaggaggaagggatgctgtgttcagtgaatgctgctgggacacggctgccacatctcgaatggttatcaccgaatctgtgtggcagcatggtcactgtacccagatagttagcattcacaccagtctggatgttgcgaatgcatttcaaagatgaattgccatttaaatgaataaagttttgggttcagcagattgccctcttcagtgcagtggacctcacataatcagttgaaatccaaggagaaaacaggctaagatctcctaagtgagaagagattctgcctgtgactatagtgaccgtccttccccaggtctccagcctacttcccatgtcccgtgcagttgggctctctctctctctctcttctctctctctcctctctctcctgtctctcctgtctctctgtcacacacacacacacacacacacacacacacacacccttccctgtcttcaccctttctctgtttggcctcatgtttccaggatacagtccctaccacaaacccgcttctgtccagtgtgagctcaccgcgcagcaggaccacagagcccagaggcggcacagtaccttgctactctgactttggattattgttttgcacatggaacccaacctttcaagggaaaagaatgcctttgattctgcttgtcactttttaaccaaactgggtttgttaaagaagactgttacagacagggatgctgtggagtggcaataactgggattctgttggcaaggagatcaagtcacagtggtggaaacaagtagggctctccaagcagaaattccagtagccctagtctgtgctcagatgaaggagcagaagtaatgaatgttttgtgggctcctgagagagagagatgagctgaggcttggctgacacagttgctctcagagctgggcagtaggccatggagcttccagaaggcggcaagtgaaggtagttgccaagggcataagctgatagaatcagggctgcccagaggtggcacctgagggagctggccttcagcgggtattgagctgggtgccagatgctaaatgctaggctgggacaatgaggaaagctccagcctgtgcatggagggggcacccagggaagggtcagtcctgcctgtgggtagacaagaggctgtttcctgccctgaagtgtgataagagccacacgggtctctagctcatgcttgggttttgaaccaacaattttaggcttgcttctcatgagcctctacagatctagtctcagtttcagtgaggtagacgttagtaatgaatgttcatctcatctctctgcagcactgaagtgaacagataacactccatggttgttagatccctggtgtgaacagagctaataaacttgatggtagggtctggatagtaattgtaaatcaccttttccttgacttgttgaaactttactcataggaggtgaagggtgaagccatgactttgctaagtgtgggtgccccgggtcccagctggttgtcagtcttcttgtgcatgctgaagctgaaatcacagggctcattcagaggcctacagagcctaaccacaccggcttgtgtgtcttgattacagtggccttgtggtctatgcagatggacccctgaacttggaccggaaggtggaggacatgtctgagctgttccggcccttccacacgttgctgcggaaaataaggtgagggctgaagtcacatgctcagcccaccccgactcatgagggctgggaggcagggattgatgtcacatgctcagccccctttgagtcaccagagctggccacacatcctcctgtgtcatacctgtgcccacagtggctcaggcttacctttgtctcctctgcctgggcctcagagtggttggcagctcttgaatgccaagctcagtggaactgtaaacttcctaccgtgggtgtaccacatggctcagtgcttgctctcagttcataaaagctccgaggttcccttcaggcagctcatgtgtcagtcccggttagctaggctcctcaggttgtgtggatcccttctgcgatgccaaacctttctcttattggacagaggaccgcccagtggctctgtgggatggggattcataccctagggatggcctcatgatggactggaaatgatgtggaggctatgaccatccatcttctgggtgccttactggtgttttcgcctttggctctacatagtgggtcctgggtgggtccttgtagcaccctatgaatttggcagagtatccagagcctcctcagaacctttcagcacaaggtggcctcaggcacagttagtgaggccagagtttctttgtagacacatagaatgtatatttatacagaacagatttaagaagagactcttatgatcttttcctgtgggcagccctgaagtctcagaacctcttcaagtcagcagactgggagctcactctgtttcacagttcagtttatccagtagatggctgttggctgttttcctctcactctgggtggaatgcaaacctaagccttggaggctgaggaccttcccttcttggttccaaggtgagggatggctgtaaatgaggagagacagcagacagtgctgaggccaggaaggtaagcacagcctggccttagctgaggggtttctcagaggaaggatggggcgggtgctggggtaataaaaggaagtttcgtgggctcaggagagagcgagggccagagagcatctgaaaattcaaggcaaatatttccttgcccaaggttcaggctgggctgcagagctcaggggcagtggtccggtggacctcatcagcactgagggcagccaggcagtacatctgctgggttcagatggaggaggagtcccaaaaacctttaggagcaagggaggtttctcacagtcctgcagactctcaggagacagttgtatgcctcaagctcacagcttgttaccctggagatatttgccaaatgttggcagttcatgggatggagggttgggaaactagaggaggctgagttggagctcagagggcagagcacagagtctgaggaccctgatgtatgggaagatggaggctcactagcctcagagtagcagtaagcctgctggatgtctgggccaatgtgataatggatcctactaccactagccaaagactggaatccccttagcacaacacagcatcacttgccactgttagaatgttttctgatgtccatcatgcagttcaaacctgttgaaaaacgtgaagcaacaaaaaaaatgatttgtagtcaagagaaaaacatgtgactcataaggtagatttaacagacaaggacatgagcacagttattagtattgtactgcagaacataaaataaagagggtgttggagaagaggaaggagagtttaccaatttagaatcaattaaaactattctatctgggagttagtggtgcacacttttaatcccagcacttggaaggtagaggcaggcagatctctgtgagtttcagaccagcctggtctacagagctagttctaggacagccaaagttatacaaagaaactctgtcttgataaaagccaaaataacaacaacaacaacaacaacaacagtagtagtagtagcagcagcaacagcagccattattattttcaagagctaaatgttcactgtctgaaaacaaaaagcagtgtatagatccaaaagcagagcatggaagtaacaaacctgaggctagatcaacaaaggaagcacaaatgggagcccaaagactaaaaggagtgaggaagctagtacacacgagcatcagtcggggagacgtgtgcaacacactcagatgtctaacacaactcactgggatcccagaaggggaagagagacgtggagcagaagcaatattcaaagaaaatggcctagggctttccaaaactgatgagaaatctattcatatattcaggagacacagatcacaagtaagatgagcacagaacattcctgtgcatgtcataataaaattaccaacaacaaagacttaaaaactgtgagaggaggaaaataacatattactttaaaagtagcataaaatagaccccctcttatacacacacacacacacacacacacacacacacacacacaaacaaaaacctgagcatggtggcacatacctataattccagtatttgtgttcaagtccagccagtgagaaggaggaggaggagaagaggaggaagaagaggaagaggaggaggaagaagaagaggaggagaaaggaggaagaagaagaggaggaggagaaaggaggaggaggaggaagaaaggaaatgaaagcaagcaagaaaaataatgagatgggcatggtggcgcatgcctttaatcccagcactcgggaggcagaggcaggcggatttctgagtttgaggccagcccggtctacaaagtgagttccaggacagccagggctacacagagaatccctgtctcaaaaaacaaacaaacaaaaaaagaggatactatgaacaattttatgtcgatcaacttgacaatttgaattaaagaaacaaattttacaaaacgtaatcaaagctggcagaagaagcaaaattttataatacagtattagtaagataacttaatctatgatttaatccttcccacaaataaaatatcaacagactagatcatatggatcaagatacagttctccagcttatgatcacgaggcattgcagaagaatggggcatttttttttctctagtaaatgggatgagctaataggtatccatgtgagaaaatggtctcgtttatggatgtctcttgctgtcaggatcactactgcaatcccatacaaaatcaattccagatagaatagaggtataaatgtgaaaagagaaactactgagcttttggaggaaaacagttaagatcatcactgtaacagtagaggaggcagctgttccctaaacaagacacagaaggaccaactgttaaaaagaaaaagtgtggttggagctacagtgcagtaatgaacacttacctagcatgggtgagtccctgggtgcaattttcagcaccacttaaaatgacatattaagctttattatattaaaaatatcacactggtagacacctgcaagagagtgaaatgtgggctgaagacccggagaatacacccatcaagatcttaactcccaaacacaaagaaaatcaacaaaaagaaaagctagtataagttttgagtagcgtgtgtaaggattggttagtgcaaactggtgctctgcttcattccatgatgcttgtcttagtcagggtttctattcctgcacagacatcatgaccaagaagcaagttggggaggaaagggtttatttggcttacatttccacactgtcttcatcatcaaaggaattcaggactggaactcaagtaggtcagggagcaggagctgatgcagaggccatggagggatgttccttactggcttgcctcacctggcttgctcagcctgctctcttatagaaccaagactaccagcccagagatggcaccacccacaaggggacctccccccttgatcactaattgagaaaatgccccacagctggatctcatggaggcatttcctcaactgaagctcctttctctgtgataactccagctgtgtcaagttgacacaaaactagccagtacaatgctgaatgaggtcccattgcgcgtgcaccagggggacatgtttgtactgtccaggacagagctgccgcccgaggccacagactcagcgtgtccaagctgttattgactgtgttgttggtcttcattgtcaacttgatgggatttagggtcacctaagatacatgttgctgggtacgtctttcacagtgtttctagagaagacccaccccatatgtgagtagcactatacagcagggctggggatctcggcctgaataaaaaggaaaagaagagaaagccagtatctctgtctctggttcctgactgcacatgcattttgagcatctaactcacatctcagctgccatgctgaactgtatccccccaaaccacaagccaaaataagcccacctgtcccttccccacatcaggcttttttgtcatagcattgagaaaagcagcccatacagcaacgctatgagccagtaatctcttcctgtgtggtggacattcacacgatgctctacaggagaggcatgcagcagtgccagactgtggcagccagatctcattagtagacagatcaataagtggtatgtttacagaacagaagacagtagccttctgagtgaatgatctacaacagtgtgtcttcctgcgagtgaatctttcttcttgagtatgccggttagttttttttatcaacttgatgcaagctagagtcatctgggaagagggagcctctatagagaaaatctttctatcacattggcctgcaggcaaatctgtgtgggttttttttttttttttttttttgactgatgactgacatgggaaggctccgcccactgtgagtggggccacccctgggcaggtggtcctcggttatataagaaagcaggctgaatcagccataaggtgttcctccatagcctctgggtcagctcctgcttccaagtatacccttaatgacagactgtaacatggaagtgtaagccagataaaccctatccttcaaggttgctttagtcagggagttttatagcaacagaaagcacaataatgccctgagcttagcagatacaatgattcagcaacagaatgcccacttcaatttgagtttcaggtaaacaatgaatacttttatgtcagtatattctagacactcacctacacatttatatcagtggacagtgtctgccacaagaccctgtaggctgcagattctcatttctctatataacgatgacagataaaagcatgtctgcttgtgaagttaagatggcagcaactagggagactggaggcatgggagtatactggggatcctggttgattactttggggtatggatactgtttgtgattgtatttggattaggaaactcaagaagcattacagttctttccttgatataatattttaatgtagtctttgacaatttcaaaattgtataccatgtcttttgtttgattcattttgggggttgtttttagaaacacactgagtgtgctgcccatataccatggcacatagtcaacctaccagggcttctttgtgcaatcaacaatatggctttatcattaagttttagtggacaagcaaaagcaatgacgacagcctgaatcctgaatcgtcctgagggtctctgggatcttcctgaccaacagactaaggggaggaatcctgcctctgacactggatgctttttagaagcctcacaattctgagaaatacatggacctttctgccggttcatagatacattggaatcttcactatggcatgcagacttcaagtacatcctgggtgttccctggtagagaacagcatgtagttggtctgttggccctgccttaggctcatcctggtccctgtcacaaaggcagccttcatgctcaaggctcagcttcagtgtccctttctcttttttattttttttctctcctgaccacagttgtgcctccctccttccctccgaaacccccgcctccgtgtccccttcttgaggaaaccatctcaaactcagccaggggccccactgctctctccttggcttgtgtttccttcctatctgttgtcatcactgtggaatgtgcgttgtttgtacaaatgcttaaacctgcctcactcacctagaagctgcctcacttaacctggaaaggctgggccatgcttgccttctccctgcaaacccgttggtgtccagagtctggcagaaatatggctggttcttagtactatttagttctttttaaaaaggtacaaattcctaggtcaataaacttgtgtattgattttattctttaaagcagaggttctccacctgttggttgctacctcttcgggggttatatatcaggtattctgcatatcaaatatttacactatgattcacaacagttgcagaattacagttaagaagtaacaatgaaataatttcatggttggggggtcaccacgacacgaggaactgtgttaaaggggcacagcattgggaaggtgagaagcactgctttaaggtttgtactagggctggagagatcgctcctcgtagttaagagcacttgctgctcttcctcaggaccagggtttgatttccagcccctatatggtggctcacaaccatctgtaactccagttccaagccatctgatgcactcttttagcttccatgggtaccaggaatacatgttaaatagatatacatgtaggtaaaacacccctacacacaaaataaaaataaataaaaaatttaaaacagcttttattaatatagtcacaatattcttatgatcaaggtcttatgcatggcagacaaatgctcaccactgagctacattctcatctagccagggccttggcactcccagcgagtgattccagagtctcatgtttaaatataatttacaaatgtagtcacagctattcacacttccacacctcgtggtataagagagagctggcgaccaggtttcgttttgaagtggagggcacagtgagtgtcaagcacaagtggttgctgcctgactcttcagtgtgggtgggattgcttctgctgtttgtcaccagaggcagctgtgacagcctcgtctctgtcttgacccctgtagggatctgctgcaggcgctgacggaggaggagctgcacacactggagcggagcctctgtgtttctcaggatgtggagctccccatccgggcagacacccaggcacccagtgccctggcacccaccttttctgcatctcttcctcccgaggagacactttcagccagtgccaacaacccagaggcagaactggcctgctcaatgcagtatgatgatcaggagttggaggaactcagccgcatggtccacagggctggggatgagatgtcttctctgctttcaccacccagtgcctgccagtccccggcacataggccaggctcagaggctagccctcgaggggaggcctctccagccagagcccggctgaaatcaggcagtgatgaggaggaaagggtgttcttcatggatgatgtggaggtgacagagtctcctgccaggcctgaatccccagggaacacatttgagttgacgcagggtaatgcccagcagagaggacaagatggccagagtggagaggtgggggtcgaggcacctgccctggtaaaggaggaagactggagcaacaataatgttgagggtgacaagataaagctggccagcctcatgggctccacttcctgcagctgcctagactcacagctctacctggacggctgggaggtgagtgcagaggatgctgagactgcagagatgattgcacaccggaccgggggaatgaaactgtcagccacagtcatcttcaaccccaagtctcccacttcccaggactcagctgtggcagcccaagaagccccaggccatggtacttcccctttggagcccagggcagaggggacaggggacaattcacacaaactcagcactacagccaccaactgcctcctccattcctgtgtgtgctgtgggagctgtggggacagcagggacgatgctgtagagcgcctgcgggagaagtgtggcccaggaagtgtcatcagtgcctctaacccttctgtaagcttagccaagggtggtgacaaagagcccgagagaatagatgaggcccagccttctgatgtcaccctgcctgcagaagatgcctccaacaggcaggagcccaaagcccctgcttccagcaagtgcctggcacacacctcagggcctcaggtggacacagcgagcaggttgcaaggagagggtgaggtcaaaggccagccagagccagaggccagaaagcaggaccctgagaagtcccctgtggtcagcggggacagtccaagaggggatgtggcccagacagaacaccagcacctgttgggctccaggtaagggcagattctgttctagggaccagacttatctcttttttgcacccaggatatgtcctgtctgatttttaaagcattgagatacttcttggagtttcttggccaccaaagaggctcaggacccagggcaggtttgcagttgtcacctgagaggatgaggtatgtactgcccaggtacccatcctgcactaagctaagcaaatatcagtgatctccaggggcccagtgattctttcaggtaatgccggcacagagctcccccgctttcatcttggtaacttattctacccctgacgtagtaagtgggcgtaggtgggagctaagcacacagtccgctgatttttgctcaccaccatacttactgggctcacacaaatgagaagagattcacagaaaccctggctgtgtacagagccaagctgagctcttgaggctacccttgggcaatttcttgggcaggacccgtatgcctcctgcccttccttaactctgtgctctccctgttccctgtggctcttcccacggagatccttctctaccgttgcctggcgatgtcagcgagggatgggacattccttgttagcgctgaggcttctctctttgcctctcaccggagtgttctgtccattgcagattttgacaagcatcgctggtgttgactgtattgtatatttgactgtattgtgtattttatctgtaatgttggggcaagagggaggggcaaagaaaagacgtcttccatcctgagtggttttatacattgtggtgtcctcagaaccctgccttgtggagacttacctgggcaaggcaggcaaggatggagggcaggagtggaagagtctctacctggaggtcctggatactaacacatgggtgcgtacaggttgggacaaggtaaatgacaagatagggagcagatggaaaaggaaggtacttcaacccagggggcaggagtctctgcatccagggcagatgcccatttcctgtccctcacctcttcctagacagcaaacagtcaccacttttcctggaagcatgcaagggagagctggtcaggatctgtgtctgtcataactctgaatgctctcccactcactacatagctctctgctctgctactggctgtgatggtagacgttctgaacccacctactttctaggccctggcaacctctaatctgcttttggcaaacatgatctgtagacattgaaaataagccatgtagtacaggcacttccgtgtgcctcatcttttcctgaacagtgtcttcaaaggtcttccacactgcagctacagtaggacttcactccttttctcagctgtgtcaccccagtatgcggcatggccatgctatgtttctctcctttcacagccgatccatctgtaagagggttttttttttttttctgtcaagaatcatgcagctatgaaattctacttccagttttgtgtggacatgtgtttttatttttttccagtctctaatagtagaacatggaggttgtatatcaactaaccattttccacatacccaaggttacatacatcacatacatcctacaagtggtatgtatgtgtgtgtgtgtgtgcgcacgtgcataatgaggggttcaactccttcaaattgtcaatgatttttaatcaactttctattcttagggtgtaatctattaatatgcagccagtcaatgacttgttgggtgagtgcccataatttaagcccttggcaggctggggcaagagaatggcaaatttgaaaccagcttggaccacagagtgagaatgtgtctcaaaaccaaagcaaacaaacaagaaccaaagtcacttgaaaatgttcccccttgactttgcattcagtttatagaaacatttaacttggctttataactacataggatatttgcattctttctagacaaagttgaacaaatagatgtatgtgaagaagactgcctcacgggactttactctttaaaggtttgagactcagaggtagactttgagggtgcacactcctgacaccaggtagatagatggctctgagctccgtaccctcttcaccttgccccctgacctctagccaaaaccttaccagagctttttggagatgtccccactttcctttactgaaaagtcgagcccagacatggttgggccagtgtgcactcgctcaggcccccatccacactcccgctgttgtagatggtgctgctgaggccagctggtgcagatgtctctctgcttccataaagccttttcttggaggcagccccagcttcgtagccatggaatgaattaacttctcagactgctgatggctacctagacacctcctgctctgttactggtgagtgaattatttttctacaaggctgactcaagaatcctgtaaattccttgacagggggaggtgtgggattttctttttttctttttcttttcttttcttcttctttttttttttaatcttttctgtttcttatttgttcaggaaacagcagaagacatctaccatctggaaacttctgccctgggaagggcccttcatccatgcctctacatttaaacccagtccagttcagtacacactcgacactcagctacgaaaaggcgagacaacctacctggtggcccagaagacctcccaccttcctggaagtcggtatagaatatgcaaagggtctgaagaggaagcacttggcaaggggccaggacctcagacagaggcatgtcagcccagcactgtgctttagagagctggaagaggtctgcctacaactacctatcactcctgacccaacactgacagaaccatcgtaggagtactggcgagtgttctgtgtcatgggcacatccctcgggggccaagccaagtgctggagcccaccggggaaccaggtggatgtggcagacctttcaggtcctgcaaggaggtgaccagcagagtgttttcaaacagaaggaagaggccagtcacacacaggcagaacatttgctgaaatgtggaatgagacgtcaggaggtctggttagtgtaacagcagtgtgacagagcttttttatgacacatgtcgtctcatgcacagggtggtatattaggattctctgaaagagcaagatagggtgtgtatgtgtgcgtgtgtatgtgtgtgtatgtatacatatgtatgtatgtatatcagatatatacattataagtatttgaatttcaattcttaatatgttttaaaattatatatatatgtatgtatgtgtgtgtatatatatatatatatatatatatatatatatatatatatatatatatatccctgtactagattgggatctatctatataggacctagtctgggtactgcaaagtctcatgctggtaaggctgagaactggtagttgtccagtctgtaggctggctgtttcagcagtcctaatctggtgctatggtcctgaaggattcctggggagtagctgatcttcagtctgcgttggaatcctggagaagttgtttctatcaccactgaaggagttccgcagcaacagggtagatgaacttgccagtgagagtgaggacaggcaggcaaaaagcaaaggtttcttcctctgtgtccttttctgtgggctggcactggaagatgtgacccagatttagggtgggtcttcctgctcaaataatcagattaagaaaattcctcacaggagtgcccagcgtcttgggtttcagttaccttctgtgagaaaccctgtcttgaaccaaaaaaaaaaaagtttccttctgtatgcagtcaaattgacaaccaagattattcatcacaagtgggttatgattcaactctagttatacatctgggagacagatgctaatgtctgcctcgcctcagtgtccatggaagggatagtgaccttcactctttcaagcagcaggatccatttctctgctgttccaatttgatcacggggttcacccatcatctggcaggtgcctctgtatctcctgtgatatgtgacatgggaagcgtaatgaacagtggcaggccctgtgctcacaagtttctgtcccgtgtgtgagtcccacctctgtgaaaatggaagaaaagcagggagctgtggcaagagacctgcatttgaggctggagccctccacatccctggagtgtgtattactactagtcaagtagaaggactccacaaggaccaagggtcattcctgccaagggactaacacatgctggcagcagaggggcctacggctgagagtgtagaccctgctggagaagcccctctgtgggtgctcttctgtccttggctgagtccaccagccccagcatcaagggtggtgggacattgtgagtagtcagcatggatgtcctcaccctgctgagtgaatgttctggaacttctttccttttctttcctggaatggtctttcctttccgctagcttctttcctatctgttcagtggtcagagattgatgtttttgggaaaagttgacatttttagaaagctggttttctcccacctaaccttagcttcctgactcaaaacgttctttgttgtcaactccattgtctgcttgtcagaggacaaaacccactcaaacccatctctcacccttagcatgcagggatgtttgctgtagaaactacactaatcccttttttttcccctctgtgtggtccctgatcattgtaaaaactctagaaacactaaaaagactaaaagaagtaaataaaaatttcccacattttatgaatagttttgattattcttcatagtgaaactgatgctgtgagtatttctccacaaagttcctgttaaacacaactctagggttggagagatggctccgtgattaagagcactggctgcccttccagaggaccttgatgtagttcccagcacccacatgacaactcataactttgtaactctagatccagtgccctcttaaatcatctgtgatgccccgagcaaacatgcaatacacacatgcaagcaaaacacccttacacacaaaatttaaaaaacagccaaacccacaactctaatagaaatggtattgtgtcacaggacatagtctatttacaccatatttccaatttatgttttaggttagtcctgggcagtttctttttcttttttttctttagactttaccccagggtctagaatcagcatcacagaggtcaaaatctttccagagaaacactgacctacgcatacacaacatacacaacatacgtgctccaaggtgtgcccatctttaccaacacaggcacctactatacatcctgctgacctgggaggcagagcctgtgttctctgtgtgtgtgtgtgtgtgtgtatatcagccagatggtggtagttcacttgggaggcagagtcaggtaatctcttgagttcaagcccagcctggtctacacagtgagttccatgacagctagggcttcacagagaaaccctgtctttaaaaaaaaaaaaaaaaaaaagccggggcctggcaaacacagaagtggatgctcacagtcagctattggatggaacacagggcccccaatggaggagctagagaaagtacccaaggagctaaaggggtctgcaaccctataggtagaacaacaatttgaactacccagtacccccagagctcgtgtctctagctgcatatgtagcagaagatggcctagtgggccatcattgggaagagaggccccttggtcttgcaaactttatatgcctcagtactggggaacgccagggccaagaagtgggagtgggggtggggggagggtatgggggaattttgggatagcatttgaaatgtaaatgaaggaaatacttaattaaaagaaaataaatttaaaaaaaattaaaaacaaaacagacaaagaaaaaaccaaaagaaaaaaaaaaaaaaaaacctcccaaaaaacaaaaaaacaaaaaaaccaccaaacaacaaaaaccaaaacccacattgtttaaacaagcttacagttctgggctgcagctcagacacaccttacaccaggcctttagcacagttccagttactgcctttgttgagccaatggggcactttactagcgtggggatctgtggctgccttctggcaggcatttctatggctccccctggtggtggatagctgcagtggcttctaactgatttcagctgctgggccatgtgctagaaccattcacagtatctcttaaccagtcccatgtagcatgttgttgtatttccagtgtatctggataggatttagaatcctcatctagggaaatgccctggctcaaggccaagtggaaatgcagcactgtgggcaggaaggcaatgggccttcagatgtcgctagccctagcactgttgagtcttggagtctcagtgttaatgttcttatttcctccatcttttccccagtgtctgccctgttgtcttctgcccaaacgtagccccagtgtatgctggtagtggtccagtccccactttagagggcacatatgtgatggttcccttagggaacctcagatcctcatctgagtatcagtgggtgtagggaaggtgccgtgttgggaggaggctcctggagaatatggcttggcagagtccaggcctgaagtactgagccttatggtatgtgctccatgtcctgtgctgttctggagaagggttgcaagctagtcctggctcttagttctcagcaagacatatagcaggtgttccatccgtgtgaagcaagaccatttccagtgtagtcttcttgcttctgagggagcacagactcacaagtaagcaagggaaagaaggctaccgtagatcacatgcagtcgaagggtgcccatcctcagacagcaggcttcagaagaggcttccgctgtttaaactgcagtgtgaccagggaaggcctcagccaagctcacccacttgctgctgcacagtttctaggaagcgtttagaagcagcagaagctcaggcatgcatgacaagagtggtagtgtgtttggtgtgtgtgcctgagtgtattgtatctgtgcttgcatgcacacacatatacattgtgtgcattacatatgtaaacacactttttgtttattttcatctccatacatttttagtgtacacacacatattgcatctttagttaaaaagtagtgatgtggaggttagagtcccataccatagtagtgggggccttctgagagctggggtgagtgctatcctggtcttgactctgtctctgagactaggtgtctcctgaaggtgtgagcagtgttgtaggctgatagacagatgaaactgggcagggcagatggcctcaggacctggtgagtagaccagaaccacaagagtagttgtggcatctgtggccacttagaggcagtctccatattgggcactattgcactcaatccagtagaggagggactgtggattcaggctcacatatctttggcataacgggttaccagcatgaataggatttccttccccactgaccctacacatgtgtcccttaggtcacagcccgctggccttcactgatggattgcaggcttggcctcctcacagaggccatgctatcactgtcataatcaaggttgggctctgaggatagggcttctcaggcccacctgatgtctgtgtctctccttccctgggatagccaggggctgagtgtagtgatcagagccttgtgtatggctgtagagtctggcttactgtgtttcttctggatactttcacagtcagatgtggagacacttctagcacaggccttgggaagtctaggatcagttatcttgccatgagagcaatgtccacagagcatgagtagacctttggtcactccgtgctggggcaacttcattctgttgtcctagctaggtcttcagagggctcccaccttgacaatggcagattgaggcagcctgtgacctcaatggctttcctggttgcctcgactctctcttctccattatcctgatgatctatgatgtctcagccccatgtctagagaatgtgcatcaaaggctcatccctccacagtgtgggcttagcattcctctcttaaggtcagacagcattacttctccactctgtggattaaataaacagaggccctggcatagatgttgatgcctggcaaccttcagctcagactgtctaatttcctgagagtcctttacctcatgggggtcccaccatggcatcacaacatgggtgtgagtgcagttcacaggctaattggctccgtgtcttcagacaggcatgcctgaggcagggcactctgtacttagcctcagccgaacctgaatatgtggtcttggtcagcagtaactgaaaatgtaaagaatgttcctatctaggtgaatggcccgcccttctcaaaggccagagacgtcaggccgccagagagaatggagcttagttcattttgcacttggcggacctggtgcttgccttgtcacattcaggactatttgctgtcccacagtgcttcttctgcctctcggctatcttttgataactgtgggatgtggatgagaactctgaccctttccctgccccagagagaggctctgagtggcaaggaggggaggagtgggagctgtggggatttcagagggttggggatggtgtcccctcagccaccctctcagggttgtagtccctagcctggaatggtggggtggaagtgaggatccaccttccttccaagtcaccctgagaggcttggcagaggtaatgggggtaggggcagctagaatctgtagtgacagttgccatgtcaccagaagcccctccccccatcccttgtgtgtgtgtgtgtgtgtgtgtgtgtgtgtgtgtgtgtgtgctgtttctcttaaagagacttcagctgtcttccttcgtttcctgcagttggtctccaggtgctgtggcattcaaagcctgcactcagaagcatgaatcgagaccacctctttgctgttcaatttgtggaatgaaagcaacagtaaacactctttgcagagcactttcctagatgtataaacattgattacaagttccgactcccctaaacgacttaagctataattatatgttaggtatgactatttcctttgacggcatcaaacactttaagcgtgctgtgcttgtgtggacttctcttcactgcatgaatatcccctccctgcaaacggctctgtgtattagtggcctgaggcagctgcactgctgtttcacagactggatctttatctagccatcaggacatttgactgctattatctgggctcagtgatctcatctctggaccagtaactcacgagcagctgtgagatggtctcaggaggggatcagagattccatatccatattagtgttagaggagacctaaagccagacttctactctcaagtcttagaggctagaggtctgaggtcacattgtactccagctaaaggttctgagccttcctgcctcgagttcccagggctcctggcatttccttgacttgtgggaaatctctccctcataaggacctttactgatcatccaggctggcctcatcgtgagatcctgacactgacgaatctataaagtaccttctctccaaaaagctcactgccaaatcctctggggtgtgatgtggatgtgtcacacttgggggcatgtggcattcaccataacatatggatcttgggcttctgactactctgctcttccactttcccagaggaaccaccattggatgtgttttcatggtgccatgatgatgacatcaggaagagtgcctggccagggcactcttccatatagtgtctggtccctgcaaagtgattgtccccgcagagaggagagcctgcttatgtatggactctcttgtctgttcctcagacatggaggctactgtgttggggatcttctggtgtagatccagaacaagaagaaaggctgttgcaggtttttacattctcattgtgttaatacacaatgggtccacagtagtgggcaggggtggagcaggaagagatttgtgtagcagggtctgtttgtagagagggagttaaagggatgggaggtgagtgagttgaatagagacctcatgacttttgtatgcagagcttctctgtcctggatctgtagggttcttggtaggagctatgcagtgattgggtgcagcctgtgcctggtacggttcatattgggttcatttaagtcatggacattcattccttcatgaaaaaaaatgtcttggagcttctttaacaatgagcagtagatgctgcagaggaaaactgccgtcttgcagtcttgacaacaggaagtcaagataagggagtctcagagctggttctatcaggggctgtgagggagatcctgtcctaggctaccctcctgctcctggtggtggccaggcatccctggaattttttggcttgtggaaacatcacgcacaacccgtgccttcatcaccacatgctgccattccttcatgcatgtctgtgttgatttactatttatggagttaccagtcctgttggatcagggcctaccctgctctagtatgacctcatctgagttcatgatgcccactaggatgctgactgcagggtaggacttcatcatgcatatgaatggataccattcaccctaggacagcatacataactctctgctagagccaagcagcactgtaaggtgcctgatggtcatagcatgctgaccacctgctgccattcacagctgacctgcaaagtgggtgtgacctagttagatatttttagagcttgttattagaaagttgtcctgccctacctgtcttattgctgtgacgaaacaccattatagcagtttggagtgggggtaggtttatttccatagaacagttcaatatcaaatggtgtgagagcaggaactcaggcacgcaggaacctggaggcaggagctgatgcagaggccatagagctgctttctggcttgctccctctggcttgctcagcctgctttcttatagtacccaagaccaccagcccagggatagcaccctcccctataaagtgccaggccttcccacattcatcatttattaagaaaatgccctacaagctagcctatagtacagacataaggaagtgattgccttaagtgaagtgtcaagttgacaaaactatccagggtattgcctgacctcttgactcctgaagaaggcagagccagaccatgttgtggccatttcagctctctggagctttactcttggggactgagatgtccagggtggtgggactgaccgggtccagggcctaagtgtgagaccctcctggctaacttctggacaggccaagtcgcctgctagttttatctcaggcatcagatccttagcagtgtgtttcctaggtagatggccagatgcccactgtgccctggcccatttctccacctctctcctctttcagcctcttgctgccatcaccatctgcaggcccaagggtgccatctgctgcctgctgcctcttcattctcttcttggaattgaatttctatttatttgtttgtttatttttttaaattaggtattttcttcatttacatttcaaatgctatcccaaaaattcccccataaccctcccccacccactcccctacccacccactcccacttcttggccctggttttcccctgtactgaggcatataaagtttgcaaggctaaggggcctctcttcccaatgatggctgactaggccatcttctgctacatatgcagctagttagcccagaaacttagaatatccaagatacaagttgcaaaacacatgaaactcaagaagaacgaagaccaaagtgtggtcactttgcaccttcttagaaatgggaacaaaacacccatggaaggagttacagagacaaagtttggagctgagacgaaagcatggaccatctagagactgccacacccggggatccatcccataatcagccttcaaacgcagacaccattgcatatgccagcaagattttgctgaaaggaccctgatatagctgtctcttgtgaggctatgctggtgcctggcaaacacagaagtggatgctattggatggtacacagggctagagaaagcacccaaggagctaaaggagtctgcaaccctataggtggaacaacaatatgaactaaccagtacccccagagctcgtgtctctagctgcatatgtttgtttattgagtctgtgtcttactatgcctagcctcaaatgtacctttctcctaagctgggattatggaaatgtaccacactgaatgcttcatttattcctatgaccagaaaagagatgcttggtatttcctagtctttcatctgtgtgtgcaggatactctagggttgtttgtttgtttgttttgttttttggtttggtttggttttggttttctgagacagggtttctctgtgtaaccttggttgttctggcatttgctttttagaccaagttggcctgcatttacagagatccacctgcctatgcctcccgagtgctggtattaaaggtgtgcaccaccactgcctggcagcactctagctttaaaaacatctatagctatttattacgttgtggtttggaggcaggggcttggatgcataacacagcacatttgtggaagccggaggacaatttgcaggattcccttcttccctcctctatgtggggcccaggaatggaactcgggtcctcaggctcagcatagaatgctcttacccgctgagccgccttaagggcattttacttaacagtatttccagtacgctcatgccctgcctgttcggccctccctgcctgttgtcctcaatgccttcacttctcttccttgtcctgcttgctcgtcttgttttatttccacttaatgcaattttgataaatacctgacatcagccccttgtggtttgagttgcactgtgataccttgcttgtatcctcagtcagccaccattaccttcctcttcaagcgagttgtcctcttctaagctcatgctgtctccatgtacctgccccaggccttggtgtctatccacaccatcttctgtgtctttggattcgccagctttagagccttcacataatgaagtcttgtaagatttgtcttttgtatctgcttcctttcatgtatcaggtttcaaggctccttgacagtggagtgtggctcagagcctttttgttttgaaggctagacgatatttcactgccttgttttaatactcatccccctttgtgggcttttggagtcgtttctacctctgggtgtgtgaaaaatgatgctcagaacatctctgtccaaacatatgcctgagttctctatttctaattcttttgagtgagctgggcagagtgtgtggctctaatcctatcacttaggaaaccaaagcaggaggatcatgatgttaacctgggttccgtagtgagaccttgtctgaaacaataaaattaggcaagtatggtggtcatgactgtactcccagcacttggaaggtagaggcagaaggatcaagagttcaaggccttccttggtacaatacctagtttgagaccagtgtagtctacatgaggccctgtctcaaaaaaaagatcattttgagccaggtgtggttgtgcctttaatctcagcattcagaaagcagaggcaggtgtagttttgtgagttcgagaccagcttgatctcagctggtgaggctatcaactgcagctagggaattttgaaaagaagtctccctcttcctcaatcatcaggccagagtcaacaaggcccacatcctccggtgtgtggagtcaggggctttacctgcagagtaaagggctctgcatttattagcgtgaaggaacccattggcctctaggaaatggagccatccagatgtgggggcctggagctcatcctatgggtcccagcaggatcccagcttctgtgggtcagcaagcccagccctgactccaacttcccaggctttctctgtgcatcagtaaacatttgctgtgttagagcatgtcaacagaagacacatctgtgagtgtcccatccagtaacaaaggaacccattgggctcaaggacttcttccaggaccagcccctccttcctgtatagtcctccattgttgagtgctgctggtatctcccctttcccaaatgcttctgtacccagagttgtagtcatgaacacatccctgtgttttccccctgctcatacagtacataacttaagtcatgcctgtagtgggctgtgttgggccggtccagccctgccttggtagccctggcagtgggtgatcagttatcagaggactttgcatcccaccatggaggtttggattccttcccagttttcttctgggaaatggaatgctgccgaaaggatcagtcgtgtcagcagacatagagacagagggttcaggacgatgttgaaaatggttcattgagctatagaattgggagtttatacagttttattttaacagcaccaaaatacttttccagggtgtttgcagtagtttacactccaacaagaccaaataccatttttcactcctgttgggcaggctttcctctaaagtacactcactagtcaagtacccacaaacatttggcatagaaaacagaccaacaaataaatcagtttccaccacaaggaacagagagacagtagaggtcacgagttgctctcgttcagctgcctgtggagaacctgtgcgagacagaaaaagctctcccagtgttgacagtcctggacccttgagtgacagagacatggggacttgagtggcaaatccagaggctaacagcttataagcagggatcattgttcaggggtatagatgctgcaggcttgtggccctaaacactctgattgaaggcttactgtagtgggcataacatcagaagccccaccccttggcagcagtgtgaagaggtggccagctggtggcagaactactgaatgcttgggtgctggtgtgctcagcaccacagggagtaatattacagcctcgggtgacagactcttggcatttgggtttggcaactctctgaaacttccagcaaccaaggcctgtaaattctcttctctagttcttaccaaccttctgcttttcacgtgtttatttaatgcatgtacatgtcttgcctacatgtctgtttgcacactgtatgcatgcctggtgcccgtggaggtcacaaaaaggggagtcatttctcttggaactggagttacagacagttgtgggttctgggaagggaactccagtcctctggaagagcagccattgctcctaactagtgtcttctatctcttcctttgacctcagctcatggcctttcctctcttgccttttctctgcttttcctgttgcttgttatctcagctgcctcagcgctgtggccagtctgctggaggtgtagtagcttttcctccacttagtgtttagcaccctgacttttcagagatttggctatgaatcccctgtgcattgtcagaatgactttctaaagaacaaatctaataaaactagccactggggggttgcggggcggcggggaagggacaggtattaggagggggagaatatttgcatatcccgttgctgctatagcaaagtaccacagtgagtggcctcagttgtcaaaaatttatccttttataatcttgaggccagaaatctaaaatctggcaggacagttctccctccagaagcatcagagagagttcgtcctgcctcttccaactgcaaggagcttcagggaacccttggcttttggctgcatcactccaatcccagactttggatacgtggtcccctcttcatctcgagttcctgtgcctccacttttgtgtcttacagggacacttgtgtttggacttaggaccttctgaataattcaggataatctcagtaccagacccgtcatttgattacattggaaaagatctgctttccagtaatgttcccctcacagactcagggggtcaggtgtgcacacatttcagagtccgtgttctgctcccacagatggtgtgagaggtgaaaggtcttcatagcagttgggggattatgctaaatgaggatgcaaggtggagatgttcaagctctcataaatgttgcatcagtctccctggaagggcgagtgcagcgaagtagcaatcaaaggctagagcaaggcaggactggatcagggtctgtcaagaccattggtttttaaaatggacacactgatgtatttacgtgatgggaaacagcatatccaggcaactcagctccttggaggagaacttgtggaccgacttgccctgacccattgccctcaggcctcagaggccctctgttacttggtttttgtcaatttgacccaaacctagcctagatgtttgggaagaggaaatcttaattgagaaaacacatctgtaaacctggcctgtcagcaagtatgtggggcattttattaactagtaattgatgtggaaaggccaagaacactgagtgttgccagtcctggacaggtgggcctggattgcataagaaaggaggctgagaaggctacaaaaagcaagcagtgttcctccatggcctctgattcagaccttggctctaggttcctgccttgcgttcctgtcctggcttcctgctgggatggagagtcttgagagttgtaatctgaaataaaccctttcttccccgagttgcttttagtcatgatgtttatcattgccatggaaaccctaagtgagacaggttcctagtggttacccctactcacccaccctgcctctcctctctgcatcagctccacggttggttcctgctccttagacaacaccaggttggatgtggccactgctgccatgcctgtcacccccatggccaccagagagaagatccggtccaggttccatggcagccatgacctgatccaccgcctgtttgtctgcatttcaggtgcgtgatctagacctaggacatggaggacaagcagtgtgtgtgccttgggagagaaagaacagtgggactgtcccagctttctctggctgaagtggagcgcagtgtggtctgaagagcaagtctagggtggggctagctctgtcctgcagggaggaaggggtttcctctaggggtgactgggagtggtgggctggagtaatgggcaggtgagcaaaacagccaggccctggacaccacctcggaatggggttcacactgggattcatggctatgcagagtctgctttgtgaccctgaagtcaaaagttactcaagccagtgtagtatggggtactggaagaatgtggacatatctggatttccttgtttctatgatgttaaccggtactgccgtggcacagtgttatgggggcctctgtgagtctctcttggtaatcaccacagtttagttgtggctgtgaaccctgaataagttatatatcagggagcaacaagggtagggttaggtaagaagctttcatcctttcctatctcttgatccccaagtttatacttatgtcaaagagtcccctccccgagggttggcatttgctgatccatgaacgctggctgatcctacacagcatgtgacagtgtggtctctcagtgtggttggctcaccccagtctcctgtcttcctgccacttttctatcaggtgtagcagaccagctacagacgaactatgctagcgacctgagaagtattctcaaaacactgtttgaggtcatggccaccaagccagaaacagatgacaaagagaagctaaagaagggtgagtagacttgcagggcagactctggggctcatgccagccaccatgtatagaaaaaccacaccaaggcaaccacacaccccagtttggtttgccgaaccaaacgtgccgggttgttgatttggggagatgagtatagcctgggaaagtggctctccatgccactttgcaggtaggtctctggcctggttcttgcataggccatccaacattttacttcagacagaggttgggagcttgctttccatcttagactagaacagatgactagatgagttagttatagttacctgtcaaaatattcagagcccagcccagtgcaagtgaaaaagaggggaatggccccatctctctaggagagggtagctacacccactctctcagctgcctcatattcatatacattcagctcattgaaggcacacatttgctctcatatttacacatacatgtacatgctttcacgtgcctgcataccttatacacaaacaggtaaatagatatttggcaaggaaggtgtttaccctctgtccctatagggtccctggtaggaaatcgcacctagacaccgtctctgacccctggtgctagtttgaagtacttgtttggggagagagctatatcttcacacaagagcttctgcctgtgaggtatctgggtgtatggaatagcccagctagtcctggaagtctggcctaacagggaatatccttgttggtgaggagtaacttctgaattatccagctctgccgcctggccagactctgactggcaatccaggcagggctgcctctggaaaccatgagtcaagttggagatgaggacaggcatgttggctatattctgggcagggctctcaggtgccagggctttaaatccctgctttgggaaccataggctaggaaattttaccagtcagtgcaggggcctcagggctagatggtcattaagaggaactaccaagtgcccccagggtccaccacactatacaaagaatgaagtctttgatagggagaaccttgccagcattggcatcttacctactgaggtgacttgttctgtgtgctgagagatgactggggggcttgtagggagctggaaaatcgggggacacccaagtgcttgctaaggacaatcagttgcatctactgcattgcctaccacaccccagtggttcccctctctttttcagtaactcagaccctgcggagtgcagccttggaggactgtgcactgtgccaggagactgtgtcatcctcagaactggcagccaagacccgagatggggactttgaaggtatgtgcgaagctgtggtgtgaagctggcatgctgtctgctgagcagaaggagccactctgtgcatttcatctgcacatccaggccatctggaggcacagctttccataggcaaaggctgcccactctacctcctccttagtactaggtatgcacagcccctttactgctgtcaagccttgagcctggcgattagcagctcagcctagtaggtccaagctctaggaaggggagcaaggactgactgtggttacaagtgactgatctggccaatatccaataccctagtatgtcacctgcactgaaagagtctcacatagcagccttaggacactctgggacattaatggggtttttgagggatgcagaagccttccttgtgaggagggggcttcagagagatcacatggaggctgtccagagtgggctggaagctgggccccttggatagcaaaggaagggaatcctggcctgtttgggaatactgcggtgcatccatgggatcttgattagtgtctcactagacggctagacagagtgaccagagacggcaaggtcttaggaaatactgattgattctgccatacatcctgagtccagacgacctggtctcaggtctgcaactggggtgtgcctctgtctaccaaccttgtcactagacactggtgtgactgacaagcctagaacgagaccagaagagtaggatgagaggtgtttatccaccagccaggcctcaccccctccctacccccagctcagactgttctccatgtctgctattcgctgctcttgttgtgacagaccctcctgagtgggtgccagatgaggcctgtggcttctgcacctcctgtaaagctcccttcaccgtcatccgcaggaagcaccactgtcgcagctgtggtaaggtaggtggggcccttctggccctctgcatctctggagttatatggggactgtccccaagtacagcaacagggtttagaagttaagagctgatgtcctgggaactcagtcatgtttttgcggtccttgcgttagagcctgggtctaggttctgagctccactctgactccacgtcttaggctattcctaaggtacaatcctggtctctccaaggtgagaacaggaaagggcaggggtttgagaaggagtctgcagtagctatggtggagggcctacttactttcaagaagcctgatctactgggcaagctccacccagcgtttcctgaaaactccaattccatagactgcaaggtctgggccaggcagactcgtgcccgtaattttcctgcctgttttgggtgggagagctgtgtgaaggggctgacagaggccctgtctgctcactgccctctatctatccctccttggcttccagatcttctgttcccgctgctcatcccactcggcgccgcttccgcgctacggacaggtgaagcccgtccgtgtgtgtacacactgctacatgttccacgtcacacccttctacagtgacaagacgggcatgtgatgctgtgcctggcatgtcccagctgagcaggctgtctagagtcctatccagggtctccgggaaggaggtgctgtgcctgctgtgtgccctgtccaggctgtgctgcaggagggcctcatttcatctcatcatgccacagctgctgcaggcctgaccaggttccagaaggcccagagtctctgtctactactctcctttgcctctccactgtggagacaccagtcctggcatgggccaatgagaggtcagctttattcagaggagggacccagggatgcccagttgctgcttccaggtctagttacttggttaggcagggttgaactttcttctcttgcccatctacagcattttgctccagctgtgcatagcaaggcaggagagggccaattctgtgtgttctcttctgtagccaagaatctggaaacagaagccagggggtgttgggcctcaacatcatagcagaactccctgcctgttcaccacactcctcatcccctagatgaggaacctccccgcctcagaacctcctcaacaacatacatctcatttccttttgaaggggggaatgtaggaagcagacatagtggtctccaggggaagtaagcatgctcttggcatctacgccattgccacttgctggtggagcaggggctgaccactcactgatattgtaggctgagctctcaggtgtttggcctggacccatcaggcagcttagctactattcccttcttccactgcacccgctgggactctaacccacttcctcagacctcagtgcggcctagacaggctgagatgcacagacacctcctcaggcttcaatctcaggcttcacgttgcaatgatgattacagttttatttttagagagatgacacacctactgcttcttttataggataaaatccaaccgctgctcagcagtggaagacacaaaatgcacaaaaatggcttctgtgtgggggaggtggggagagtgtataacagagggaatattatgtattgagatgatttttattttctaaatgctgtaattcaaaaccatttccataaatctatttaaggattgcacacgctctggcgtcttctatgaacaccgagtccttgactttgttgtgtaggtgatggtgttggtgctgatgtggcttttcttctggaagactgaggcatctgtgccttagggaccattggacagcagaacttgtcctcctgtcaacactcgtgaggggttggctattctcagcccctgtaaacctatcctccatcttggaatgatgtctggttccctagctgctgtcaggtgtctgactcccagctgttgcagctaagatgcctgtgctaggaggaggggctcagcaggtgcctctggccactccccactggtgacaatggatagagaagagagactgtgacagacagcaatgactatcataccttttttttttttttggttgatgttttaaagtgaggttccctctgagttgaacaagcccagggagtattagaaaggagagtccagctaggttggtgactctcacttcccaaggttagactccatcattctgccaacctgggcagaatgcagaaaaattactttttcctaacttgtctccatcctgtgtctgtgtcactggctagaaagctgtaccacagtgaccttttgagcttttggagaaggctttctgctgctaccgaccaggaagttgggccctgcaggagcccacatggaatataccatagtgctcatctctatctttacaggcatttattttccagacatgaaatgtggtgtccttctcttctgccgtgtcagagggagaagggagcgaatgtcagaacagtgtgtgtgtgtgtgtgtgtgtactttgcccatgtgatctgctcatgagtagccttctgaggcagctttgacctacctttgtgagttgagtaaggggcactgctccatgatctgttttcttataaggcctggggccatagatgcctttcagtgaagatgatcaactgtcccattcatctatgatgaaggaattttggcccttctatgataaactttgatatctggtcactctactcttctatggcgctatcccaacaccaagatccatgccaggattaagacacttcaagaaggctctggaagccaggcaatggtggtagtgtgtgcctttaatccagaggtaggaggatcactgtgaattcaaggccaacttggtctacagagcaagttccagaatagaatagtcagggctacacattaaaaccctgtctcaaaaacaacaataataacaacaacaacaacaacacacacacacacacacacacacacaaaagaaggctctagaagccacatctatagttatggtttgcatctaggaaatctagagacacggagcctgctcagagatctaggtatggaatcagctctcttgagctagcctcaggacctccttcaggctgcccttcctgagcttagtttccctgctatcaccatcactgttgtcccagggttttatatgcccttgatactctccacggccatccttcaagagagcaggatcccctgtcatggatagggaaactgaagctcatgaaggtcacacagcagctgagcttgagctgcgggcctcaaggagaatccatcaagaggtagacgcagaagtggccagtgaagtgaaaaactcgagaaccgatccgagcaagttgtgctggtatccatccttggaatttgggggttgtgccagcttatgacaacctcactacatttggcagctggcagcagggttctcactggtctccggctactctcatagccctgggaagggaccctcagccatctccaaaattcctacctcagattgcagtggcatgcaggagcccacaggaactcagggatcacactgcctacagctctgcctaggagaacctggcaagctgaggatgggtctagagcacaggttgctatgcctggtcttgggtgatagcatggggagaaggaagaggaaaccacctctaggttcatgtctggtgtattagctacttttctgttgctatgataaaacaccatgaccgagtcagattacagaagacagttgatttgggcttaagggttccagaggaatgaatccatcatggtgtggaagaatggcggaaatgacaggcatggtgtcaggacagaactccaaaggcgtacatcctttatcacagtatgaaggagagagagagagagagagagagagagagagagagagagagagagagagagagaattggacatgagtcaagactataaacttccaaagcccacctcagtaacatacaaggctacacacaagaccttcccacacaatgccaccatctagggaccaagtgttcacacatctgagactgtaggggacagtctcatttaaatcactgtagagtcccactttgtcacctccataggggactactcagtgcccactgaaatgcttatagggagttccacctgtgcacgtgagattttagaggttgctttgatgcataggccccttgcttgaagctcatttgaataactaacttgtcttccatccctatctgcctactccaaggagcccagggtagccctggatggaaggcagcaaggagcccagggtagccctggatggaaggcagcatggtatttccactgcattctcagctgagttctaggctgagtggagaaaaagtagccataagtcagacatatagtgaccctggggcatgtggcaggacatgggactctgaaggacttttggtgtcctgtggttaggatggctcttgcggccacgtgaagcatgaatttgaagtctgattttcctctcctttctctgtccttgaccagccagaattctagttcagcccctagttgccaccagggggcagttcatgcctcttcaggggtgtgtgtgtgtgtgtgtgtgtgtgtgtgtgtgtgtgtgtgtgtgtgttcccatgcaggagtctgtaactggcaccctaattccagacagaatcccaacacggatagatctagtagccatgcgtagttttcaagatcctgaagatgggtgcagggcccagaggggtctatagctggcacagtaatagcagagagcaaggaagacatgtcctggaagctctgggaggccaggaggaagagtccaggctagaactgggtacttttcacaggtagggtttgggaggagctaactgcacccttgattaagaggttctatggcctctatgggccaggtgctgttaggatgtgcagaggaagctggaggaggtaataaggaccccaagtccctattcatgccatctcttcctccaaagcctgtgattcctcccaggcacacaggaagccttgtttgatagcagtgctgactcccatccgtcgcacacacagagcagagcacagcccctctggttcatgtctgacctccaagaaggaggaccccacagtgatatgtgtccagggacagaccctccactccacaaatcattcacagatacaatgaactgatttatttttaaatttaaaaataatattgacattatattagtttctatagacagttgattacatcttgatatattttggtttttcttgttttccttttgtattctgaacacagtgttttcttgtatgtcaaactttctggaaggcctccaagtgcttggagaccaggcctggtgcttgtgactggccagcctggcagcctcagctccaccccagattctgaccggttgtggctgggtaagcctgcccctatgggctccatttcatcatgggcgtggccagggctttgcagtgcttcctaggagtgctgtacataatccttctgttacccaggcgctgccactacctagggtttgtcatacacccatcagtgtgtcactaaacccctacgaaagctaggggttgtcattcttgttttatagttagggaaactgaggcttagagagcctacccgtcatagccatacaagactccagaatggctctcagggagggactcaaacggaacctctatatagtcttccctgctgtaggcacacaacgggcctgtgtgtgcaggtagtagaggcttctggaggactgagctcactgtgactttccatgctgagcctgccatcctacagatccagacctctcctggaggagccacctactgaggttgtgaggagagtcaggtgtgactgcaggattctgacaagtggacaaggacataagcaaacaaggatgctagggttgtggcctgatggctctgggtgtctactacaatgaccgaagtggccaaaggtgcaaggagaggaagcagggtcaaggtcaggtaatcagagggggagggggaggggggagtaggcctcaccaacatttctactctggctgtgtggcacacgccctggtcctaagaagcctgggaaatgttgccatacctggacaggaaagtataagggtactgtctactgtaaaactgctgatcctggtcccagagaaaggaagccaggactgagtaagtgggaaaagacctaagagcagccttctagtagtttctcatcactgtgtttgtgtgtgtgtgtgtgtgtgtgtgtgtgtgtgtgtgtgtgtggtggtggtggtggtggtggtggtggtggtggtggtggtaaagcggccctttctcatactggacccaaagctctttggtcaattctccaaatgtcccagaaatgggtgctagagcctcattcctagtcagagaaacagaggtaggaaggccagttagggaaaggccaggcagatcaaagacctgttatccctggtcatctacccaaactcggggaggctctatgtcctttctcctgggtcatgctgaatttaccatttgtgagggaagatggcactgaggacttgggccaatgcagtggcaagatggaggtgtcttccttcttaccaccttggactccacagtttccaattgggaaagtctgggctctgtctatacaaggcactagctttctctggatgggcctggcatgtcacagtgacctttgatgaggaaggtggtcttggttggccagcctgatgcctcctttccccagatcttgggaactttgggacacagatgcacacaggcactgctggtgcccctgccccatctgaaggccatgggtggagagacccctctggtctaaaggggacaaacttgccctttgtacttgcaagccacttcctgttctgagcagaggcttccagatctcccctgggaagccagctcattctgcagcctccttgagcagcaggcttgctgtcctgcccctgggacttctctagagctgacttttacctatcaggtcaccactacccactcctcccagcgttcacatgctcttggagagggagagcacttctggcacaggaaagtgctttgtcttggatgcagctggtgggagctagtgtccccagttgagattaaaaatttccaaggctaggaggctattcttgtgctccacttcaacacaccacagcatcccatcccagtaggaggagggagcaggctggggaggtcaggcttgccttagcacttagaggcaactcaccagcctgccaaagcaaaggtgcacccttcaaaatgctgggcccgcatgctaagctcaggggcccaaagctcagcattgagcatgggcctcaatgctccagaaagatggacacccttctcctttacagctctggacagccctggccctggagtgattgtgggcttggtcagagaggcacttcaaccaatactaaggagttctttcagtgtctatacaggactgtttatgaccgcatgaggttcctcttttgtttttttcagggcgccatcagagcacctgttattcttaatcctgccccacaggtcagacatctgtggctcacacccaggctgggagggaggtggttctggtttccacattcccagattgttaacagctctgggtgtgggagcagtaatctccatctttctatttcaaggggacactgcaagtttccttatctgcatattgggcatatggagagccacaaggaagtgtgcacaatgcatccaccttggtcctaaagtaaattcaatgctaataatctttgttgtttgctacagtaccttccttccattttaagagctgctatctagccaccttatttcccacagaactctccagcctgctattttgtcctcaacctaataacagagagaggatcaaggggtgggagaggatggatacagaggatggtgttagggcatcttgagctgtctgtcccccatgcatctataggccagcatgagggcctcgggtcattagggccaggagtttgctgaagagttcaccctcttgtcaccatagcctggctcttggcacggctctaccctcagaccaagcaccgcaaacagacactcacggatccctcttgctcagtagtgtcagtagctcttggtgcctctcccttaaccctggtggccttcctttttactcctgatggctgatcctgcctactttgggtctgacatctgagaggcttttagattccaatggtctgcgtccctgtctccaagttttagccttccctgaagccaatattcctgccagagacaggtgtcctttgctgttctttagcgagatcccagcgcccgcccctatcaggccccaagcctggtcctccaccgagactatggtaccaactgactccgggcaacaggtcgttgcgcacgacatgcatgggcacgacaaagcgccagggcgcgtgtccgcagcgcatcctgcctggtgtctcccgagacacggtccacgtcctcctggcccccgcgtaggccgggcagcagtcccaccacacagtgcttcctctcggcaaccggtcctgcccgggcgtcctcattggccccacgccctgtcactggccattggtccgcggactcaatttacatagaccgttctggcccaatcggcgtgcaatgcctacttaacatgcacgatggccgccagtcagcgagcactggggctgggccaccacgtgctgttgctaagcttgggcttctaaattgttactactggagccagcctatcctagccaagcttcgcatctgtcaacattctcagctctgcccgaggcgttcggccagtccctattgggcaaggctagacaagaacccgccccctaagccggagcgcccacacctattggctgcgtcgactgctgctcgacttatgtgtcaatttgagggcctgaggcagagggtggcggcccagcgctggagtccgcgagtcgggctggtgtgccgccaggcgcggggcgtgcggcgagcagagccggcaggagcgcgccgggcagccgccgccgccgccgtcccgtgcgcgggcggcaggatggagctgaactctctgctgctgctgttggaggcggccgagtacctggagcgtagggaccgaggtagcccgcgcccctttgtgccagggtgggcgggcggcgggcgggcgcagggggccgctgaccgcaccgtctgtcccgcataggccgagcacggctacgcctccgtgctgccnnnnnnnnnnnnnnnnnnnnnnnnnnnnnnnnnnnnnnnnnnnnnnnnnnnnnnnnnnnnnnnnnnnnnnnnnnnnnnnnnnnnnnnnnnnnnnnnnnnnnnnnnnnnnnnnnnnnnnnnnnnnnnnnnnnnnnnnccaacccccacctcccacccccgcgcgctgtgccaagccagctcgggtcggccccacccgagtgtccccgtcctctctgcgtccccagtacagtcctgcgcgcacccgggcggccggcctggaggaggtgccggccccgcccgcgcgtcgccatcttcccgcggccgcgcctccccgccgccgtaaacagtgccacgcgtacagcggccgcgctcgccgagggccgttctggacttttccagaccggagaggagttgtcagttggtgccgaccgctactccctagtttgggcctaattggggactcctccctcccttgcacttctcggagctggctttgctcttaggcccagcaccttatccccaggagcctggacagagacctctctctggctacttaagcgtcctgcgcagcttattgacaaggaaactccaaccacaagcatagggctggctttgtcgcgaagagctgcagggagctatttctctcaaaagttccagggctcaactacactgtttgccttggccttgtgtttggaggaagccctgaagctgaggtttaggtatggctaggactgctaaaggttccaccttcctggctgcagtgggatccagggcacacctgacactgtctaggggctaactttggcccagctactcctgtgtggtcagtctgaaagcttccttagcaggctgggggcttcagggccccttggcagagggtgcggctcattcctgtggcctgtctgttcttgggaaacagagaggctggcacaaggacccatttctgtggtgtcctaggcctggcaaagaacaggttgaattaccaacggcctgagtcccagcccctggtctcttgctttgaacagtttgcagaaggacttaagtgtgttggaggcctcactgccccaagcttccacagtgagatggcctggacccggcttctgtctgccctaaaccccaggtttgggagctcagcttcctgtggcatggagtacccacagctgataggaatggtagcattcctgagctgaggcccttgaatgcttctgccatatacacaagtaagaatctgacccagccttgtaaatgaagccttattttgacctccattttacaaccgaggaagccaaggcatagacagattcagttacttgggtagggctgcttaaccaccctgttcctggatgaggtcctagccttccatcttcttctgggatggggagaactgggtgcaaggggcaggggatgcaaagggcctctctgactggacttgggtgcacctcccctgaagcttccttggacagagtgtactccttcaagacctgaagccttagggtggcagacacagccctcccctccccagtcactgctcagaggctattctcagccagctcagttgagaagctgggatttcagatgtggcagggcagttctgaaccttctgtgtcctggcaaaatgaaggacaggccctggtatagcaggctagggtgagtgatggctaggtctctaatggcagtgactccatgggagggtgcctttagggtcaagtactttgagaatataagcagaagggtcagatcaaggtggtgcccaggcagcatctgacacaacgatggcctctcctcaggcacaatccccccgccccccacgggatctctggactccgaaagagttccaagaaaggccaacacacatgctgctagagtggccctgtagtccagggattgggagctggcaagacaagtagtatcctctggtgcaggaggtgaggggactcctcaatacttaaggttcctgctgaccctagcctgctacataaactagcagacctgtagacccagtcaggctgccatttagagaactgaaagacaggttctccagaggacatcaaggggtttctgcactgccttcttggctctggttggcctgtggagggattctgaggctctggcccagcctgagtgactagcagcaggttttggaagagttgaggaatccagggccagagggaacataggtgagctagtaccctgatggtgtcaaagaatgatgggccaggcagagtgtacacattttttggtaaaagatcccagatccaggctcttagagcagcagaggaaaggacaggtgggcaacagcagagcacagggagggccttggtctgggtgtgtcctgatctttctgctcttaagtgcagcagtccggggacctagaagcctgtgttggtctgtgacattcccttagattgagagtcacttggaaacctgagtgttcagaacctgtggtctgggtgaatgggcttggccagtgaggttcaagcagcccatggggtcactgttcccagggaaggtaaagttggtctcagggttacatattctatataatgcagtt

SEQ ID NO: 1623 - DNA, 3879 bp, Mus musculus
ccggacccgggcgcagcgctgcagagggcgagggccgcccggagcgtggctcgggccggcgcggcgatgatgaacagattccgaaagtggctgtacaaacccaagaggtcagacccacaactgctggcccagttctactatgctgatgaggagctgaaccaggtggctgcagagctggacagcctggatgggcggaaggagccccagaggtgcacactgcttgtcagccagttccgctcctgtcaggacaatgtattaaacatcattaatcagatcatggaggagtgtatccctcaggaccgtgcccctcgggatttctgcgtcaagtttccagaggagatccggcatgacaacttggctggccagctgtggttcggggctgagtgcctggcagctggctccatcatcatgaatcgggagctggagagcatggccatgcggccactggccaaggagctgacacgcagcctggaggacgtgcggggcactctccgtgaccaggcactccgagacctcaacacttacacagagaagatgcgggaggcactgaggcgctttgatgtcctgtttgctgagtttgaactgagctatgtctcagccatggtgccagtgaagtcccccagggagtactatgtgcagcaggaggtcatcgtgctgttctgtgagacagtggagagagccttggattttgggtatctgacccaggacatgatcgacgactacgaacccgccctcatgttcaccattcctcggctggccattgtgtgtggccttgtggtctatgcagatggacccctgaacttggaccggaaggtggaggacatgtctgagctgttccggcccttccacacgttgctgcggaaaataagggatctgctgcaggcgctgacggaggaggagctgcacacactggagcggagcctctgtgtttctcaggatgtggagctccccatccgggcagacacccaggcacccagtgccctggcacccaccttttctgcatctcttcctcccgaggagacactttcagccagtgccaacaacccagaggcagaactggcctgctcaatgcagtatgatgatcaggagttggaggaactcagccgcatggtccacagggctggggatgagatgtcttctctgctttcaccacccagtgcctgccagtccccggcacataggccaggctcagaggctagccctcgaggggaggcctctccagccagagcccggctgaaatcaggcagtgatgaggaggaaagggtgttcttcatggatgatgtggaggtgacagagtctcctgccaggcctgaatccccagggaacacatttgagttgacgcagggtaatgcccagcagagaggacaagatggccagagtggagaggtgggggtcgaggcacctgccctggtaaaggaggaagactggagcaacaataatgttgagggtgacaagataaagctggccagcctcatgggctccacttcctgcagctgcctagactcacagctctacctggacggctgggaggtgagtgcagaggatgctgagactgcagagatgattgcacaccggaccgggggaatgaaactgtcagccacagtcatcttcaaccccaagtctcccacttcccaggactcagctgtggcagcccaagaagccccaggccatggtacttcccctttggagcccagggcagaggggacaggggacaattcacacaaactcagcactacagccaccaactgcctcctccattcctgtgtgtgctgtgggagctgtggggacagcagggacgatgctgtagagcgcctgcgggagaagtgtggcccaggaagtgtcatcagtgcctctaacccttctgtaagcttagccaagggtggtgacaaagagcccgagagaatagatgaggcccagccttctgatgtcaccctgcctgcagaagatgcctccaacaggcaggagcccaaagcccctgcttccagcaagtgcctggcacacacctcagggcctcaggtggacacagcgagcaggttgcaaggagagggtgaggtcaaaggccagccagagccagaggccagaaagcaggaccctgagaagtcccctgtggtcagcggggacagtccaagaggggatgtggcccagacagaacaccagcacctgttgggctccagctccacggttggttcctgctccttagacaacaccaggttggatgtggccactgctgccatgcctgtcacccccatggccaccagagagaagatccggtccaggttccatggcagccatgacctgatccaccgcctgtttgtctgcatttcaggtgtagcagaccagctacagacgaactatgctagcgacctgagaagtattctcaaaacactgtttgaggtcatggccaccaagccagaaacagatgacaaagagaagctaaagaaggtaactcagaccctgcggagtgcagccttggaggactgtgcactgtgccaggagactgtgtcatcctcagaactggcagccaagacccgagatggggactttgaagaccctcctgagtgggtgccagatgaggcctgtggcttctgcacctcctgtaaagctcccttcaccgtcatccgcaggaagcaccactgtcgcagctgtggtaagatcttctgttcccgctgctcatcccactcggcgccgcttccgcgctacggacaggtgaagcccgtccgtgtgtgtacacactgctacatgttccacgtcacacccttctacagtgacaagacgggcatgtgatgctgtgcctggcatgtcccagctgagcaggctgtctagagtcctatccagggtctccgggaaggaggtgctgtgcctgctgtgtgccctgtccaggctgtgctgcaggagggcctcatttcatctcatcatgccacagctgctgcaggcctgaccaggttccagaaggcccagagtctctgtctactactctcctttgcctctccactgtggagacaccagtcctggcatgggccaatgagaggtcagctttattcagaggagggacccagggatgcccagttgctgcttccaggtctagttacttggttaggcagggttgaactttcttctcttgcccatctacagcattttgctccagctgtgcatagcaaggcaggagagggccaattctgtgtgttctcttctgtagccaagaatctggaaacagaagccagggggtgttgggcctcaacatcatagcagaactccctgcctgttcaccacactcctcatcccctagatgaggaacctccccgcctcagaacctcctcaacaacatacatctcatttccttttgaaggggggaatgtaggaagcagacatagtggtctccaggggaagtaagcatgctcttggcatctacgccattgccacttgctggtggagcaggggctgaccactcactgatattgtaggctgagctctcaggtgtttggcctggacccatcaggcagcttagctactattcccttcttccactgcacccgctgggactctaacccacttcctcagacctcagtgcggcctagacaggctgagatgcacagacacctcctcaggcttcaatctcaggcttcacgttgcaatgatgattacagttttatttttagagagatgacacacctactgcttcttttataggataaaatccaaccgctgctcagcagtggaagacacaaaatgcacaaaaatggcttctgtgtgggggaggtggggagagtgtataacagagggaatattatgtattgagatgatttttattttctaaatgctgtaattcaaaaccatttccataaatctatttaaggattgcacacgctctggcgtcttcta

SEQ ID NO: 1624 - protein, 917 aa, Mus musculus
PDPGAALQRARAARSVARAGAAMMNRFRKWLYKPKRSDPQLLAQFYYADEELNQVAAELDSLDGRKEPQRCTLLVSQFRSCQDNVLNIINQIMEECIPQDRAPRDFCVKFPEEIRHDNLAGQLWFGAECLAAGSIIMNRELESMAMRPLAKELTRSLEDVRGTLRDQALRDLNTYTEKMREALRRFDVLFAEFELSYVSAMVPVKSPREYYVQQEVIVLFCETVERALDFGYLTQDMIDDYEPALMFTIPRLAIVCGLVVYADGPLNLDRKVEDMSELFRPFHTLLRKIRDLLQALTEEELHTLERSLCVSQDVELPIRADTQAPSAPTFSASLPPEETLSASANNPEAELACSMQYDDQELEELSRMVHRAGDEMSSLLSPPSACQSPAHRPGSEDRGEDARARLKSGSDEEERVFFMDDVEVTESPARPESPGNTFELTQGNAQQRGQDGQSGEVGVEAPALVKEEDWSNNNVEGDKIKLASLMGSTSCSCLDSQLYLDGWEVSAEDAETAEMIAHRTGGMKLSATVIFNPKSPTSQDSAVAAQEAPGHGTSPLEPRAEGTGDNSHKLSTTATNCLLHSCVCCGSCGDSRDDAVERLREKCGPGSVISNPSVSLAKGGDKEPERIDEAQPSDVTLPAEDNRQEPKAPASSKCLAHTSGPQVDTASRLQGEGEVKGQPEPEARKQDPEKSPVVSGDSPRGDVAQTEHQHLLGSSSTVGSCSLDNTRLDVATAAMPVTPMATREKIRSRFHGSHDLIHRLFVCISGVADQLQTNYASDLRSILKTLFEVMATKPETDDKEKLKKVTQTLRSAALEDCALCQETVSSSELAAKTRDGDFEDPPEWVPDEACGFCTSCKAPFTVIRRKHHCRSCGKIFCSRCSSHSAPLPRYGQVKPVRVCTHCYMFHVTPFYSDKTGM

SEQ ID NO: 1625 - DNA, 168795 bp, Homo sapiens
ggctgccaggtgagatgcaggcctggcgcagggggtacccaggaagctgatcggaaggccccggagctgggggcggggtcagctgggtcagaggagctgaggctgccccactggatttggcaacaagggggtgcggggtgacccagactggcgctgtgggtggaggggtgggggaagtccgcagggaggggtgtgagggaggatggaggaagagctgccgctggtggcagggacttcgaggaatctgttagatagaagggaaggaccgcgggagcctcaggggagtacagaggacttaaaaaaaatgtttttagggtgagagacgtagcagcacgggtggctgacgggaaagatcctgagggaaatgagggggacggataggaggagctgctggagctgctcttgggctggccagaggggccgggctacaggtgggcccaggcagtggggtgggtgacgccagctcccaggacgggcttctggccaaggggacctgggccttcgctattgtctgttttggacgtgcaaggcgagggcaggccggcgggatgagaggtgtgcccgtcgtgctgaggccttagctgggaagaggagtgtggatgaacctgggcccgagctgtttgcatcacttccccacagtgctcaggggctcagggaaagagctgggggccagagggtgctgaagtggagggagaggtgcccacggaggcctgcagctctgcacacaggccctgctcccctctccagcccctgctggctgccaggccccagccggaggaggcgcctcttccagaagctgggagcagggatgggtgggggccccaggccttctcttacggcagaggccttggccccaacccctgtagcctttgtaacccactcacaccacctcccctctgggctttcttgaggctgccccagaggtagctaatgaaggatgaacccctcattctaccccaagggaaggtgggctcagactgtggcctgggggaacagcacaggtgcacctgagcaggtagtgagagcgggagctggagcatggccagggcagcccccaggggccgtgcagaaaagcagcgcacataggccaagttcatccagagcacagcggcacagagggctgtggcctgcaaggacaggcaggcagcctgaattagcacacttgctatgagcgccctctttccagggggcgagtgcccgctccctgctcctgggcaatgatgggttggtgatggcccatgtgacagccccccaggatttcccctggtgggctcagcttcctctggaggccccatccaatggagaccaagtcccacattcctagaggcaggggccctgcaatccaagctcctgttccccaggcacatgccactgacaggtggtggatgtgagatcagcacctcgtggtgggagctgagaccaggtgacagggaggcccctgagtggggcagggctgccgaggttgcagggggtgccaggaccaggatggagctgtgaggaaaacccagggatgggaggacaggagctgaggagttgggcagcctccaggtgggcctgtgacttcttccaggtgtgggtaggaagatgaaggaggtgtgtacagaagcctgcagccctcggctccccgggagcctcactgcccaggccagcccctgcctctgtcggagacccagtcagtgattcccaagtctcggttaccacaaatacagcacaagttgtggccttgcgcaccctcactgccacagccctggggcgcctgggggatggaggacccatttcccgagataagatgccccccaaagtgggggtggggcatgggggcgctccagggctgacccttctcatctgtgttgactgaggatggaaccgcagtgtggatgtcatatcccgggtcccggccaaggcttctttcaccagagcctggcctgacacacattctgggtgccaggagcacctccccatacgaagagcaggtctctgtggaaaacacggtcagcttctccccatgtggaaggaaggcagtcgttaggaaggcatttgatgctgttaaccagaacagctgcacaacaggtgccattggcgtggcctcccagcagcccccagcagatcctacctgcagggaggtggccgcagcctccaggaactgctcagggttgtccctcttgggtgtaaatttgtcgagttgctcgatcacagtttcaatgcattttccatagtaggccatcttcttagggcagaagcctaagaacaaaccgtgcaggtcacgccctccacacctgggatgtagccgcaggaccctccccagcagcgacaggagtctgccagggtgttgggcctgtagcagcaggaagaccggatgtgactgggggccctggctagggtgccgggcctacagcagtggggagggccggatgtgagtgagggccctggcaggtaccccaaggtgcatgtcctgcactgtctcctgcaggcctctgcggctcaggggcccaggctggcctgggtgagttcaccatcaggtcacccccatcaccacagaccgaagctggccgagtgcccctcaggccccacagccatgcctcctggatggggtgacccctgcaaggggcccacggcagagagcacaggcacctctcgaaacagcctctgagcgtccctcagctttgcccgggaaggtgacggtttcttcatcaggccctgctggggagcagaaggtcctgggtgagggtgacctcatcacacatggttggggcaagaaggagcctggggtccctggggtcaacgccgccatcctgacgatgggggaacagggccctggggagggcttgcgggggcactgaacactccagaggtgcagcagttccaggggacaggcttgcccagagcccctcccaggggaccttggagaagctgcctagggggaggctgggaccctgggaaccagctctaaggacaacatgtggcccccaaactatcctcagaggaggcggggcctgtcagcaaaggccgtcatccttgggtgtggtgcaggcctgggctccagctggactacgcaggacagtagggcagcgctgggcagaggggggcccttctcaccctcctcttgctccatgactgacccactgctctgggccaggctgggcttgaagggccaccaaagttggggacagtgggagcacctctcctctaccctgcaacaagctagaacagccccaggtagcagtccccagacctggaccctccaggctggggactgactaaaaacatgcaagcgacccccaccaaccaccactgacactggagggtccttggtgagacgccgatcctggccgtgctgaagggtccatgttgacctgccccctgactctctccctggccaagactcagagagaaggggaggccaggtgtcaccagacactttagagaaatctctgacatgaaacatagaaaccataagaaaagaaccaggagaaaacgatgcacaaggcaggaaaaagcctagaaaccaggcactgccatgcaagagaagaggagatacagcgtccaaggaacaagcaatggctggagaaaaagagagggctcgtgaaaaccaaaatacgatgacagaactaaaaacataaacaggagacggaaggtaaagttgaggaaatctccctgagtagaaaaagatgaagctatagaaagtaggggaaaacgctaagaaaatcagggaacgattcctgaaggtccaaaccccaattaacaggagttccagagagacaagagagagaaataacaagaaaacgccctagaactgaaggatgcggtcttctggacggacaaggcccactggcagcttagcacagggaatgagtcatgatatttcagagccagggacgccccgaacacgttcagtgcaggaagagtcagggatgcagaggagtctcggctgggggtgccctgggaagcaggggctgaacccaagtgactgtcgttgtggggaatttccaggctgcgatgcaggtagccccaaggtgacactggctggcaggacaaggacagagcaggagggcaggggctcccgggggtgtctccaggaggagcacctggcatgttctgtgagtgggtttagctgcacagttagggaaagaggctgtgacgctggacctggctagggatggcatcagcccagggcctgtgtccccacctccctgctggctgcaccacctgaggcctgacatgggctgttctttttttttctttttttgagatggagttttgctcttgttgcccaggctggagtgcaatggcgtgctcttggctcactgcaacctccatctcccagattcaagcgactctcctgccttagcctcctgagtagctgggattacaggcacccaccaccatgtggctattttttgtatttttgtatagccaccatgtggctaatttttgtatttttttaggagagacaggatttcgccatgttggccaggctggtctcaaactcctgacctcaggtgatctgcctgcctcagcctcccaaagtgctgggattacaggcgtgagccaccacgccaggctgtccttttaggggctgctttagggaccagcctggctgtgcatggacacagaggccagcaggagcctctctctaaggaggccagaagaaaggccgcttggaatttggaaatctggcttgaagccctggtgctgaaaacaggccctggagaccaggcctcccagaacaaagcgagcatgagcctctggcacagccaggaccgtcactgcccgggagcctgccctgggccccggctgggtccccctccccccaccccatgtctggagaccagcaaggctgcctggaggtgcgttcctccgccagtgcggtcctgatgattcggggcaagggaagagacagtgatgctgctggcttggagaacaccagatcagaagccattaaacccgcaaatccacagatgctgaaatctagatgctgcagccaggcttgcctgggcaagatgagagaggtttgtgggtgaggctgcccagaccctctgagggttcccacccccttcatggcctgcccctggggacctgccacctaagctgcctcagcccatcctgcgggaaacctttgcttcttggaaggctgggccatggaagagagaccacccacaccccaccccagcctcagggtcctttcactctcctctgatcccctctagctgagtctctggcgtggggatttcaacagctgtgagcagaaaggcccaggaggcccactgagcaccctcccctgagcctgccaaggcaggaatactcagggcagggccttaagcttgtgacaggctcaccctaagtccctgctctctctgaattcagcccctctcctcgggagggtcccagcaggccaggccaccagtatggcaggggtgcggtgcggtgtggtgcagtgtgggcgtggtggccaaccctggtgggtaggtggatccaggcagccataacacagccagggggcaataggctgctggcagcaggaagcacttttctggggcattgctctttggggaggggggacttgtggctttcactccaggcattgctgagagcagtgggggctccctgtaggcagtgagctcacagctcacaaatcccactccccatcttcgccagggtcagccacactgagacgttttttaaaactccacagcgtaactggggacttctctacaaaaaaattaaagaatgactcaggtgtggtggcacgcctgtagtcctagctccttggggggctgaggtgggaggatcccttgagcccaggaggttgaaggtgctttgggctatgtctgtgctaccacactctaggctgggtgacacattgagatcctgtctaataaataaatgtaaaggtctacttctagagaaacaatgttaaagagtgagttttcttgccctgcctccacgtcacgttgtgggtcaggctgccctgggatggggtccccttgccccagcctttttgaatctgctctggatacagctctgcctggaggaacagggtatacacccaggaaaagggccccttcttgcgcctggtgggggcggtgagagtggatggtctgcatgtgtgtggtgggagctgctgccaaggtggaacagtttccctgccgtctccccctgtcctggagctggagcattctggagaaaggatgatcctaggtaccctttggtgatgcaaatcgaggaggagcaagagggccatgccaagcccgccccccaatccagggcggacctggtaggaatgaactggaaggaataaatggacaaaccaagttgaagatggggacgggggtgaagagctcctttggagtccagcctgactcaaattgtcctgccctgcccctggaaccctggttcactgtccggcctgaaggtccctggggcggggcctctgcacccctgaatctggcgcagagcaggtgtatgtgaaggtgaatgtaaggaaaagagatgcttgaattctgaatcccactgaaattagcctaggaacttcatcaaaacaatcacctctttggggaggaaataggtactaaaattcatccaactgtgacgcctgctttcagcatctcagctacattcatgcattctcaaattctcagcctgattttatttttttcctgatttagggtctcactctgtcacccaggctggagtgcagtggctcgatgataactcactgcagctcaagtgatcctcctgcctcagcctccggggtagctgggactctaggcatgtactaccacgcccgactaattttgtgcttaattttttttttttttttgtagagacaggggtcttactatgttgcccaggctggtcttgaactcctggcctgaagcgatcctcccacctgagcattccaaagttcagctttaatagtgaagtaccatctatgtgggaagtgggatttaattctcaagtttaaagatttttttctcatattgattttaactccattgatcaggacttgactatcttatatttaaggcaactttaaaggtgggctggactaggctgggcgcggtggctcatgcctgtaatcccagcactttgggaagccaaggcgggcagatcacttgagatcaggagttccagaccagtcaacatggtgaaaacccatctctactaaaaatacaaaaattagccaggcgtggtggcaggtgcctgtaataccagctacttgggaggctgaggcagagaattgcttgaacccgggaggcagaggtcgcagtgagctgagatcgtgcctctgcactccagcctgggcgacagagcgagacgccatctcaaaaaaaaaaaaaaaaaaaaaaaagggtgggcagactaaagcttctctttccttaggaaatattttatagacacaaatgagattatatgaggaggtttaaattccatcagacacaaaacagctcaacactctcaaccactaggagataactcatttacctaagatctcaaatgtatgttaattaaaatatagtcttttctcccgattaaagccagtctcctaagggttgctaccaagtcatgcccctatggcttgtgcttaaagcacaaccccacgtggcagcttttgctagttgcttttcaatctccactacccctttcctcccaaataagaaaactctgatttttagctgggtctactgctgcccaattgaaagatggcatttcccagcctccctggcagctggggcatggttgtgtggctaagttctcccaccaccttcaagaagtggaaaggtgtgagacttctggaaagtctccctgaacgagagaggcatatccatcttctcttttgcagctggttcctgggccgaggaggtgatggcaggaatgtgggcagccatcctggatcatgaagaaacgtgaatggcagatagaaaagctgatccttgaggactttagggctgccataccaaccacgattgcctctccatggacctcttttataaaaatatgagtaatattcttgtttaggccactgtgatgttgggatttttcaatacatgcagctaaacctaactgataccccacttccccaagttcagccttcatcccatgcacaatttcaaactataaaacacaggaagggagcctctgagcagatacaactgctccaggccttggagttggccaaggatagacccacagagaacagccattcactcagtggacaagcccatcaagtgtctaccccaagatcctgtgctgaagaaatgatggctttgggagcagcaggttttatgggggaagactgagagtgtggtttgggacacgttaaatttgagaggatctgttaggcgtccaaatggtgaagaacaggtaaacaggtctggagtttcagggttgaggctagagatataggttttgagaagtttgggagaaaatggttgtttataaaaccatgtaactgtaggaaatcccccagggagggagtggatagagtaggttccaaggactgagtccagggtctccagtgttgagaggtcggtgagcaggggaggcatccagccaaggagatcaagcaggagtggccaggagcgaggaggagaagtggacagtgggatctgtttcagccaagtgaggatgctgtgtcacggagagggcacagtcggctgggtcacgtggtagtgacagttcaaggaagagatgagcgctgaccccgatcatcggattttgcaacatcaaggtcaaggatgactttgataaagagcttcagaggagtggttgggtgaaaatctgatgggagtagtttccagaaagaacaagtgggaaggaattggagataaggggaaactccagaggggttttgcccttcagagggtcgactgggtggtaggaagaggagagtagggaaaatcaatcagttactcaaaaataaacatggaccctacccccaactaagagaaatcttagatgccagcgcgcctaggctcacatcgcgtctgttggaataaagtggtcatggagcccacggacctttctgagcacctggcactggccagtgaggacaagcaggaacaggtcagacttctcaattctgaaccgaggggggcatgacttccatctcctgtgtcttacatctgcacgtttcacaacaagccagagacgtggtggtggtgcggcagggaaaagtgcagcgctgtggggtcaggccgacccagatccgccgtgatctggatgcaacccccacagccagggcacgccggcctcgttgtgcctgcttctctggctgtcaatgggaagtttaagtgaggccacgtgtgggtttttagctctctgcttgacacatagcaggtactcagattgaggtgagcgttttaaggtacaaattagggcaccactggggggagtagcgagggcggaagagtatctttttagaacgcaccgctgatagtggtgatttaaaaaaaaaaaaagaggcaccgttcactttcatcggggagctgggaagaagacagaagaggtgtttgggagaagcaagatgagcagcgagcgagagggaaccggccggcaggtcatgaaaatcggcggcgcgtcgccccgcacctgtcccgcccccgtacctggcgggcgctcggggcagccgagccctcctgccgccgccacctgccaccgcagcagtttcctgggccagctggggctaaggtgttggcagtcgtcgtccgtcagctcccggtaggcaggacgccgcggctgtttggcgtcgtcacctagcaaccggcggcacgctccgccgccatcgggtggactacaactcccacaatacacagcgccgcggcgcggcccgggacgccaagccctgggcgccacctccccgccatgcctttcgggacttgtagtttcttggatacccgggcgcggcgggtcgccccgccggcagggagcgcgcctcgggcggggtgcggcgcccgcgcagggattgggccgcctccgccccgcccgccccgcccgcagcgcgcggtgggcccggggctcgcggcgccctaggcgcatgtgcggcgcggggcggccgtgaccagcggagcgctgggtgtcagtgagcagcgaggagccgcgcgcccccgtacccgcgtctgtccgtgcgcccgagcgcccactcccgggtctgaggtctgcccggcgcgccgcttgcagagcatactcagggccgcgcacctgccccgcgcacctgcccgccgcccgctcggcgctccgggcttcgctagccagcctccctgcgacagcgcgggggctccggccgtgcctccgcgtccgccccgcgcctcagccgggcccgggcgcagcgctgcggagggcgagggccgcccggagtccggccagggccggcgcggcgatgatgaacaggttccgaaagtggctctacaaacccaaggtgagcggccccgctcgggccggacgccccccgcgtcgcggcctctcccttccccaggaccgcccgtccgccctacaagacggactccctttccctgtccgtggccggcctcttcccccaccgccgacatccttccctccactccaagacttggacagatcttcatcgccctgtctctgaggcggatccgaacctccctcccggcttcctaagcccgggtccaggactgaccctcctgctcctcctctcgggccggggcgcactttccctccccctctatccagggccacaacgggcccctctccctcctcatcccggtcctggacggtgccctcctacacttcgtggtccccagcccgcgggcccggagcagaccccctactacttctccgtctcccctccctgcaccaggaatgccccctcattcccgtcctgcccccacccccattgtcctgggcccggaatagatctccctccgcactccagaacagaccctctccccacttccccaggttctgagagaacccacatttcccaatccctgggtccagggcagacccgtccttccatgtccagagaggatcctgatggccctgccaacggcctcccttcccgaaccaggactgacccacacctcggcccagttcgcgtcccctcccttgtccccatccttgtcccttccccacccacgtcctctggaatccgggacaggtcctccgcccggcccttggggcgagcgcgcccgtggccagcagcctcggcggggcgggaggtgcggctctccagccggcgcccgcgcctctcctagcgccgcggggtcggggtccgggcggcgcgccccgtgcctcagcggctgcgccagtcgcactgcgggcgctgcgtccccgccgcccgcctggggctcgtgcccgctgcagccggagcagggccgggcgcgctcggcgcgggatgaaggcgcggcggtgttcaggatcccggcgcagggtccagggcgcatctgggcgtccgagggtggcaccctggggccggcgcagcggggaggcccgggccctgagatcttgggggaggtcacggctcgggtggggtcaccgcggcgaccaagggcgggagtggggccagcgcttcgtccgggcagctcggacgtccgaggccaccgcgttgccgacctacccctcctccctccactggccgcctttctccgtccagcgtcccaggcctccgcctccaccgtgggtgagctgtcacggcagaggtttcctgaaatccgtgcctcgcgtgcgcccattccaggaaggcgggaggtgggtttggaagatcggcacggaggtttgagggctcactcagggccccgaagggcgcgtgcttcacggcctttgaggtcggggaattctgtttgtcgttgccggagtgttgggttgagggcttacggtacatggggcgccccttgctcggccttggcttgattgggaggggactcggggggattcagggttcctgtggcgtcactccctgctcccaacctccctgtccctagcagcgacttcttaagggttcgtcccgagccttgcgtttcctggcgctgggtgtggtttggggccgagccgtctgcgcccagcctctcctcctgcggcgccttcgagcccctctcggtcctgcctgctgcccccatgtgcctctgccggggtagggcggtggcctccgctctggatagctgtatgaatggtgtttggttccagtgacttttcctcaccagttactgaaaaccaagtctgcttgtaaaacggcgttttgggggcgtgcagcagcattattttctgtgacaaatggcgggaggcagctggagaaatgtgtcttaggtcttaactaacattctggtgtcgctgaaggcacttgctgggacactaggggatgcccctccggacgtggctgtggaagaggccgcatttgggggatcacccttctaatcgtgttgaaaaggaaggaaaaataattgtagactctgtttcatgagtagctgagtaatttcaggatggccttgtctgtttccgtttagggaagacaggttaaaggtagaacatggtactagacgttgtcctgagaattaggaattgcgttcccaacttttcctcttcagcaggcagctgcctttccaggcaggcggcgggcaccaagagggcacagccagtgaatcagctgatcccagggatcagcccagagctgtgtgcctccggagaagggatggaacaggattgatgtggatctctcctttttctcgttgtcttctcctggcatgctgtctggtagtagctccagagctctggacttgagacgtatctccatttcagatctgtctctggccatagcatttttctgggagctggtgccctgtgggcagtctgaacttgggctgtctcttatttgagaaatgtctttggagttaaatatcttgattgtttgaagggtcggagtatgttatgtcactccatagcttttcatttttcaaaccaaagctcagattcttgccttggattatgaattgaattttatgcttccccttcctgtctaatttaacacattttggcacaaataagcacaaagtcagtcctgggaagattctgggcctggaagagttgaagtgttaaacattagctgtgggaggatgtgtctgggggagactgttgcctgcagtcaggaatttttttcccactttgtatttagatagatgtacaattcaaactgaatttttaattgaattcctgctttggtttaaaactgcacagcgagcttctttttataaatttttaagtgtgtgtgtgtgtgtgtgtgtgtgtgtgtagagacagggtctcactatgttgccccggctggactcaaattcctggcctcaagcaatcctcctgcctcagcctcccgaagcactgggattacaggtgtgagccactgtgcttggccagcactgagcttcttgttcatcacaatatggtggaaaatattctgaaatgaaaatattattcactgttcttatagttataaaaagcaattggaaatgctgaaaaatattcctgtgtgacatacattttgatatctgaataaaaattagctactacgttagctacctaagttgagtaaaagaatgcctgatgaataatacaaaagtttaacattaaaatgacatttgcaaattatatttctattcactttcttaatcagtcttttaaacaccaatatgatttttcttggtataaagtgttcagatcttgtaagtattatcctgactttgaacactcccaggaagagacggtgcaggaaaacctgtcagcttgtcctgctttattgatgttggtgaaatactttcttgcctttctttaaagtcttttcaagagagtttatgctttagaaaggcaaaccattttggcatggttggtgtcttcatctgaaacaaaagtctcagtgctgtgtttcttgcttggttatgactttctattgattgacctggctggaagttcctggtcactaggaggtgagaattcccggcatgggggagagggacctggacacttacctggacctgggagagatttcctggccatcaccaaagagcatattaatatcactcaggatgaatttgtgttttccatctttgaggaggaattgaccctcagtgggttatgctggctgggtggatggggtagttcccatgtggctggttaccatgctcaaccttgcactccgagaagagctcgcttgtctgcacccccagaccgttttcagagtgggggctattaacctttcttgtccccccgctttgtaggagaacattccttataaatctgccttactgagtgatgtgtatttggcaacttcctgtaaacattccaggcccagattagcgatgacatggcctttgccaagagaagcctgagtgacttgctgggtgtgtgtgctttatgaaagaagacccctttgggtttggtaaagtctgcctgggtgccaaccccactggcatgttttgtgggaacctgccaggactgagcagtactgagtatgggacttcctgcccttcggctcttgttaacccagcctcagtcacctgagggttttcggggttccagcccacttggtcatgggcccttgaagagagctgcccattggtggccagcactctgtaccttggccacctggttgagaggggcggcaccctggaaacgaagtggcagatgggggcgggccccagagtggggggtggggcaaggtctggatatatctgtttggtcccgaagtgcagagatgaggcgcagcccagtcctccttttggggctccccactggtggctgagggtgaggggcgatgacagagatcccccagaagtatacagctggggcttggaaggctgtgggaggggtcttggtggacactggggcctggcacgagtggggcctatgagagggcagtcactggcatgtgccttgacttccctgctttgcgtcacctgggaaacgaatggctgtccctacagcactgcgtccatgccccatgccaagcacagaccctgttccagggacttgggatttgagtgataacttctagccaggctactgatgaattcgttttcagctgataaactccaagtgcccagctgtggcagggggttgtccttggcctggcacgtttctctctgaggtgagctgctggaaagccagtgttccggatgctgcacaggctgagcccggcggtgctccctctcctggcgggcgcctggcacggagggggctcaggaagtcctgggaggacgcttggcagtgctgagtcagagcaggcgtggctggccctgcgcaccggtctctctcagctgtgtgtggttctctgaattcagaaggctctggggctcccccggcggctctgcatccaggtcatgccacccctcccagaaagccttcctttttccacatcagcactcaggctgtggtcagcgggagtgcagtgcggacgcctgagagcccatgtgctcttgaggtggctttgtagaacctactccctggcctcttaggaagtgactctcagcgggcagctcacgtctcatttcctgcgctttgctgaggtttctgtttgtggttgggggagtgtgggacctcacatgccttgccttgtgccagcggcatttgcagggcaattaagagcctgggctgcagacagagggcgagcatcactccctgcgccgactctgtcatcactcagggctctccttccctggcagggcagggctgggcgcttactggaaacgtctggtatggtttctgttaaatgggcgagtcagaggcagagagtcgagagcttcacgtaattgatatttggactcagcaggcagggcagacgggggagggaagcagggcctcagtgtcctgccccacaggctgagtgtctttaggtcattttgttcgaccttaagaggagagatggctaatttaaggcggcttcagtggccattttcagccaccaagaattcccagaataccggatgtgcttgctctaaatgtgtgaaggtgcacatctgagagctggtaagtgacagccagggtgtggttttgtttgagttgacagccttgtgcagctacagggtgtgccgggtgcaaaggtgaataatggtgagctgattccaatttgaagaaaaataaatgctgagaaggctgtgggtttcagtgcttccccagtgttttcttgtcttcagtggttgccggtcatgtgtctaaatagcattggagctccagggcctggctgggaattctcgtccctcccacacctgtgcctcagtttccctagtgtcaggtggggatgctgagacctgccttctggaattgttgggagcatgtgaggagatcatctctgtccaagactcacagtaacagctcaaccaatgaccccagtcaataatggcagaaccagtgggtggtgtaagcaggcggggacttccacagaaccaacgtttagctaccttagggtttcatgtcagtgtttcttggagtctcagaggccatcacagcttccagttcctccagccaggccattctgagagtgaaagcgtctcagtgggggcctgccacccctgtgcctttttctggtaggtggcgggtacttggttgctgggaacagaccctgacttagtacgcctcaggcatccccgtgggtctggttacaggtccccctgaggatgaaggatgcgccctgcccctgcctgcgccccaggggggagatgctgccatgtgctcactcaccacgtgagcacctgcctcctctatggttgtcaggaccagggctgactgcagccggtgtgggcagcaatggggttcaccatgtcggactggcccccaaacctctcatgctgtcctcccatggcctgtgccccccatttgttgtctggatgcccaggacctaggagaggactccagggctcgggtggcagcggggaaggggctggggtgcacttgtgctgcactgtgatgtgaggggatgagcttctatccgttaaggcactgaggtgtgagggtcatttgtgaatgtttaaactatgctgatgcaccctgttttacaaatggggtctcaagacaagtcaccttgctcgaacctctacagccaggaggaagcagggctgggatttacactcctgtccgcgggaccccagagctggcacccgtatgcgtcaggcaaagtctcctttcctgcaggaaggcactggactgtcatcggattttacatgagtcccatttggtgaaacgattacttttgtcttttttcagttggattgcaaaaaaaacttagatattgatgggcaagtcaagtgtttgaaggaggaagacaaaagtgaatggatattttttgactgatctgaatagattaagcacaagtagaatagaacattttatgttatggtaattaatgtagaatagttggataggatgaatggaatgattttttccttcttacagtaagcattttgaagctcttccatttctcattgttttcctgctggagggaggcagggggtgtaggggacacatcaagtgggggggcccctccatggacaaggaacatgggtccaaactgcatggctggctctctaagtctctgccacgggtgggttttgctccagctgtgctgcgcttggctctcccccaccagaaaggtggtattttacaccggcttcctggggagactgggctagcacacccaatttaggatagtgtccttagggcaatgtttttttctttggatttcagtttttgagaatgtttccaattatttttagggatatcatgattacaaaaaacacctaaaagcagaatcaactacttaaatgtcagatacatttaagaattgtacactcatgttcatagcagctttatacataacagccaaaagggggaaacaacccaaacgtccatggaaggaagaacagatacatgtggtccctccacaccatggcatgacattagcattagaaagggcgtggtggctcacacctgtaatcccagcactttgggaggtcgaggcaggcggatcacgaggtcaggagattgagaccatcctggctaacacggtgaaaccccgtctctactaaaaatacagaaaattagccgggtgtggtggcgggcgcctgtagtcccagctactcaggaggctgaggcaggagaatggcgtgaacctgggaggcggagcttgcagtgagccgagatggtgccactgcactccagcctgggcaacagagcgagactctatctcaaaaaaataaaaataaataaataaataaagttaaaaaaatgaaaaaaaaaaaaaaaaaagaaagggaggatgttctgatacaagccatcgccatgagcctggaatacaggatgataatcaaaagaagccagtcacaaagggctgcgtcttgtatgattccatttctatgaaatgtccagaagaggcaaatccattgagacagaaagcagatcggcggttgccaggggttggagagtggaagtggaaatggggagtgatgatttaaagggcatggggtttccttttggggtgatgaaaaggttttgacgcagcaagaggtggtggttgggcagcattgtgaacgcagtaaatgccattgtattgtaccctctaagatggttgattgtatgttgtgtggatttcacctcaatttaaaaaaaggaattgtaccactttttgaggttaacagataatcaagggaaaaggtgttttgcccctgaataaaaaaaaataggaaaataggcccagagccatggttcctgagtttggctttctgcgtaggcagctgacttgggggctttggaaagcaccctgccagcctggcccgctgactgtggccacctggcgggggcatcttcctggtctctgaagatggatcctcaagtcccagcccagcctctcctcccaccctgtgctgctggcagggcccttgtcctggggcttccagaagacagcgtgaaggagttctgtgtctgggattgatcgtggttgggtagttctgacaaatttctcaaaccgacctcctcccacagagctgcccgcaggggtcagcccccccaccccaccgtgggtgtactggactcagccttctcacagcgccggcatgggctgctcagtgggaatctccaaggctgtcaggccatgtgggccttgcctgagccagggatcggagggacagcgagcagccagcggagtgggggcgagggggctgctgagatgtgagtggcaagggggtgtgggtcgcggagcctgaaaggctgggtgcacttggagcacaggggacaaggtggggtcgctgcagatggggttgggaggtcgcctggggatgggtcacaggcaaggaaggtgggggcatgatggggtcagcactgctgtttgcggggtccttccaggcctgctgtgggagagacgagattggaagctgggactggtgggtggcggggattccagcgagaggatggcagcaggcgactctggatggagaaagtagatggatctgggcctggtgggggtgggacctggctgggggagaggtgctgtttggggatggggagctcaggagaggagctgcgaggtggagggtggagatgggggtgcagaagtaggggtttggacagtgtgtttgatggccatgcaactccacggggaatgtgagggtggggggccaggggcgttcagggctgtgtcacagaccgcgtaaaggcagacctccccactgcgagatgcccaggcatgttggataaaatcacaaaaacatttttaaaagtactgagctggcaagagagaaggtgtaacccctagtgccagaaataagaggaaactaaaacctaaagctgagtgcatgggaaggtccacttagaaaccgccgggaactgagagcttcaaaccatcactgctgccccacgtcaggattgggtggatcagcccgtggggcggggctcacctgggcgtggcttcatctaggtggggcttatatgggcaggactcacagtgtggggccatctggatagggctgcatctgggcggggtggcatctgggcggggcttcatcatctaggcaggcttacctgggtggtactcatctgggcgggactctatctggatggggcgccatcatctaggtgggcttacctgggtggggcttcatctagatggggcttacctgggcggggcccaactgggcggagcttcagttgggaagggtcagccagctgaaccatctgcggcctttggtccaccccggctggtgcagctgtcaggcaggccccctccaggctttctccccgatgctgagtctcagggcagtggagcagagtggcaaggtgatcctgaggcccagcctggaagtcacatggcatcacctccacagtgtccatagggccagcccccattaaatggggggggctgtcacctccacttctcggtgcggggagtagcagagtcacatctcaaagggcaggtgtggggatgcagggaaatgctggcttggtaggatgttcttgggagcactcacagggaggcccagggcatggtggggttaggggagatgtgttggtccaggactgggtgaagcattgctgtccagtgagggcaggttggagcaagggtcagacaggaatctgtggccttgaggcctggaggccagggggccaggaaagccccataggccacttcagcacagggtcacctgggcagcctggccgagtgaggtacatggtgttctggaggagccctcctgccacacctctgaagtggagttcatagtagaaagttacaagacagaggagaaaggggttctccgtgagcacactccctggcatgcgtaaggtcaaaccaagccaagagactgaggatagaaaccacaaggcaggccaggcacagtggctcacgcctgtaatcccagcactttgcgaagccgaggcaggtggatcacgaggtcaggaggtcaagaccagcctggccaacatggtgaaaccctgtttctactaaaaatacaaaattagctgggcgtggtggtgcgtctgtaatcccagctactcgggaggctgaggcaggagaatcacttgaatctgggaggcagaggttgcagtgagccgagatcgtgccactacactccagcctgtgcaattgtgggagcttctgaggcacagagggatgagaaggttccagatgtaactcctgggacttcaggagcgaaaacagggggagagaggaggctgttttctgctcacggctgagaatcttcccgagttgaatcatcaggttcataagcccacaccccagatgggaatcagtggcacagcaggcccctcagatgctcagaacgcagcatctgaggggcctaaggggacaggctgcaacctcacaggggcctctgctggactggctgaatactggaggcctggaggactgtggagcgaaatctttctagggccacagggagcaaagtcagagtagagttctgggcttagctaagctgtcgttcgtggaggagagcaaaatggaagacagttttagacgaagacaaaaaagtaaccgcccccaaatcattgctgaagaagtactggaaaatgtactccaagaggaaaatcaaagtcagaaggaaggagtgggaggcaaggtgcaatggtggggcccaggagtcggggagggagtgggtagatgggagcagcagtcaccttggggagcgtgagcatccgtgctcctggcaagggggagtggaaattctggacagcaatgcctggacagcaatcagagctggcactgaggtctttgatggtttgcaataaggctggatttgagaccatgagctaagtgtgtgaattaccacagggtaggcactaggataacagtcccagaagaagggataactcctaaaccaggggagggagaaagagaataaaggaaataatccaatcaaagcaggaaaggatgagaagagggcagcaaagcaaaagcacaacaaacaaaaagcaaaaactaaagctgtagaaataattgcacgtaagtcaggcatcacagggagtggagcaaatccacctcccagacagagactgagagtgcacctgtgcgttgaacaatccaaccttgtgctgttgacgagagatgtccacgagacagcttccgcagaaaggctgaaaagaaaggggcagaaaaggtgaaccaggcgtttaccaaaagcaaggaggtgaggttctttctccctgtatcaggtaagcacggcgctcaaagcagagtgacagcatgtttccccacagggaggggatggcttcctgctgcacaccatcggctcccaggcctggctgccccacctctttaatcctggtctcagtcacaggagctctcgggcagccccttctcagtgttttgttttgtttttttttgagacagagtcttgttctgtggcccaggctggagtatagtggcacgatcttggctcactgctacctctgcctcctgggttcaagtgattctcctgcctcagcctctcgagtagctgggattacaggtgtgcaccaccacacccagctaatttttgtatttttgacagagatggggtttcatcatgttggccaggctggtcttgaattcctgacctcaagtgattcacctgcctcggcctcccaaagtgctgggattacaggcatgtgccaccatgcccggctaattttctttcctttctttctttcttttttttttttttttttgagacagaatccattctgtggcccaggctggagtatagcagcgcaatcttggctcactgcaacctccgcctcccaaattcaagtgatcctcctgcctcagcctcccgagtagctgggattacaggcgcctgccaccatgcccagctaatttttatatttttagtagagatgggggtttcaccatgttggccagggtggtctcgaactcctgacctcagatgatccccctgccttggcctcccaaagtgctgggattataggcgtgagccactgcgcccagccagtgggcattttgaaactgttgaaagaaccaagagaacccgagggacagtgacaggagtgctggctgtcggcctcacctggctccttcctgaccactccaagggacgtgaggtctcagagacaatgggcacgggggccactctcctgtgccccggccccttccctctgacctagggaaggcttcctggcctgcagatctcagagcctgggcctgctcaaggttacagctcggccatgtggctgcctgcagtgggagcggggcactgcagggaatgatgggaaactgtaagtctgctcagcgcacccatcagtcgaccatcagcacagtcgatctgcagcctcccacagcgtctgaaatccaaggaagtcccattggtcttctcaaatttggtccaattggtgtgctccagacacttctgaaaaggccaaggactgtgggtggtaaggcctgcctcaaagctcactgtggggagagaatggaaaagcaggtggcggtgcaccccatcttcccttcgcggtgccgcttggagtatggggaagacacatggcttctctcctgaaggccccaggcccagcaccgctttgtccgggccactctctgggggtatctggggctcactttggaactatccaaggatatgcctttggggacaaattcggcttgtggatgaggttagttatggttcatttttgttgttatatatatattttaatcttttaagagattgaagtgtggctgggcatggtggcctacgcctataatcccagctactttgggtggccaagggggacggattgcttgagcccaggagtttgaagctgcagtgaactacgactgtgccactgcactccagcctgggcaagggtgacagagcaagaccctctctcaaaaaaaaaaaaaaaaaaaaagagcgagactgagagggtgaaatgcagtgaatatataggtaaccattgaaagcaaaccatcagtgatatttcctgtattcgcaatctggtgcagccattggctctctctgatttcaaagcttttccatcatcccatataaacaccctgtttctattatgtagtcactcttcactcaccctgcctctggcccctggaacctccagttggctttccatctctgcggatttgcctgttctggacgtttcgtataaaaggagtcatacgctgtggggccttttgtgtctggcttcttccagtttcatccatattgtagcatgtgttagcatttcatttttatggctgaataatattccattagtggacagaccactttttgttttccattcacctgctgatggacatttgggtagtctccatttttggctgtcatgaatgacactggcatgagcgtgtgtgttcgagtctttgtaatttgctggcatgagcgtgtgtgttcgagtctttgtaatttgattctcttggggaggtgcttgggtggaattactgtgtagctccatcttcagcgttttttttttttttttttttttttgaggcggagtctcgctccgtcctgcagtggcgcgatcttggctcactgcaggctccgcctcccgggttcatgccattctcctgcctcagcctcctgagtagctgggactacaggcacccaccaccatgcctggataattttttttgtatttttattagagacagggtttcaccgtgttagccaggatggtcttgatctcctgacctcgtgatccgcccgtctcagcctcccaaagtgctgggattacaggtgtgagccaccatgcccggcccatcttcagctttgaggaactgccaactgctttccccattgtgattctttttttttttttttttccgaaatggagtttcgctcttgtcacccaggctggagtgcaatggcgcaatatctgctcgctgcaacctctgcctctcggtttcaagctattctcctgccttagcctcctgagtagctgggaccacagatgtgcaccaccacacccagctaatttttttttgtatttttagtagagacggggtttcaccatgttggccaggctggtgtcgaattcctgacctcaggtgattcacctgccttggcgtcccaaagtgctgggattacaggcgtgagccactgcagctggcttccactgtggttcttgacagagagtgggtcatcggaggcggggtcggtgagtgctgagaggggcctgagagggcatctatggccctgctgtgtgctatggctttgagctgccccagccctggtgagcggagtgccctgataggactcccacttctcctgtgcttgtaaatcaagtcaaacccctcgaaaccacaggcctggggaggtcttcaaaagtgcgctatgtcctcccgacacgatccagggatggccagggccgtgctccaagaattctggaaggctcatattgcgtgttgacactcgcgtgtgtgactgcatctttctctcaatggaaggttccacgcactgcttcccacgcccccacttgagtggcagtgacaaggtcccactagtcctttgcccatctcagatccctctgcagacccgacgctggggtacaggctttttcccctcctgggctgcagccctggaagtgtgggggcatctgtgaggagctggggctcagggcagccctggtagctgaggagaaggcagctggggccacacaggcttgggccacagcccagcggtgtcatcaggcggccacggggaaaggacgtgtattgttctgtgtgccctgcattgtcagagaggtcagcattgcactttgactttcctcaaacacggataatggcacgccagcctcatggagactcccaaatggggatcctgtttctgagggtgctggatgggtggtgggcacgtcctgtgaagaccatgctggtgttagctgaccgggtcctgagctaggaggaggggccttggtggagggggcaggcttggccctgcagggatgggtcagtgctgccctggttttcatgcagtgagaggctgactgagagcagagtgagcttaaattccagcactggtgtatcattagatgtgggtgggtaaatagagcacaaacgcacctaagcttattagtctggtacagctgctacggtttttaatattcccttctaagcctttttcttggcatctgtgtgagtgttgttgtgcgactgtctaccgcgttccctgcccgctctctgctgtgtggcttccgtgttgtcttctgccggccacttccccgggctttgtggatccgactatgaaatagtgatcctggcgctgtcttcctcacatgcagtcctggcttgaggatgttctgctagtttttgccgctgttgcctgctctgcttaatacagctcttgctgacccatcaggacttctggggaccgtagccaagcagaggctgcaggacacggccctccagcaccttctgctcctgcagcgggcggggcgggggatggtgtctgatggcgggggcggtgccggcttgcctggccgacttactgatccaagccctggagcagctgaccttgggaggagttggggaggaggggccccgcccacccagcagggctgtctccaggttgaaacgagctcccagctgcagcgctgtctgtgcggtgcctggtgccatgaggggagcggtggcagcagagctccatgctcattggggacccagctgagcaagtccctcctccagcgccagggagaggattttaaaagctgctaccactgtccctccacagccggcaggaccgggatttcttcctctgtgtctcttgacagcagagactgcagcatgacaaagcctcagggtcgtcgtgagctgcccgacccaaatccctcaggctggccaccaccacgcacacggggcttcagggagcgctgggagggccaagtgaactggttttgtttgaaaggtctttctcatgagaggctcgaggagaggacgcagcccaggtcttgggccgggacccccgctaccactgggacccccgagggttttgctgctgatggatgaagaggctcctgtggaactgtggcctctgctctgcacctgagccccgggggtcatagaggttcttggggtggactgcggtgcggggcggcgaggggaccgcaaggaggcactccttttggctcctggcaactctgaccaaaaaggcaggcccacggaaaaggcagttttatcctctgaaaaacctctctgtagacactctcttccttggctcagaactcacagagccagaaggaggagggggagggcgcggggtggggcaggtagcaccgtctggtgtcagagtgaaagcaccctgtggttaggacagcttctgagtgctgcccggccgggagggtgtgtccctgcgacccgggccctgggccacctactgcacaggctgtgagggtgggatgtgggcaccgggactcctgccctagccccagccgcctgtgtgagatggaggtggcagtgcttccctgcccctgtaactggggcacccctggggtggctctgcacaggatgaatcggcacctcccccttgggccatgtgtcgttgcgtgtgagctgtgaccactgcaaggtggcagggccctgcagtgtcagtgcctccactggccatccccttcggggccccccttagttccatggagcaagtgtttcccctgggaactggggagaggctcgtgacggcccacctgcccagccttcctccctaggtaccagtttccatcccccactgtgctcacctggggacattctcagggtgtgtgtgacgtctgccacctccagtccttgtggacaaagagagtataagtcaaccacagtcaatagctgaatcctgttggtctagaatttttcaccctgtgtgatggttaatactgccaacctgattggattggaggatacaaagtattgatcctgggtgtgtctgtgtgcgtgctgccaaaggatgttaacatttgagttagtgggctgggaaaggcaggcccacccttaatctggtgggcataaactaatcagctgccagcacggctggaatgtaaagcaggcagaagaacgtgaaaaggcgagactggcctagcctcccagcctacagctttctcccgtgctggatgcttcctgccctggaacatcggcctccaggttcttctgtttgggactcggctctccttgcttctcagcttgcagacagcttattgtgggaccttgtgattgtgtgagttaatacttagtgaactcccctttatatatatgtatcctattagttctccctctagagagccctgactaatatacccaggcaaaccggggtgtctgggggcctcatgacactcactcctggggtggctcgggacctgggctactgtcgaattggcggtggcgcagatgcctgtattttaggggccgagactggtaatgtgtgaggaggtcagtgttgtgcgtgtgctgtcacagagttaacttaagggcgtcacttgatgaaatgtgtgtgcgtgtcatgacacagtaacttgatgggcatcattgatggcacttagtacttccacacattctgcgacggaccagaccagctatgtataaaagtgggtaaccccaagacctttcatgtagatgaattaagtgcggtcaagtaaaaaaatgtgttcctcctgacctgtggctccccgaggcagattgcaggctctcgatgccactggagctctgtggagggtcagggttctgtgcccgccctgaggagctccggggaaggaccctccatgtggagaggcagcatctgaagcggccgtggggccgtccccgccctgtgcgtgctgcgtggtgccggcacttcctcgggctcccctgtctgaggaggagggacgtggtggtgcctcttagtggccacggtgggcgccctgccctgttcctccaccttgtgctgaggaagctttgacgtgggtgacagggcatgcaaccccatgtggcccacatgactggtacggctcacgtccagcagcatttgggtccagatggtgtcccgggccctgctccgagctctgctccaagtcaggggcctgcactgtttcttccgctctgctctgcacttgggatccgagtatcgccacttgctgggtgggaggcaggcggcttctctgtaggccacgtggtgcaacggaaggaggcagtgatcccctccctgaccctctcaaaataggcacggagttaaaacagtcacgtattcattcaacaaacatgaactgggtatgtatgatgtgccaggctttgagcttgggacttggcagaaaaccagatgtcagaggccccggccttcctgggtgctttcttgcgagggtatagctggcttggggacatggttgggggcagcacggtcaggggcgtggtaggggaatgctggcattctcacagtctaggcaagtcacgggccagcccagctccgcaaagaggggcagagatttcacctttggacaggaggagaggcgtgaacacacaggactggacagacggacaggctgttggtgcagctttgtagttagccacacccctgctgcaccccccaatgcagggctggatctcaaccccccacattgtgcactggttatcaccccactctgtgcactggatctcacctccacccttgtgccctcgatctcaccccaccttgtgccctggatctcaccacccctccttgtgccttagatctcaccccccaccttgtgccctccatcttgccccagcttgtgccctggatctcacctccacgcttgtgccctggatctcacctccacgcttgtgccctggatctcacctccacgcttgtgccctggatctcaccccaccttgtgccctagatctcgcccctccttgtgccctcaatctcgccactgaccttgtgcactggatctcacaccccccttgtgccctcgatcttgcccccgcttgtgccctggatctcagctccacacttgtgccctggatcttgcccctgccactgaccttgtgcactggatctcataccccccttgtgccctcgatcttgcccccgcttgtgccctggatctcaccacctattgtgcactggatcttggcccccaccttgtgccctggatctcgctcctcctcgtaccctcgatctcgcccccgccttgtgtgctggatcttgccccactcttgtgccctggatctcggtctccaccttgtgccctggatctcgccacaccttgtgctggatctcacctattttccttctcaagagcttcctgcagtgctcctctcttgtactggtctctcccagtctgtgactcccatataggtgaaaacctgccatgacctctcctgtctctaaagcagcaaccatgtagcagccccgcttggctgccgtctctcgagctgccactccgtagctcctggccctcttttcagcagaagtccttgaagaagctgtctgggtgccctcatgcaagcccactgctttgtgttctagtcgctcccccaagcagcccaccatgaccacccatcgggtcaccaatggcctcccgtgtcggtgccctgcaccctggcacgggtgctggccttccccacccacgcggcctcctgtggagccaggccatccactggcaccagctctaggtcccttgcccttggtgcctcacagttgtatctccagccgggacctctgccctgacgctgcacttgttgggacagctgcctccttattgtctccatgtggacgtctgccaggacccccccctcccatctcacctgcccccaccccgccccctccattctcctccatctctgtttctatgggtgcctgggcctcacacctggaaacccacctcagctctcctcctagtttctcactgcacatccttccgcacatcctgtaggcgtggcctccaaagtgtctccaggagcacatgtgtgtttgcagcaatgtcattccgaatagccacatgtccatcagtgggtgaataaataaacaagatgtggtgtattcatgcggtggaatattattcagccttaaaaaggaaggacattccgacacatactacggcgtggatgacccgtgaggacactctgctgaaaaagactaaatcaaaaaaggactaatattgtctgattccaccgacgtgaggtccctagaggcatgatgttcatagatatggaaagtagtccggtgggggccaggggaggggagcgggcgtgagtgtttaatggggacagagtttgggaaggtgagaaagttgtggagaagggatggtggtgatggttgcacagcaatgtgaataaattttttttttttttttttttttgagaccgagtctggcccccaggctggagtgcagtggtgcactctcagctcactgcaagctccacctcctgggttcaagcgattctcctgcctcagcctcctgagtagctgagattacaggcacgtgccgccacgtaaggctaattttttgtatttttagtagagatggggtttcaccatgttggccaggctggtcttgaactcctgacctgacctcaggtgatccacccaccttggcctcccaaagtgctaggattataggcgtgagccactgtgcccagcccagcaataacatttaatgccgctgagttgtacactcataaaaggttaaaaggtcgattttgtgttatgtttacatcactgcaatttaccataacaaataatagaaaaatgtttgcaggaggtgaccccttctgatgcctccctgatccccggccgtggcagtcgcccctgagccggagtccttccttctgccctggctcctgtcctgccccacccggctgttctcggcacagcagccagagtgatcgttgaagcacacaattcaattcgggtcatgactcgctgctcaggaccccccagtgactccgtgtcagtcggagttaagccccttcagggtcaggtaccctcccccagctgtccgccctccatttcagccacccggggctccttgcggcttcccagacaccccgccttgggtcccctctgcaggatggctggtcccatcagctcagacacccccgccttgggtcccctctgcaggatagcttgtcccatcagctccccttaaatcctgacttagcagagactcacccagtgggtctcacccgggctgaattggacccccaggggacacaggcaatgtcatgtagtgtggggggtgctgctagccatcccacaatgcacaggagagcccctgacaaggaaccccctggcgccaagtgtcagcagtgccttgggtgagaaagagcccagccctaatctggagtcccgccgcctcctgtgagcctccctcctgctatcttggaccgttatctgggtgtggtggtagcaccgcggtcaaaggctgtccctggcgtgttgggtccggccacctcttctggcctggcgttcctggtgaccttggtggagaagagctgggagtggggaaggaatctcaggaaagccctgtttcctgctcccaggttgaaaattccaggccagtgctatgggatgtcaccaagggagctttggggactctggttcatgactggtgtgcattgcacctgagtgtgacagccaggctgtgctgagcaggggccggagtccccacccctcacactgttccagctcccacgacctggacctggtgcctgtgtgcggggagagcgttgggatccccctggggcttatgaaggggcctaattggatggagcagtgctgtctgcgcgaaagcaaaggcttcaccttgcatgctcgcctgctcttggatgagaaacagtgtagttaagtatgttagggattatgaaatgttaggtagcgtgtctgaattcctctcttattagtcgagtaaagaaaacatagaacttgagttcagtgccttcctgaggctcagtgccttcctgaggctcagtgccctcactgtctgctctgcagaaggaaccgagatgggggaggccccagtagggtacgactggcgtggcggtgatggggagctgccaggatcggacaccagtgaccttggcaattcaaactgaggagaggatggccagttatcttattgggtacgattttcagtcttgaagaaaaggggtttcactgtaggccaccttactacaccctgtgccatttcatttcatctcctggaaagaagacagaagcttctcctggcttaatgtggtgggacttttaatgggaagtgagagagcatcattagggctggccttaccctttgcagggaagagattgaatgatagtcccttgaatttgcgaggcacctgccctgtgccacccactgtgctgggtgctggcatctgccgctggcaccagggttgctgcaaggacgaggacgcctctgaccgccgacagtgtaatggaagcacgcacacgtgcagtcaggcatcgatgcagctgcgcagagtggtgcctgctcacaggatcggatcgcagacctgtgtgacacgacacccaggcccctgcctgtgaccgagcagcccgagcagctggaagcatgtgccttgttagaaaggaggcgttgatgttttaggaccttatgtgcacacagctggagccatcataacttgtggttcatgacccttctcatgcggtcaaccaccccgtgaagagaaacgcagccagcctaggggtccaggaactgtaactcaagtccatggtgagagagcccctttgccagtcagctggcaacgtgaaggagccctccaggtccaggcattggagcaggtgtggccgtgggatcgcatacgtggctgctggggtgggtgacccagctgtgccacctgcggcaggcagaatgatggcccccaaaggtgtccatgtgtgaatccctggaacccatgaatctatgaggtgtgtggcaaaggggaagtaaaggttaaagatggaactacgcctgctcgtcagttgaccttccgatcatgaaattttcctggattatgtcggtggccccagtggaaccacaggagtcctcagtagtggagaagggggcaggagagtcagaggagctgggcctgggaagaaggctgtagacgtgcaatgccgctggctctgaaggtccgggaggcggccgtgcgtcgggaagtagctgtgcaagctggaaaagggaaggaaacagactcttccctggagcctccagaaggcacgcggtcctgctgacacctggttctagtccagagagacccaggctggaattctgtcctccagaactgtaagatgtgaatgttgtcatcttaagccgtggagtttgtagtgatttgttgcagcagccacaggaactagcacacgcctcctggggacacgcacagccagctttgctcacaacagtaaagcccggaagtccgtcccccaatccgcaggtgtggccgagtgaactgggggtgtccagttacgggaggaggggcagcggcaaggggccggcgggagtctcagcagcttaatgtggagtgaaaaaagccagtctcgaaatattgcatatgcatgatgtcctttttatagagtcaaaaacaaccaaaaatacacttcagggctacatgtggctgccacctagcttttggaaggggccgtgagagccaggctcagggactgtgggaggtgtgcaagcggccgaggggcaggcaggggtggttatggcaggtcccacctgcatggtaggtggtgagcttccagggactcatggcatgagcaaaaataactagcacaccctttaacttttttgcatagttgggaattagctgtctccacacctgtgtggcctgccttccaaggaattcccagcccaggagttttaaattagtgctgcctgtggcattatgtttcaggtattggaattactctgtgtttgacaaggggaaggcaggtgttctgtgtctagaaaaggaaaaggtgaatggagtgatcttttatgcagcggatgcggtgagatttcaggtgccaccagcaacctgcattccacgggccgaggagctgtgggggtctcctctggggctctgcagatgagatgggattgactggccatgatcaatatgacagcgtcctcaaaggaggggcagacgcagcctgcggccctttcacggggagctttgtgaatccaattccttccaagacaggagcaaaagatcctatttatttgcctgaatctggaaagagataaaagcttttttcttttcttgtaattccagccagggtcgattctacatggacatatttttctgcatttttgtaaattccttacagctgaggtgtgtgaagtgcgattctcattaaactcacagggccaaagctgagcctctcgactgatgccactttaaatattgggtatgggaagagctgggaggtgggagtttgacagaagaatgaagagaacgtaatgtttcctttgataacttttccttggagttacatgaagaattgggtgacagtaagaaaggatataaacaattcattgtaagctgcaaaatttagttgtatttaaataatttaatatgatttaagagtcactaggatgcagtgggatggtcctattatcgacccttaatttatttttattcactgtagaggatgaatctatccggacctgcttgcagacactggctttaaatgagttcgttcccaaattccatgcatgctaagcgtggatgaaagaagacgtaatgtaacatgattgtacttttcttttagagagtcccatctattaatactttttgtcccatttgtagttgtcatgtttgttctgataaaggatgtacttacgcattggattatgatgggctggagagtgatcactgggctctacttgtttagggagaagctcagagtctgcgggagaggagatggtgccatccagccaggctggccgtggaggggatggtttctccctcagggagctgctttattcccccaggccatattttgtaattaagtggaattcaggtaacataaaatatgcctccccaccctttttttttttttgggatggagtcttgctctgtcgcccaggatggagtgcaatgatgcaatctcggctcactgcaacctctgcctgctgggttcaagtgatcctcctgcctcagcctccctagtagtcaggattataggcgctcaccaccataccaggctaatttttgtatttttgtagtggtggggttttgccatgttggccaggttggtctcaaactcctgaccagcctaatgaatccccatctttactaaaaatacaaaaattagctgggcgtggtggtgggcacctgtaatcccagctactcgggagcctgaggcaggggaatcgcttgaagccaggaggctgaggttgtagtgagctgagatcacaccactgcactccagcctgggaaacagagcaagactcggtcacaaaaaaaaaaaaaaagagagagaattgacttacaggaagccgtagaactgtcaaatttatagatacagaaaggagagtggtgggtgccagggtctgggggaggtggaatggggagggagagttaggtggggacatttcagtttgggaaggtgagaaagttctggggagggatggtggggatggtggtacaacagtgtgaatgtgcttatgccactgagctgtagacttaaaaagggtgaaaatggcaaattttatgttatttgcattttaccacagtaaaaaaaaaaaaaaaaaaaaaagataattgacctcctaagtgctagctgacctaagacagtaaccttgcattgtgggatctgttatgtacgtagaggtaaacgtatgggaacaatggccccaggacgggagggagggaacgaggctcttccgccacacatgagcgcgggttgggagagctcagggtgggctgtgaccaccaggacatgaaagaggaaggaacagtgactgagcggccgtggggacgatgcggaattgtaaaaaggcactaaatccagaagtcagggatggagcagaaggggagagagagcacctgggaaaatcaggaaacacagagggagggctgcggcgggcacggccccttgtcggtcatttaggagggcgcttggggttgggggaggctgcgtgcccacaggcaggtctctggcgccttgcagacagcctgagtgtctgctccctgccccacagcagctgctgtcttctatgaaatgactttcagctgtgaagcttggcagccagaggacaggatttctgagtagtgggaaagaatccagcaggaggaccccgaacagacagggattcctcaaccggggcatcccaggaccaaggcagcatgcagggtgaaccctggccacactgccaggccagccataggccttgttttcttacaaaaagaaaacaacttcattatattctgattgtggtagtaacgtctaaaaatgcaatacacgcttatcataaactaaacgtaaacttcaggcagctagagaggcaaaagggaaacccattcagaagaaaaactgtgttgatattttggcttgttttttccagatctttctctttacatagccatgcttatgtataatttatacaagtagagtattctggggacatttctggaacacaaacctggccgggtcacctcgctgccggatggcttctccagcttctgtcagcttcaggaaaattgaattcctgagcccccgacatggggtcctggctccccatcatcttccagctgaggcacagttgcttctccagtgagacacatggggctccctgtggtggccctgcctgtattcgtttcctgtggccgtcaccaacaaattactacaaacagagcggcttgaccacagaaattcacccccgcagagtctgaggcccgaagtccacaatcaggatgtaggtgtcggcagggctggttcctcttggaacctctgagggaggacctgctctgtgcccctgcagcctctggtagctgccggccagcttggcatttgctggctctgtctgccttgctccagtctccacctccatcttcacatggccacctccttctgtctctatgaaggacgcttgtcattggatttcatgccctctcagataattcaggatctcatcacgagatccttaatcacatctgcaaggacccttttgccacatatggtcacattcacaagttccaggtagacctatcttcggggggccgccattcaacccacaatagcattctggtgggcgggaggaagggaggcgttgggcgtccaagccaggcaggaggcagctctgaggccggaggggatgccgtgaggggacgctgtgtcagcatgcaggggtgagcacgtggtgtgttttcctgctgagagtaggtagggagctagcagcaggccactcccttcccaaattggtgccaggacctctgcagggccacctctccttaggggctttggggctgctttgtcaccctcattctggggctccctgcagaatggatgtgtctgaatctgcaggcacatctgagaaagacagaggagccggatcggggaatggatgcttccaacgcagggctgtcattgccctgtgtcctgggggatgcaaagcctttttctaggtgagattttgggcagcttgtccctaatctatcagaagccgcctggccttacatgtgtcccttgggtgtagcaggaggcactctacagcttcttctggccttgagttgggccataggagaccatggggctctagcaggctgagcctcctcatgtggtggacactgaggcccaggaaagggctgggcagtgtgtctgtggctcacagggtcagcagggtggggcatgggggtagcctcaggcaggctggcctctcatgtcacagatgctggcccctgcagcccagtcaagctggtgtgagatccaggtaggctctgggtgctccaaatccacggaagccggaacacctcctggctgtgtgggcaggacctggctggatggcctgactggccatgggtgtgagtggggttaggctgtagccattaggattgtagggggatggggtggatctagggggcaggagccatgttctgagggagctgggacagtgcagatgggtggaggagagaatctggggtcccagaggagggactcatcagcctcccaggttcttcccccacagtggagaatggtagaaatgcaaaccagccacagctactggcagtgggggcattcagctgccttggccactccctctctgtgggcaggactcttcctttgccatcagtgcttattttaaaagggtaagctgtgttcctagatttcgggttgaaattgttaagctccctcctctgcttcccaccagggtgactctccagctcagcaggggaggggtctgggtggtctggtccctcccatcctcattgcctcagtcttgtgcagctttctcagtttggtaggggagggatcctgttagacccagccctcggaagtggagctgagcccttcacgtaaatgcagtgaacatcgagagcagcaccaccgtcatccaccgtgttcgttctcctaagctccttatgttctcctaagctctcctatgttccttcctctgaaagcctttctctaaataaagttgtcacatgggcaggaaagaggctgcctgggtgggtcttagggctttggagtgacaccgtcctggcatgctctagaaaggccctggtacttcccttcttgtgcagcagtgggatgggagaaggtgagcccttgtggaaaaaggtatttccaagcagatgtgggagccctcgttgtgctgttgatagtccatgacctttttcctttgcctctaggattttcttccatggggtaattgtgctggggttgacagtattaggagtgaccttgaggagctaattgggaaattgacattgtgagagcttttaatttgcttctcctgatgggatccatgtttaatatggtcgtgattgccagtttttatgtgtcttgaatttgtgtcccggctttgaagacaatttaggagagcagccccgtgggataaacccttaggttcgcacggagactggggggcagtgtgtgctgcgtcctctcccttggatgagtgctgcattatgggagctcactatctgctcagtgggttcctgcagaccatgggaggccagccgcccgtcacaggacctgtcttggctgtgcccgagggtggcgactccagacacagggctgcagatctgtgttcaggcagcatgaatgtggggcccttttcctgtgggcctccagggcttcccaggctcaggggtcctgctgtccgacagtctttggccaggcatcgccttgctgtgaagcccacattcccaattccttatcgggtagttctttctggaggtgataagggagccaggtgatccctgatgccacagcccgtcatgatggccaccattcccccagaacagtaacttcccccttctttttgttaggtgctcttttggcaggagaagcacaggacgcttgttcaaccagtattccagaaccttctagaacctccccacccaagcatccctgagatctgggtgtgcttagaggatggccctgccaagctctggcgagggtccctgctccctgcccaggcctcctctgtgctctccctggaaaggcagcactgctcctggccccatatcccgtgtccgcagctgctcgccaagtggggcggcacatccctgacaggcagattacccccaggcacagcacgaggacaaggacgtcacgttcgcctggacttgggtctcctgcttccggccggcaggagggcaagcaggccaagtgatgggttctggccaatgacgggcaagcagagttgcgtcacttccggccgtgaagctcagtttcccttcccaatgagactgaggtgcagaggtggccctggctgaggggatgggtaggggagagccacgcagccctaggctggactgtgcttccgggttcccagtggactgccaggagccttgggggaccctaggccgctggtggcgagctccggggtgggccagccttctcctgcaggcaaacggactgtggcaccgctctccatcctggctcagccccctcctccagggagtggccccggccccggccccggccccggagtctcctgcagtctgcggagccgtccaaccccctggctgtgtccggagatctccattctggggcctcagccctactgcccgtgctacctgactgccgggggccagcggggtttctttccagacaagactggactaggaggctgctccgggaggcgagctgagggcagcgagcttggctggcacctcaggcgggcgggcatggcctcagcaggcgcgcagcggggttttactgctgaaagcgcctgtcttagtctgttttctgttgctttaatgaaataactgagactgggtcatttataaagaaaaggcatttgggtttcttacagtcctggaggctgagatgtcccaggtcacagggatggtctggtgagggcctccttgtctggagggactctggagaccccaggcgtcccagggcatcacgtggctagggggcttaggagagagagccaaggtagcttttatgacagccccgttctgtgatggctcattgaccctcagtccacaaacggctggattcatttatgaggacagtcagtcacctcttaaaggccccacctctttttgttttgagatggagtctccctgtgttgcccaggctggattgcagtggtgagatctcagctcaccgcaacctccgcctcctttgttgacgccattctcctgcctcagcctcccgagtagctgggaatacaggtgcccgccaccacacccagctaaattttgtatttttggtagagaggaggtttcaccatgttggccaggctggtgttgaactcctgacctcaggtgatccacccgccttggcctcccagagtgctgggattacagacatgagccagtgcgtgcagccagccccacctcttaatactgttcttttggggatttacttccatgtgcatttgggaggggacattcaaaccatagccctgtctgagtggaaagccggctgctgcagccgtgggagtgaacaccagcagggaagggaagggaagaaattgtggggtttttggtgggaacagaaaagagacatttgggattagtctgcaaatggaaaattaaattctgtgctggctctgccctgggatgagagcgagcccggtgcagtgcttgtaggggaccctcaaagactccgctttgtgaactcaggacccactgacaaagtcaaattgtgattttaacttcccggagaaccagatgggtcccctgtgagggcgcctgtctgcggctcttaagcaaggagctgggagcactggagtgggggtgtgagagggtgtcaagtcccgccttgtgaaagcctggtgtgttttttgttttttttgttttgtgagaagggaaatctgccccgtgctgtcctgaggaaggcaagccaatggggctggagggaatccatgtaggaggtcagaggtcagccctgagggcaaaggctcagatgcaggcagtgagtgccctctctgctgtccgaagcctgtgggaggccatgtaggcaaccatgtaggtctgacccgctgcagaaacaaaggggcgctttgctgcttggcgttgctcagggtcccagctgacagtccagagacctagtctcaaatcccaactttggcaggccggggtcaggagacagcagctctgtaagggcagcaggtgctctctcagcgctggggctgtaagggcagcaggtgctctctcagcgctggggctgtaagggcagcaggtgctctctcagcgctggggcctgcttcaggtgggtctcacctttttctgctgctgttcttggcccactcccttaccgtaagtagccaccatacaggccagggtcatcactgtgctcctccatggcccaggtctgtctgtcctgaagccactgacgggaaggggtggcagcagtgcgggtgtattcccagagagcctctgcagttgtgatgaggtgggtccctgagtgacttggccttccagtctggtcccccttctcgccagtcctgggcaggtcaggccagctaggtttgcttatgcatggcttcaaaggtgaggccttttacaaactctgtttatcactttgctgcactccttgagggtgtacaggattggtgtgtttatgataatccttaaaatcaggacagatgattgccctacactcccctccccccaagtctaggacctgagcctgtctccgtcacatcttgaaaaggcaagagttctgtgtgactccttgtgcagagtgggctgaagcttgggcaggtgtctcacactccaggtgagtgaggtggctcctggcctttgtcttcttttcctatgctgaattaaataaagatttttctgaagtaattcagtcattcatttgttcacaagtcttggctgtgtgtttccatgctccccctatgatcctggcaggtgaggctgtttccctccccacctaccttcccaccgggccctgaggggtcggccctctgtgcttctgctcccccaccccatccagcactccctcaggaggagattcctgcttgggtgctgcctggtcccttcccctcctctcgttcttgcttaaactcactcctgctcccaaactgcatttgtcacggtcctggtggcctgcctgtgccccctccagtggtcagtcacagccctgtcctgggaaaccaggcagctggagtgaccctgggcagccctgagcacttgttcactcccttggcgggtggtcacttccctctgacccttcttgaataacttaatctgtagggtacagaagctttcacactttcctacaaaaccagtttcctcttcgcagataaagggaattccttccagaaagtttcttctgtcagcagtgcagtctcggttcctcagcgtttgtcgaagtacccggggaggagagggctctgtggcattgactttggctgacagtcccgggggcctcttccctgtgggtagaatgtgggaacccaacactgcatctactctgtgtaccccagtccaaaaatcactctgcctgtgtgggacatgtgccctaccctcttgcctgtcttcctcaaggcccttctttgcagaacagccccagtggagacacttcagggtgatggggacatcttaggtcatcagggcatcattgagagagactgtgagtgatgaccctgtgtgacgacctcattttctccagtcttgtgaaagaatggctcctggagatggctcctggagagcgagtgtctgtaacacacgccagcgacaccacacacagagaaaggcccttagccttgtctgtcagggtctcttaggaatagaatattctagatctgtggaaggcctgctggaaaatcccaaccaatgtgaagcgtacctcctccttccagtgtgtggcctgccattcactccagtctgcactgatggtgccaaggctttgacacttgaagcgtgatatgaaaagataaaggcattttaacagaagataccgggtcagtggaggtgaccgaaagcagcatttggttccccaggtcatcctgggcattgggataagtgcgctgccactaagggaaaggagtattagtctgttttcacgctgctgataaagacatacctgagactaggaagaaaaagaggtttaattagacttatagttccacgtggctgtggggcagggggcacctcagaatcatggcggaaggcaaaaggcacttcctgcgtggaggtggcaagagaaaaatgaggaagatgcaaaagtgaaaacccctgataaaaccatcagatctcgtgagacttagtcaccaccatgagaacagtatgggggaaccacccctatgattcaattacctcccaccaggtccctcccacaacatgtgagaattatgggagtacaattcaagatgagatttgggtggagacacagccaaaccttataattccgtccctggccccttcaaatctcatgtcctcacatttcaaaaccaatcatgctttcccaacagtccctgttatggcttggctgtttccccgccaaagtcgcaacttgaattatatctcccagaattcccacatgttgtgagagggacccagggggaggtaactgaatcatgggggctggcctttcccatgcttttctcgtgatagtgaataagtctcaggagatctcatgggtttatcaggggtttctgcttttgcttcttcctcattttctcctgctgctgccgtgtaagaagtgccttttgcctcctgccgtgattctgaggcctccccagccatatggaactgtaagtccaattaaacctctttttcttcccagtctccagcgtgtctttatcagcagcctaaaaatggactaatacagtcccccaaaatcttaactcatttcagcattaacccaaaagtccacagtcaaaagtctcatctaagacaaggcaagtacccttctgcctatgagtctgtaaaatcaaaagcaagctagttacttcctagatacaatgggggtacaggtattgggtacatatagccattccaaatgggagaaattagtcaaaacaaaggggttacagggcccatgcaagtccgaaatccagcgggacagtcaaatcttaaagctccaaaatgatctcctttgactccaggtctcacatccaggtcaccctggtgcaagaggtgggttcccatcgtcttgggcagctccacccctgtgactttgcagggtacagcctccctcccagctgctttcacaggctggcattgagtgtctacagcttttccaggcaaatggtgcaagctgttggtggatctaccattctggggtctggaggacggtggccctcttctcacagctccactaggtggtgcccagtagggactctgtgtgggggctccaaccccacatttcccttccacactgccctagcagaggttctccatgagtgccccgcccctgcagcaaacttctgcctggggatccaggtgtttccatgcatcctctgaaatctagtggaggttcccaaaccctcattgttgacttctgtgcactcgcaggctcaacaccatgtggaagctgccaaggcttggggcttgcaccctctgaagccatggcctgagttctgcattgacccctttcagccatggctggagcagctgggacacagggcaccaagtccctaggctgcacacagcacagggaccctgggcctggcccatgaaaccattttcccctaggcctctgggcttgtggtaggaggggctgccctgaagacctctgacatgctttggagacattttcccagttgtcttggggattaacgttcagctcctcattacttaagcaaatttctgcagctggcttgaatttctcctcagaaaatgggtttttctcttctatcacattgtcacagctggatgcagtggctcacgcctataatcccagcactttgggaggctgaggtgggaagatcatttgaggtcaggagcttgagaccagcctggccaatacggtggaaccccatctctactaaaaatacaaaaattagccgggcatggtggtgcgtgcctgtagtcccagctactcaggaggctgagtcaggagaattgcttgaacctgggaagcagaggttgcagtcagccaaggtcacaccattgcactccagcctgggtgtcacagcgagactctgtctcaaaaacaacaacaacaacaaaaactgtcaggctgcaaattttccgaatttttatgcttggcttcccttataaaactgaatgcctttaacagcacccaagtcacttcttgaatgctttgcttcttagaaatttcttcccgcagataccctaaatcatccctctcaagttcagagttccacaaatctctagggcaggggcaaaatgctgccagtctcttcgctaaaacataacaagggtcacttttgcttcagttcccaacaagttcctcatctccacctgagaccacctcagcctggaccttattgtccatgttgctatcaggcatctggtcaaagccattcaacaagtctctaggaagttccaaattttcccacattttcctgtcttcttctgagccctccaaactgttccaacttctgcctgttattctcttccaaagttgcttccacattttcggatatcttttcagcaataccccactgtactggtaccaatttactgtattagtccattttcaccctgctgataaagacatacctgagactgggatgaaaaagaggtttaattggacttacagttccacatggctggggaggcctccgaatcacagcaggaggcaaaaggcacttcttacatggcagtggcaagagaaaaatgaggaagatgcaaaagcgaaaacccctgataaaaccatcagtccttgtgagacttattcacacgagaacagtatgggggaaatcacccccatgattcaaattatctcccactgggtccctcccacaacacgtgggaattacgagagtataattcaagatgagatttgggtggggacacagccaaaacatatcaaaaggtggcccacaggaccaaggagcggacaatgccaatgacaaatccttcaaaccaggtggtttctgctgctttgacttcaataaaattgaagaaggacttggttgagttgcagctgacagggcgttaagaatgacttttggtcatgaagcaatgattcttagccgataactcggcagttgttcttggagtggcaggaagttcctctattgctctccccgctcctgctaactcagccatgagagcaggtttcttggcacttacctaagtcaaaacgcaggaacagcattgcagctgaggccagcctactttggcaactagtgagttacccaaagagacaacagctagtcagaaaaccccggatgcatccaccccatcaagaactacatttctatgagacacctttctgtgaaatgatggtgtaccaagatgtgtcacatgtttatgttgtttgatcgattgtatactaatactattaggttgttgcaaaagtaattgcagtgtctacattgtcgactcagtgcagagaaaatgctaacactcagagcctcacagaaaatttaaaaatttgaccagcctgggcaacatggcaaaaccccatctctactaaaaatgcaaaaattagctgggtactgtggctcatggctgtaatcccagatacttgggaggctgaggcacaagaattgcttgaacccgggagatggaagccgcagtgagctgagattgtgcgactgcactccagcctgggtgacagagaaagactctgtctcaaaaaaaaaagtgtgaaaatttaaaaatttaaatcccatttatagatttataaatatgtaatattgatatatatgttgtagaaaaatttgatagatgatcagtaaggactttgaagcatagaaatgtatcccatgaggataaaattacaggagggaggtggggtggcaatgtgaattcgagttggcagaggtgcgcgtgccatctctgcacaggaggagtcctgccctatttattaaggaggggcagtcagatgggggcgatttgtcgtccaggagtgatgggccaattttgttgctaaatgtcaatgattataatgtgctgacaatctgagcctctacattcttgtgaacttcagccgaacattttagctgtcagcttggtttttcctgattctgttaagaggagagagctttaaatttgaggtcctggcatagggggacagctcctggcctgggagggccgagaatccttgcactgcccacctgctcccgggtctgacagaagatgggattctgagatttccttttcttggtagatgaggaaactgtaagtccctcccattgctttctttgattgttgagggctctgtctctccctggagcggtccccccaatgcccacacctccttgctctctggcacgggttctgctgccagcatggtgcagactggggggcttggccactctcagatgctgtctgtccatgtgaccagcccccgtctaccccctgctgtcatgagacagccaggcccctggagttctggacaccttcccagtggctcaccaggatgcctggagcccagaaacatccaggtgcagatgtaccccatagaggaagagccctctgctcagagcctctggcaccagcttccacccttgtgggagtctaaggtggtttgggaaggggcaggtggaccttgattctgatttggcttcagtttgcctcttctttctttgggaataatcaagatctgtggcaggccctgggagaatgaaaggctgggtatcgggtctgaaacaaaaacaagtagtcgttttggctggctccaaaattcgtggttgggtgggtggatggagcaggggtggatcaatacctagtctcaatccaggaaagcagtacagaggaaatgacagggtgctgcctcacagtccacaggaggaccagccccagccgggagtcgggcagcttccctaagaaagaaggaaaaagcatcaaagttcagtggagaagttccaaaaagtgtctcataggagtcccagggagagagtggagaggaaagaatgatggaaaagctgtatttgaagaaatggtagctgaatttcccagtattgaagaaagacatgagttctgagataaaaggagttccaagtaggataaagaaatgtgcagtcatgggccatgtgacaggccacatatacaatggtggtcccataagttatgataacgatatttttttatttttttgagacagggtcttgctccgtcacccaggttggagtgtggtagtgtgatctcagttccctgcaacttccgcctcccgggttcaagcaattcttacgcctcagcctccccggcagctgggactgcaggcgtgcactaccgtgcctggttaatttttgcatttttagtagagatggggttttcaccatgttggccaggctggtctcgaactcctgacctcaaatgatccgcccgcttcagcctcccaaagtgctgggattacaggcgtgagccaccgcgcccagcctgttaggataaccgtatttgactgtacctattctgtttaggtacacgaatacttcccattgtgttacagttgtctacagtatactgttcagcacagtaacgtgctgtgcaggtttgtggcccaggagcaacaggctctaccatgtagcctaggtctgtcggaggcggggtcatctaggcttgtggaagtccattctctgatgtttgcacaataatgaagtcaattgacaacaccgttctgagaacatattcacatcgttcagaaatacctgggagtaaatccacactgagatgtattgtggtaaagctgcagaatgtcaaagatgaagagaatctttagaattaacagaaaagacagagtaactacgagaaatggaaaaagccccgcaggtttcttctcagcaaccccaagtgccgcaagatagagaatgagcccacagtgcggcgggaaggcgactggcagccccgaattttagacccaaatgaactgctagtgaaggggcagaaggcaagatgaagacatttttcaggcaaacatttttaaccatttacagatgctcgttgtaacatttcctattataagatgtacatcagcaagaaaagggaactcggaggaaagatgatgggataaaagaaacagctgcaagggtggaaactgataaaatgtcagcgagtttagctcataattgtttaagaaattatgtgtgtcctaaaatagagataaaagtaaagccctaggccgggcgcagtggctcaacgcctgtaattccagcactttgggaggccgaggcgggcggatcacaaggtcaggagatcgagaccatcctggctaacacggcaaaaccctgtctgtactaaaaatacaaaaaattagctgggcgtggtagcgggcgcctgtaatcccagctactcgggaggctgaggcaggagaatggcgtgaacccgggaggtggagcttgcagtgagccaagatcgcgccactgcactccagcctgggtgacagagcgagactccgtctcagaaaaaaaaaaaaagtaaagtcttagaccagtgctgtccaatagaaataggatgtgagagctttgggtgcaagcaacacgtatacacttttattttatttatttattttttttgagacagggtctcgctctgttgcctgggctggtgtacagtggtgcaatcttggctcactgcagcctaaacctcctgggctcaaggaattcttccatcttagcctcccaagtagctgggaccatagggtcatgtcaccatacccagtgatatggtttggctttgtgtccccacccaaatctcatcttgaattgtaatcccataatccccacatgtcgtgggagggacttgatgggacgtaattgaatcaagggggcagttccccccatgctcgtctcatgacagtgagtgaattctcaggagatctgatggttttataagcgtctggcatttcccctgctggcactcactctctctcctgctgccctgtgaagaggtaccttctgcatggttgtaagttccctgaggcctccccagccatgcagaactgtgagtcagttaaacccccttcctttgcaaattacccagtctcaggtatttcttcataacagtgtgagaatggactaatacatctggcgaatttaaaaacttttttttttttttttttttttagagatagggtctcactatgttgcccaggctggtctcaaactcctgggctcaaatgatcctcccacctcagccacccaaagtgctgggattataagtctgagccactgtgcctggccaatttgaaattttctagtagccacattaaaaaaaaaagtaaaagaaacaggtgaaattaattttaataatattttatttggggccaggcacggtggctcatgcctgtaatcccagcactttgggaggccgaggcgggcggatcacgaagtcaagagattgagaccatcctggccaacatggtgaaacctcgtctctactaaaaatacaaaaaattagccaggcgtggtggcaggcgcctgtaatcacagctacttgggaggctgaggcaggagaatcacttgaacccaggaggcggaggttgcagtgagccaagattgtgccattgcactccagcctgggcaaaaagagcgaaactccatctcaaaaaaaaaaaaaattatttgaccagaatattgttttaacatgtaatcaatatgaaaactatgagatcttgcacattcatggtgaactctgaaatctggggctccaatcgccccacatggtagggttagaagggaggggtggaggctgtcagtgggataccccttgtgtgtggggcggtgctttctcagcctgtgataagaggtgagggcggcacagtcctgtgtcccgccccagggcaggcgccacgtcgtttcctctcctcctggtccatggaggagttgaggggttagtgtgtggggcaagctacctcctcacaccgtcctttagcacaagcaaatgcagtgagctcagccgctgctcattcttgtcagtgggcatgagccagcacctggctgggtgtggattcattcagtttggtcaccaagtcgtgactttatctgggggtcacagtgtgagccactgctgtccagcagcgggaagagcctggcagaacccttggggaggtaccggggcctccttcgatgctggcccgggtgattgaccctgggtgatttgggccttgttagaacttaaccccctactgatgcaaagttgcttaaaatcagttggaatgacttaattataacattttcctgtaaaaagagggcttgaggataagaagagaaagccaccttccccgaggctgcggggaaaagctttcttggaaaagccacggtggctccgcattttgccacagcagcagggagggaaggggatgtgagcccaggggccagtgcctgggaaaggccacggcactttcagagctttgtactggaggtctgaactgctgttcatatcatctgagtttacactttcataagcagtagagaaagacaaggacttaggaggattctgtctggaacctcagggtcttccacaggaggactgggctctgtccttatccacgggcaccaggtgccaacaggggacatggtcatcacatgctgctgagccacaaacccaccgaggaggagccgaatgtggcatgtggggctgggtacgaagatacgtcctaagaactttctagaaagaacatcaagtttctgcccaaaggtggggagatgaggcaggagccacagcgtctgatgttggggtttatatgagttcaatttaaaagtttaggtttctttcatagatatgtgggcatttttctacatgagcacacaaatacttgcttaaaaaccaattttccccctcctcctccttctccttctccttcttcttcttttcttcttttgaaacagggtctcactctgtcgcccaggctggagtgcagtggcgcagtctcagctcactgcagcatcaacctgcctgggctcaagtgatcctcccacctcagcctccctagtggctgggactacaggtgtgcattattacatccagctaatttttgtttttttttatagagatgaggtctcactgtgttgtacaggctggtctcgagctcctggactcaaacaatcctcccgccttggccgtccaaaattctgggattacaggtgtgagccaccatgcctggcctgaaacaggattctgactgacatctgtccttgtactaacagccttcagcttctaacaacactagttgaagacacgttattatttttgagagagatctctgcatgggttctggttctttccgtgtacttgcactctggctgcccctgagctttttctagattggaagggctgcacctacggacatggtgggctgtatgtgaccatgcacacatcatgattttagagtaaaaacattaccttttgctgttcagagtgaggagctcttggagacccatgggtaggatgaagcccatcttggtggatcaggcagtcagggccaaggtcaggactggctggggtgaggcagcaaaggcagagccaggggctgggagagatggggggcagtgctgaggagagaggacacagggaggcagggcttggggcatgacagggagggcctgggcaggaatccctgtgcgttcccctactttttgggttttgaaagtggagaggcgtggcatgtgctctgtgctgctgttttatcatatactaaaaccgtgtggtatgctgctcacatcatctctagcttttagaatgagctgaacacatcagtgcatttgaggggctccgtggggaacggagattctgccagggcatacgagtgcatgtttgccactgcatgggttctagagcccctgcttgaaggtttgagacaattaagaatggatcgatgtgttctcaggttcacacaggcagaagaccaagatgttgacagtgtttcagctccaggaaacactgtttttcttttacatttttcagaacttccatacttaaaattatttttttgagacagggtctcacactgttgcccaggctggagtgcagtggcagtggcgtgatcatggctcaatgttgccttaacctctggggctcaagcagtcttcccacttcagcctcccgagtagctgggactacaggtgcatgccaccacagtcagctaatttttaaattttttgtagagatgtaggtctcactatgttgcccaggctggtcttgaactcctgggcttgagcaattctcccacctcagcctctcaaggtgctgggattacaggcacgagccacagcacccagctcatactttttataataaaaaattatttaaaagtcattttgtatttcacaggccctatcagacatggtcactctctaagaaggtctgagcatagctgaagtggatcatctcattcaactttgggtgactggtgaatgctgtctgtctgccactgcattcttgagccttctgtccctgtggtgggggtggctgtgggggtagaggctggctcaggcatagggtaagggtaccccgagtgtctgcccagagacgtggtggtcttctggtgggcatgcggtggttttgccctccctagtcatccaaggttggctggcagagaggctgggggtgctaggagggcccctgggtagggactgggtccaggctgcagtgagtcagccacggggagaggcctcggggaggctaggtcttaggggtgtgcagcatccttggtccagggaggcagttggctctgccatcatgagccccaaccctcggagtttaactgacacaatcagcgaagccctggagtgcctgcccctgcctctgcggagggagtgacagccagtgcccacccgtgcccagccgcaggccctccctcatcaggtcccttcccagaatccaggccctgttcagaaccccagcacccctgcctgcccgcacctctgtgtacccctcccacatcatggggtgatagggcatggtgccgtgctggaggggctaggaggcctcgatgatggtgacgtccaggcagagacccgaatcaggggtgagtcaggtgttgggtgaaccttgaggccaaagacccagcactggaacctgctgggcatgctgaggactagaaggaggatggcgggagcggtggtggcaggaggcggcgatggaagggctggggaggcagcgtagggctgtgaagacacgcctctgtgttcctgtgagggtggtgggaccattcctaccccctcacgagtccttctcggaaccagactcagccccgccaccatccttctaggatggaaacctctggttctctggaaggtcctttgggtcctgttggtcacgggaataggtaacagcaaacaaaacatttgccctcctccccgctccccagttctgacagatgtccacatgggccatgtgcaccagaaccggccacacgctgcacgcccctccaggcttccactgggctgacctgaggctcgtgcatggccttgcacccctgccagaccccagctccatcactgtcatagttggggtctgtgcctctaggctgctcctgtgtggctgtccagccctggatcctggggacacacggccatcagctcacggccctggagcccaaccttcatcctgttgccgccgaggccggcttctcacgctgggtggggggcgggctgccagctgtttgctgggttaggactgaacccgcagcgtggccttcccaggccagccttagtggccagactgtgtcttttccagtttggctttagcccttaaagacactgaagaggtttaattatttgcctgctgttgttgaagggagtctttctactcttttgttttctgttttttgtttgtttgtttgtctgttttttgccctgccgggagcccctgtgcctgagttacttttctgcagatactatcctggcttttcttgagcgaatacccgtttggctttttcctgccatacatcaagcctctggaacatcgtcaatatttttcctctcataatgcataaaaataaagtacaggctctcactggactattttgcaaataatttttatcctctgataaaatgacacattggtgagagcaggcgttcctttaggacagctatttttaaagaatgatggaatcgtcttaatcatctgttagtggcgggcacctttataagtcaaatgcttctaagttgtatttgcattatttgattatttcagcaataaccacagtacaaaagaagaatgtgccagggagcacgacgcgggcaaccacacaaatcagccccgccaggtgctggctgagtccatgtgtccaggtggctttgccctttcctgtggtcaccccatcccctgtctgcttgcttccccactcagcccccacgtgagctccccatcttctctccagctccaagtcgcccacctgcaacttctcctaaggagcggggcccgaaacctaacaactggtcaagaagaagagccagactcgggctgcgccccacatgctgcgtccacgttcaccccaggcctgggtcctcttccctgggggtcttcgtggtggacagtgggcaccgtgtcttctcagtggaagcacctggaatgctgcattacacaggaagatccgagacacacctgacccacatggacgtggcagggttgggtgcccatccctcctgagggcagtcagagaggcgcccagcatcacagtgtgggcaggaggggtggccggcgagggatgtggtgtgcaatctggtgccccagactggcccactgcaggtggtcccatggccttgccacgtccggggagccgagaggtgggggtggcagcaggcatgggagacacccctctcccggtacagtgatgcccaggatggtgggtgctccctctggccccatctctgcatctcactggtgggctctgggccctgggccggcaggattgggtccagggctacctctgtcctgccggtgtcccacctgcacgggtggaagatttgttgaaagagatctcccagaatgtggggtgatggctattcttagaggcactgggggcacttagggaatccttacccccaagtgtgagctggggtgtgggcccagggcaccccatccatgggctgggcagctcggccagctctgctgactccaggtgtgtccagggggctcaggccgagtgatggtcagggccgatccataggataaacgcactgacatggggtttctcagtgcccctgatgacacaggaccaggcaaatccccttctctccgctgtgggacatcaggtaatcgtggtgctgtgggagaggggcatcttcattccgtatggctgctgtgaccaagtcgcacacagtggggtgcttaaaacaacaaaaatcggccgggcgtgttggttcacacctgtaatcccagcacttcggaaggctaaggcgggcggatcacgagatcaggagatcaagaccatcctggccaacatggtgaaacccgtctctattaagagtacaaaaattagtcgagcttggtggtgcactcctgtaatcccacctgctcgggaggctgaggcaggagaattgcttgaacccaggaggtggaggttgcagtgagccgagatcacgccactgcactccagcctggtgacagagcgagactctgtctcaaaaaaaaaaaaaaaaaaagaaaagaaaaataaataaaataaaataaaaaaaaatcccttctttcaaagttctggagaccagaagtctgaggtcgtggtgtgggcagcactggtttcttttgggggctctgagggagggtcgctccttgccttctccagctcccggtgttgccggctgtccttggggtttcttacaggcccgtcacaccgatctccgccccatgttcacatggcattctcctctgtgtgcctttcaccttctctaaggccacctgtcactgggtttagggcccacccagagagtccaggatggtctcaggttgagattcttacctctctttcatctgcaacaaccgtttttccaaaaacagtcatattcacacattccagacatgcttcaaggggaccaccatttgacccactgtgggtgggtaggaaccgtgtctgaggtcccagagcaggctctgggggcaccttttccttacttgagggcctctctttatggaaaattaggtcctaatcacaacaaaggtgccacattgcccagtccacacttgcccatggctttggtggggtcctgtggctgtggcaggggggacccttgtctcaccagatggaacagcctggcctagattgctctgatgtgagaaagcagatctggtcagtccacagagtgcggcgttccacacccttgactcacagatgtcaccaggaggaaggatggcagggatgcccctctaagcaccacctgcccttagtgtatggtctccagagaagatgtgcagatggtcagccagcaatgaagggtgcccagcgtcatcagccattgggaaaatgagagtcaaaaccacagtgagcggccacttcacagccaccagggtggttagaactcaaaagtcagataataacaagtgttggcgaagacatagggaaatcagagccctgccacaccaactgctgctctatgattgttgaatggtgcagcctctttggaaagtagcctggcagttgctcaaaaagttaaacacagaagtgccatatggcccaagaatttcacttctagatatatacccagagagctgaaaacatatgtccccacaaaaacttgcttatagcagcactattcatagtagccaaaaggtgggagcagtgcaagtgttcatcgacagatgcctggataaacaaaatgtggtctgtccatccacacagtggcacacaggaagcaccgatttatgctgtaatgtggatgaaccttgaaaacactgctctgtgaaagtaacagacacaaaatgccccatttcgtatgattctatgcacaggaaatgtccagacatgcaaatccagagataaagtcgatgaaggggtgggggatgactgctaacaggtgtggtttcttccggaggtgatgaaaatgttctggaactagatcatgtgatggttgcacagctctgagaataccctaaaaactgctgaatcgcatactgtagaggcagggtctcacgctgtcacccaggctggagtgcagtggtatgatctcagctcactctaacttccacctcccgggctcaagcgatcttcccgcttcagcctcctgagtagctgagactacaggtgcagaccaccacacctggctaatcttttgtgtgtagatacagtgttttttttttttttttttttttttttgtagagatggggtgttgctttgttgcccaggctggccttgaactcctggcctcaagtgatcctcccacctcagcctcccaaagcaccaaagtgccatcgtgcctggcctttgaattgcacattttggtagaattttatggcatgtgagtcccatctcaataaaacagtttcagaaagcaatgattgctctcttttgggcagcagagcctgggcttgtctctgctggctggagccacctggacacagacctgccgtgactggcacgtaccaagtcgccctgggtaaggggagggcacctggcatgttgggtcagagtcaggggctccgtgattaaaggagcaaccaccctgggtgtcttaagtccgttaggtccttcaaggggagctggtccaggactgagcatcagtccacctgcctgggctggtgaggcctccttgagtatggcttccagtgtgcccaggagtgtgggatacccatggccccccaggcctgagccaacaaagcaaaggccagagcatcctgggccggctgttgcggccccactgcccactgtggggttctcttggcccacaaccttggacccctgtctgggtgtttgaattgctcctctgattaaaggaacaagcccagttcttgtgagctcttagcaaatcacctcaaatcatttttgaaggagagaaataattcataaataagcagcttaagtttccattttccacaagcaaatttccatgcatcctaggagttgaccggactgcgttcccccatccccaccaccctttcagagtttcttgagctgccctcagccaggcagagcctgaggctcagcccctgcaacggggggcttgagcgggggacaccccgggggcaccctgctagcacagtgggaatggaattgattgtcttcctagcaagtttgctatttaatagttttaaaattaaaatgcattttaaagaatctttaaacctgtggagttcaaaatgagatctctggcagtttaaatgcccagctgtcagatacaggctgattccatttggtcacgcagcacccttccctctggagcgctctcaccacccattctcctcctcggcagcgacagagaggctgtgcagttcgttcgtttctttatgatcccactgcagctaccgtggttaaattttctgcagtcggtgttcttggcacatcatttgtataggcagtacttgacagaatttgatttgaaaattcattttccctttgaaaacgctttgctagatttgcaattatctcccagctttgcgtctggcttggcttgcagaacaaatgccacggtcaaggccagcattatcacctggggtttgcgtggcgccgtgcccagctgtttctcctgtaaggaggatgtctttgcatgataggggatgcctcatcctcagggggccaacccagcctcttcctagagccagggtccggcttctggggagcatctccttctgtgggtgggagggggtctgtttccacatcagagactacactgaggtgataaaggggccctttgccatgccccaaggggcagaggcctctagctgcgtggaactctaccctctgccattggagggttttctctggggccactgaacactccactgagctgagtagacgatggctgtggggaaggctgccagctcttccacccttcacctgcccctccgagctggctgtggcttctgctgcaagtgagaacaacttggccgggagacgggtgctgcttggtgagacagcaggtgcagggaactgatttgttggggtgtctaaaccagtcccccaatctaaagcttcccagggcactgatttaccagaccatctgggaaactgcagaggcctgggcttgcttctgagggaggcccacgtgcagctttgcataagcaggttcttatgaaacatgagcactggtaacagctgtaaaagcattttaaataaaaatttagtgaggttaaaaattccatctcagaatgtacacgtgaatgtttttggtgcgtgtagagttcacgcctatgttttttgctggaataactgggtgctgtaattctgtgtcgcactccccccggaagtctctttgagaggtggcctcctggggacatccacattcagcctcagggtccttccttcactggctgcgctgggggagctgcgctgggccacctgagttcacagtgaggccggctgtatcttgccctggcttcctacgagcaggtcacatgggtcagccttcaccttgcccttagggggcaggggccgtgctctgccacctccacccctcctgtaggtagaggggagcccccagtccccagtgtctgaacctcagggcctggaaaacaaacatgcgtgcttgtgtgctcccttttccttcagaatttattctgcaggtggtccagttggggccttctggtatcaggggtgactctcagagcttgaaaacccaaagtccagctgagggcgagctggagggcctgggagacgtcctccccgtgtagcccagctccaggcacagaacccaggcccagccagtgctggccgtcttccagcatgagtggggcgagctgttccacccaggccggagcgggagcctttgcccccaggttgggccagggctcagggctcccaccaaagggtgggagatttgggagtggacctgaagaagggacaggagagagtctgtgggccagggaggcagggccgggggcatttctgcaggtgggaaggtgggcctgggtgactggcgcagaccctggggaggctggcgttgttgttacccttattaccctgcgtgcactgagaggcccctgctgcgtgcaggtagttgggggggacacgccctttgtgagtgcacgtgcgggcccagaggcagcgctccaggctcgagtgacaggcgccgcgcggcccctcctcacgcccttgtcccctgctgtcccggttgctgcctgtggcctccgcgcactgcgctctcgaaccccgcgtggcccacccggggagatgtggagaccctgacccctgccgcccgcgcctcccctgccccctccccgtccccccgccgcattcagggacacctggcccctctctccccacgctgcccgctgcccactgcctgcggggtggcccagctccactgctcgcccttcagcctggaccgcccccctccacctccctcccccacttccgcgtgcggggcctgacgcctagggagtgacccccgcgtgcgcccgggacaccccggctctgtggctgaggctgcgccgcccctgctgggccccgcccccgcctccactgtccctccgcgccgcctcttccggggtccacggtactctcgcgactttgccgcggcgacgtgggggttttatcgcggtatcgcggaacacagcccccgccattcccagtcacccgctcggaggccgtgggcgccttgacgagggcgcggcggcgggaatgcacaacgttatgctcatcacctgcgtccaccactgtcacccctgacggcgagacgcgaggtgctaagggcttgtccaggctaagcgggttctctgcgtccttaagcccactttgcagatgctaatcagaggggacaggcggccaagaacctggagcccacccgggcgtctgtgcccagtgccgaccctctaaattcccttcccacgtggctcctgtcgcgtctgggctgtggaggattcctctaaacaggcacagccaccctctgggtaaagtacttattgatgtgaattgaacgtaaagctgccagcctttcctggcagtttgctttgaagggcttggagaggtggggggctgtgcccttggggcgggcagggcgttcagtggcctggctggccccacaacacctgtggttccaggtcaggctggaggactgtgtggggctggctgtccacccacaggcacctgcagggggtaggtgggactgggggctcagcaccgagccctggtctgcagccaggccgggtgggcagagttgatgtgcaggctgtcccaggtgccacaccaggcaacaccttcccagctggcgtcaggcaccctgtgccccactgggccagaaggccacagtgagcctggagctgtgacctgaggcctggggaggccttcccttcacagggcacagcgcctgccctggggctgtggcaccaacatcggtggtggctttgtgctgttttcacccttattacctagcaggagcaagcagggaaaccgggtcacaggataagtcttccaccgtcaggcagggtgagtggctttgaaatgcaggcctcattgcttattggaagtgggatcttgggtggatttgtgaacctctctgagccttggttcttccctctgtaaattggggaacagccccttacctcctctggggtggtggggacttcaaagcagattcgctaattaccagtcccaagagaagactcctacttcgtggagaacagcaaagatcgtcatagccaaataccaggaacttctgcctgtgggcactgcatcctgggctactgtttagtcctccatgcgctggtgacctacatgctcacatacaagttacgcaacacaggttgattacttacagataggaagcaagggacagagccagtccccagtgtcgggaaggctgcccagggcagatggattgctgactgcacatgcttctctttgcaccagggctaaagggccctgcaagcagccgcccaggttagagccctcagggaccacgtgacccccagggcaaagctttgaaggacaccctgcttccagggagaaagaagcaaagcccaggcggttcctccctaactcaagctgttacagtccctgggagggtcaaggacaagttccaggctgttctgggcagtccctccctatctctggatgccgcgtcctcagcacgttctaccagcaagcaagaaagctgggagtgctgggttgatcccaggccccctggagaacattcctgcagggattatctgagctatgccactcccacaggtgacctgagctgggtgacatatatgccactctcacaggtgaccggtcaacggtcatatgagggattaaactgtgtccagcccccacccaccaagccctagaactgccagggtcttctgagtctcggaggaagtagccagcagtctcagcagttccctggtcaggctgtgctggggacactcaccatgtaatggggttgaggggaccacggggatggtgatgagcccagggcttggtgccacgtgtgggcccgaaggccacagggagggccagtaccgagtcctgagagagagcaggggtgggtggggtccgcaggaggccaaggcaggaagtgagcaggaccgtcccatcctcactccctgccaggcctcctgctgacccagcgtgcccactgcagctccctgaccccagaggagggcagagaaaggggacagatggatggggagggagacagtagcaacaatagtaacattggggtgggtgtggcagcacggctgtgcctgggaccacaggagtgtgtgcctgtctggggccccagatctgctgccggtggctggtggtgctgccaggtcagtgggcccccagcctggcagcccctggggtgtctgctgtggatgaggcctgccttggggacatgggtcatggctgcccatggacgtctggcctcagtgcggacaggaggggttgggcatgtgcaggaggggctgggcctgtgattggcagcagtgaacaattctagccccagtggtggaggggtggaggggcttgctcggccattagttggtcatggtgagggctgaggaacagctgctgtgggggtcacagctgtggggccgcatttgtgtgtcccaggcagaggctcttccctggcttctttgcgatgctcttggattcctggtgctggagcgagaagtcccaggctttaatggaaagctggccctggagaggcccaggcggtgcctcagacacctggtcctcacccctgcatgctccagcctctgtccagctgaagtctgcatgtgaccactgtctcctggagatctgctgatatctaggaggcaaacacacctgggtctccacggctgagtgtgggggctgtaggggtagggagctggctgcctggggtggtctgtcttgggaactggagcttagagcccagcttatgtcctgggttcagctgtgtggggagggaggcagtaggagctggactgggcttccgtcccttgttggggcccatggggcggggctggtcctctctggcctggctgtgctgcctgtcctcccatctgtcccgccacctgcctgctcccatcctccctgccgcagctcggccaagactgtgatgctgctgccctggagtgacaaggtgtctctttaaggtccccacctgcaggatttatgtcatatttggcaaacaagagtgtgaaagggatccagtcctgggcccttacccccttaccgcacatagatgccagagagtcctagtgacacctgggctgagatctggcgccttggcatccagcgatgtggtcttggccatgagttaccttcaggagtgtcagtctccttgtctgggtggaaggcgtggtgtgatgggctgtgcttccgtgccctgtgcagggcttggagccccagccctcctgggcctcaaggtggctggggcctgccccagtgggtggggtagtgcgtgtaaactctgagcccggtggccagccctcgtaactgctgggaaacactgcagggtcatcacacgtgggtcagacgggctgagctcacacgtgcgcaccgcgtctctctccctgcacgtgcctccaacccgcacctcccacctgcagccacagctcacattagggaccaggggctcgaatgaattaacagtttaatcagctttacaaaattagcccagagtcagtccatccttgtatttttgaaccgagagctgctttgttcgtgcatattttctcctgctttttttgaggatgtccgttcagtagtcatctgaccccgtgaacgaaatgccttctttacgggtttgactccttttaacagtgaacactttcactgtttatctttgagaaaatttatctttgagaaaatattgatgtagtgtgattttaaaagagcttcctactaggttctaatttattcttttacaatttttatttcaaaaattttaacaagtgagtacttcctatttatatcaattgattccctttattgtggacattgtatttaaggacatttaaaaactgaatttaaaatgaaattgtaaaatgtcgttgaataaagctggtggattcaaatcaaagggagatgctttgtcagtgatggaacattaaccgcccctccccatttatctgtcgggcccgcaggctcacttgagggtgagccccgtcgtgctggacagatttaacactaagtgatgagtaggttgagattataattgtttgctttatactctgcatacttagaaatggaaatttagtaccccaaattttcttctggattctgttaatcaggatagactgaattttgtaagctgtgttcattcatttcctgggacccctgcctgaaggtgtctgctcacagtgaggggtctgggtgggatgactgacacaatgaataaagacccctcctgctcccgccccaggcactgctgggaccatgtgggaaacttggcctcttcctctgaaatactggtcctgaatggccgggacgctagctcaggggctaactcagcttttcaaatagcacggggtttctgtgtgtgcgtgcgtgcctgtgtgtgtgtgtgtgtgtgtgtgtgtgtgtgtgtgtgtgtgattacagctctctttttgcagatggtcaacacctttgtaggtctggttttaaggtctttaatttactgaaatcaaggtacagcggcagggtatttgcttgtgggcactgatgccaagtcagcagtgtgactgtggtgcccgtcatggcatggtgtggggcggggtgtggtgagtgttgttcctcgtggtcgtgaagacactcggagcttccctgttctcgggggcaatggctttggacacgctgttcaggatgcccctttcccacgcgcaggcaattataccgtcagagcccatggcccctagacatcatggaggcctcctcaaatcacagagaaccacaaatggcctcgcaggttgttgtagacgccgtgcgcttgtccggggtgggtaaaggctccgaggctcaggtccagggcccgagggggctgtccttccaggtggatgggggtccccagggtctttcagggaagcttgagcccaccccaagagcagcttcctcagagttgtacaggcccacagatttgaggttttaccttggaggagggttacctggcagggtttgctaagtggatgtcagggctcccaggccctcctgcatggcactgcagcatggaggggtctggccaagggttggctccccagcctgcttctgggccttccacacaggtcaggcggccgcaacaaaggactccagactcggtagccggaacggtaggaatgtattttctctcagtcctggaggccaaaagtcccagactactgcgtggcagggctgggtccctctgaggctgggtctctccttggcttgcagacaccgcctttggccattgtccccacaaagtcggccctctacctgcctgtgtccatatttcctcttcttataaggacaccaggtatattggattagggcccgccctgatgacctcatttaaccttaatgacctctttaaatatcctatctctgggctgggctagatggcttatgcctgtaatcccagtactttaggaggcagaggcagatgaatcgcttgagcccaggagttccagaccagcccgggcaacatggcaagaccccgtctctacaaaaaatacaaaaattggctggccttggctgggcacggtggctcacccctgtaatcccagaactttgggaggctaagtcaggcagatcatgaagtcaggtgatcgagaccatcctggctgacacgatgaaaccccatctctactaaaaatacaaaaaaaaaaaaattagccgggcctggtggtgggcgcctgtagtcccagctacttgggaggctgaggcaggagaatggtgtgaacccgggaggctgagcttgcagtgagctgagattgcaccactgcactccagcctgggcgacagagcgagactctgtctcaaaaaaaaaaaaaaaaagaaaaaattggctggccatagtggcacccacctgtcttcctagctactcaggaggctgaggtgggaggatcacttgaacccaggaggcggaggttgcagtgagctgtgatcacaccgctgcactctagcctgggggatagagcaagaccctgtctcaaaaaaaaaagtgggggagatactgtttccaaacacagtcacattctgacattctgagtcctgggggttaggacttcaatgtttgaatttggggggtgtggtcacagtttagcccatgataaggtcacacagcaaatctgcctcatccaaccccaccaggcccaccccaccagtgagcaggcctggcagggcagtctgtgctcagtaacacctcagctccatgggagaccattcagaggcttcagctgccccaagaggaaggcagggagccctgaggcacacaggctgccttctgcaggtgggagtcggcttccctgcagggcaccaagcatccccgctaactggaggcagggccaggaggggtcaagtatcaggcccgtccctgaagggttccctacctcccatgccttttattttggtgatgagcgcccgtttctagcatttaccctgccaagtagacaggcatgtcacccctgtgggagctcatcttgacacttgctgcactggtctcacatgcacacacgcatgcacatccatgcctgcacatatattcacatgcacacagatacatggacgcacatgcatgtacacacttatgcacaacgcacagattcacacgcacacagccatggacaggtgcatgtgtgtacatgtacatacttgcacacacacggcggtggttcttggcctctccagagcacaggagaggaagtgtgtgagtgagccgaggggacatgcaagtactccattctttgctcagaggctcagtcccctctttggtccggggctttgtgtgatgactggggctttgtgtgccagcaccacgctgccatcagcctttcatgcacctgcgttgtggctgagccgtctcctccgcttaccaagcagcgaggggcccgtgttgacctggcgttgctgggaactccttgcactagtgttgtgaggtttttggtgccagggcagagaatgattctgggttcctttctgggggtctctgcgtggcccctgctcgtgtcctctttctcagagccgagatttagcttccaggaggtgttgtcatccagtgccctaaattcagtacctggcctgtttgctgggccagatggtgtctcgtcagcgagctgcagtcagggctgcgggacacacgtggagagggactgtgagggctccgggccacctcagtcacagccaggtgtctgctgtgggaccatccacaccaggcccctgcttctcccaccctcccatacctactgctctgaaggggagcgggcaggtttggggccataagggagctggtggctctgctgacctggactaatgcctgaggtgggtgtcaggcccagcgggtctcatgcaggccttgggcaggctgcgagctcagccccaccccgaaaaggggccatgctccctcctggttcaggaagtggcaggaaggctcctctgccctctggtaggaaggtgctgttcttggctcttcccctcttccttgggagcgaggaggggcattggcaggtcccgggcccaggtgagcaagctggtggccaccccagaagctgggtcagaattctaggggaggggaagctggcggtcaccccataagcaaggtcagaattctggggactgcgctgggtgcggtggctcacgcctgtaatcccagcactttgggaggccgaggcggatggatcatttgaggtcaggagctcgagaccagcccaggcaacacagtgaaaccctgtctctactaaaaatacaaaaattagctggatgtggtggtgggattacacctgtaatcccagctacttgggaggctgagatgggatgattgcttgagcctgggaggtggaggttgcagtgagctgagatcacaccagcctgggcagcagagtgtactccagcctggacagcagagtgagactccgtctcaaaaaaaatgacctttgcatctgaagcaaaggtcaagggcccagttgctcatctgtaagttgacagctacaaggcttcgaaagtgcagcactccccggggctcgggccttggggaagggccaggaggggccttttgggcctcactttccccgcctcccctcctctccttccacgcagtagagcaggaacaaggttaagagtgtctcctgcctcccaaccccactcttcttcccatttcatcacggaggggtcgctgggcgactgcgaccttgtggctctccggggttgcctgggcccatggagggaatgtgtttacttccagaaaggcacaaggtgcagggacacagcagtggtgctgagagggtgggagcagatggcagccagtgcccaccgtccatctctgtgtctctggcatctgtgagcacaccaacggccgggggggcaggcacaccaactgccgggggggcggggtctgggtctgtcttgctctgggctgtgtcccaggtccagatcggctcctagcagagtggttgctcaggcagcatctgccggagagcgagtgggtgcagaggctccgtcagcctcctgtgaacagtcccagggaaggcttcccattggctgcccaggtctcaggtgcatgcagccgtcgctggagcccaggcaggggggcagtggatggcctcgtgtgggtctgctcagcctcactggggtttgctctccccaccccaggggtctgggccagtgtcttgagctgatccagagagtgaggactggagggccaggaaagagtcaggacaaagtgaccctggccaaggccacacagaggggaggggtggcaggccagagcacacggaggaaacggccccgacggagatgggagtctgtggggaacacggccagcgcattcgaactgtgcgcgatttggtatattctcctctcctctgtctttctctctgtgattataaagagtcctttttataaaaataggttcaggccaggcacagtgactcacttctataatctccgcaactttgggaggccaaggtgggaggatggcttcaggccaggagttcaagaccaggctgggcaacacagggagaccccatctctagaaaaaatttaaaattagctgaatatagtgatgtgtgcctatagtctcagctacttgggaggctgaggcaggaggatctcttgagcccaggaggcggaggttgcagtgagccatgctcatgccactgtactccagcctgggcaacagagtgagaccctgtctcaaaaaatacgtatataggctgggcacagtggctcaggcctgtaatcccagcactttggaaggctgaggcgggtggatcacgaggtcaggagtttgagagcagcctggccaacatagtaaaaccccatctctacagaaaatacaaaaattggccgggcgtggtgatggatgcctataatcccagctattcgggaggctgaggcaggagaatcgcttgaacccaggaggcagaggttgcagtcaactaagatcacgccactgcactccagcctgggcgacagagtgagactctgtctcaaaaaaaaaaaaaaaaagaagaatcattttatatatatatatatatatatatatatatatatatatatatatatatatatatatatatatatattttcaaggacttcatcacttttgtaaggggcttctttgaatcctcgaaactctgatccaggggaacaagctgtttgcatcctggggcagtgggaacctcacgtgccaagggacggtggccgtgctgtgtgcgtagagcaccaaggaggccaggcggggttggggcgtgtggtggttgcagttgaagaccagcttctgagcccctgcgtgtttggtgggaggggaacctctgagcgtagagtttcctgccacagtgcactggtgtggaaactgagatgctgtgaagtttctagagaagtggggggtgtgtggcaaattgtttctgaatcatgggaaatggtttatgatgcactgtcaatcattcttcacttaagtgtagtaaattttattgttattctgggccacttcatattttggttttgtgaataaaaaaatatttcctggccgggcacagtggctcatgtttgtaatcccagcactttgggaggctgaggcgcgtggatcacctgaggtcaggagttcgagactagcctggccaatatggcgaaaccccgtctctactaaaaatacaaaaattatccaggcatgacagcgggcacctataatcccagttactggggaggctgagacagtagaatcgcttgaacccaggaggcggaggttgcagtgagttgggatcgtgccattgcactccagcctgtgcaacaagagtgaaactccatctcaaaaaaaaaaaaaaaaaaaaaatttcctgagagctgcttttgtcgcctggagcgccggggaccccactcttcccagagccccttttctgtgggctctccaccagagggagcgtgaggaccttgtgtctggggtgcagcaaaggatctggattccccacagtcctggggtgaaatgcaggggccctggggacccttgaatcaggggttgagctggcagcctgagcctcagctttagttgtttccctctagatcctggtgtggaaagctgataaaagagccggctgctgctcagggtggaaggtcccaggctgagcccacacatggcctggggacaaggcaaccaaccgaggcatcccctccagttccccacccactcatggccctggcccctctctcctgcagaggtcggatccgcagctgcttgcccggttctactatgccgacgaggagctgaaccaggtggccgcggagctggacagcctggatgggcggaaggacccccagcggtgcacgctgctggtcagccagttccgctcctgtcaggtgagccacggggcagcagaagctggctggccccgctgggcattggacagagtggcctgtcctcagtagaccaaggctttgtcacctgctggccccctgtggtggcgttgtcagggtcgggtgctagagaagccaggcccaggaagagggaccatcccgggcaggatgcgtggggtgggtagccgggctggaagtgagaaaccgcacgggacacttgggggagcagaggctgggagagcgggggcagggggtgcggagtgagcaggcttctgagccaaggggcagccagtgtgggaggggtgggcctgcccaggtgctggtgcagagcttgggtaccatgcagtggtcacactctgccactgactaatggtgctgccagcatctgctgcataattgacagatggccctggaagctgccgctaaaaataccctggccgaggttttcttcccagtacaccaagcactcagaggcatttccaacacaacggcaaacggcatgctgcaaagttttatcaagtgatgacgaggggttttcacaaagttccggaatgttcttggtgtactcttcccacagggtcttgctgaatccttgcggccatgggaggtggggcctgacacatgctcctccaacaggggggagtctatcactgtgtcaccgtggtcctgagggtcccaccctgtggggctcctgcaaagtggccaagctggctgcaccccagccctggctctgggcctggccctgctgcggtgggaactcagcagcattagggccctgtgtgtggccaggacaacttttctggccggatcaggctctgggctcttttttgggctgttcagtggcagcctccaccttccatgtgttcagatgttcccacagatgttctggcccctccagggacagcctctgtgggtggggagagtccctgcccccaggagctcaggttagaaagaccttctgcccaggggacaggtgctgggggccctggagcctggaggaggaaagtgccacggaggagaggtgctagacctgccccgtggccccaccgatgaggaagggggatcagatgctattcctcatggcaacctttggggaggggctctgttccctttacatgctctgtgacctgtgtgcttttttgttgactgacagagttgatgataaagcctggttttaagtgagtttgagaggtgggggctgccaagctaggtggccccttctcaggcttcccgctgccacaggctttaattgggatgtatcaccgtgagaactgccctgtgagaaggatctggagggggatgctcccagcatagtgaaggccttaaacactcaggttcttctccttgctgctggggtctttgaaggaactgagagggtgtggacactgtccaggtccctcagcatcatctgattcgggctcacttctgtccactccgctccagggccctgcctctggctcatctcgtatcccactggctcctttgtgacccttcttccctcttccacgcctccccctcttcctccctcctcctatctccccttcctcccccagcctcctccatgtgggtcccacgcccagtccttggcctcttcctgtccaccccccgacatggcggcctcatcctgctccatgtctgtgctgagcacccccaggggaggctctcagcttctcctccccgcagatccaggtgtgctccccggtgttcctcccagctccctgagggcatctcacagggcccaccttacgcccagcacagctggacattgaacaacatggtttgaactgcacaggtccatttatacatgcattgtttcaacctaacttggatctaaaatacagtattctcaggacacaaaacccacatatatggagggctgtgcaagttccgctggtccagccgtgggacttgagtatgtgcagatatgatatacgctgggggtcctggaacctgtcccctgcgtgtactgagggataattgtatttcatgtctttttatgacattataagtggtattgctattacatgtcaatttttaaaaataagccagaaccataaacgaagtgtttccctgagttctgcgagccactctacaaattaatccaaccccagaagggggccatgggagccccagtttacagccagctggacagaagcacagaccatgcctggacttgggatcagcatctgaaggggcgccgtcttgtgggactgagccctcaccctgtggggtctcactctctcgcccaggctggagtgcagtcatacgatctcggctcactgcaacctccacctcccaggttcaagcgattctcctgccttagcctcctgagtagctgggattacaggcatgcgccaccatgccctgctaatttttgtatttttagtagagacggggtttcaccatgttggccaggctggtctcaaactcctgaactcaagtgatccacctgccctggcctcccaaagttctgggattacgggcatgagtcaccgtgcctggccctaaatgtcaatttttgattgtttggtgctcctatatggaaatactattgacttttgtatatagatcttgtatcctaatacctttctgtgggaatctaggtaatggtttttcctactttctactctctactctcacacagtcactcaacactccatgaccagatgagtagggtattccccacacaccgagtcattccccagcaggttctgcaggggacagcagtgggggtcctctattcaacctcatcttgacactgtccacccggagtgacctcagaacccacagggtgagggctcagtcccacaagacggccccccattcagatgccaatcccaagtccaggtgtggtctgtgcttctgtccagctggctataaatcggggctcccatgacccccttctgggttggataaatttgtagagtggctcacagaactcagggaaacacttcgtttatggttctggcttatgaataaagaatgtagtaacaggtacagatgaacagcctgatgaagaggtgcacaggctaaggtcgggaagggtcccaagggcaggagcttctgtcccgtggagttggggtgtgcccttctcctggcaggcggatgtgttcgccagcccaaaggaagctttctgaaccagtccttttgggtgtttttggaagcttcattatagagccatgattgattatatatcattggctgttggtgagaacacttcccaattcttcagtgcctctcccctccccggaggttgggggtgggggctgaaagtcccaaccctctaacatgcgttgatcttcccagggaccagccccccatcctgaagctgtctagggccccccagccaccagtgaactcctatcactctggagagtccaaggctttttaggagctgtatgtcaggaaatgggaagatgaccaaacgtatattttacaatatcatactttctttctttctttttttttttttgagacggagtctcgctctgtcgcccaggctggagtgcagtggcgcgatctcggctcagtccaagttccgcctcccaggttcacaccattctcctgcctcagcctcccgagtagctgggactacaggcgcccgccacctcgcccggctaattttttgtatttttagtagagatggggtttcaccatgttagccaggatggtctcgatctcctgacctcgtgatccacctgcctcggcctcccaaagtgctgggattacaggcgtgagccactgcgcccggcctacaatatcatactttctaaatacacttattatttctggcagctttttgtagattctgttaaattttttgccaataaagataatcttcacttcttccttttctctctggatgccgagtgtgtgtgtgtgtgtgtgtgtgtgtgtgtgtgtctgtgtgtcaccctattgaactagctagaattccagtacaaagttgaatagaagtggtgagagcagacatcttttgttaatgatggaactctgaatgctttctccccaaagataagcgtgatgttagctgtaggattttcgtagctaccctttgtcaggccaaggcagttgccacctactcatagcttgctgagagttcttattaggaatagatgttagattttttttttcagatgctttttttgtgtgtcaacggagattatcatgttatttttattatggtaaattacattgatggttttttttactcgataaatactgactttttattagtatccactccatcactcaacagcaatagcagcatgcagatgccatgagggcagggctgtgtgtacacacaacactcaccagtacatcccagtgcctagtacacagtaggcactcagttatatcattgaaacagggaacgcttggctgattcatttacattttaatttattttattttttttattattatactttaagttttagggtacatgtgcacaatgtgcaggttagttacatatgtatacatgtcccatgctggtgcgctgcacccactaactcatcatctagcattaggtatatctcccaattctatccctcccccctccccccaccccacaacagtccccagagtgtgatgttccccttcctgtgtccatatgttctcattgttcaattcccacctatgagtgagaatatgcggtgtttgcatattttctttttgaatagtgtgacttactctttttggcatatgatagctatggtatcacataaacaattgtaaactgtgtcgagctgccaaaagtttgaatctcatgccagtatatacattcagccttctcaccatagctatttgagagttataattatctatagcactgaaagagactttgggctcatctggtccgattctcttatttcatgaattagaacactaaatccactcagactgggtgactcgtctgtcagaacatgcaataaacagaaaacaaggggttgtttgcctgatgccatagcatccaaaggtcagggtagctggaactcttggtgtcttcttgtcttacaaaatgatggaagacgcatcattttagttctctggtagaaagaggatcagagaaccagctgggaatcacaaatatgctacaaagataaaagacagaatttggccctaaataaaaatagattcttaaaaatagagaagagatcagatatgttgctaagaaaatgcagatgttagaccatatccatggttcacagtccttgtgaaagcttaaaaaatatagatgccaggacccaatcccagagattctgccttatttggtccaggaagagcataagcatacattgattgatttttgaatgttaaaaaaaattactcctgcattcctgggataaatcccactcgttcatggtacattatccttttacgcattattgaattcagtttcctaaaattttgttaggaatttttggatcaatattcattagggatatgggcccacagtctttgtctgattttggtgtcaagacagtgtcatagatgagttgtgaaggattctgtcctcttcagttttatggaagagtttgtgtagtgttagttcttcttaaatgtttggtagaattcactattaatctatctggaactggagttttctttgtaggaagatttttaactacaaatttaatttcttgaataaatatagggttttcacattatttcagaaatttcttcttgagagagatttggtagtttatgccttttaagaaatttcatctaagttgttgaatttattggcataagttgtttgtaatatttccttataatccttttaatatatgtaggatccaccgcgatgtcacctctctcgttcctgttattaagttgtatcttctgttttcattctgaactgtgttgatagagttttatcaattttactgatattctcaaaggaactattttagcttcattgattttctctattgctttaatcttttctctttcattaaatttctgctctgattgttgctattcctttcttctgtttgctttgggtttcatttactcttctctctctagtttctttttttatttttatgtagtagacttaaaaacagaacctttatagtttcttaatgtggcaactgaggttagagaatgaatgcctttcttcttttctaatttaggtatttagtggtttaaatttctctgtaattgctgctttagtggcattccataaattttgatatgttgtatttttactttcatttcattcacaatacttttgatttcctctttgatttcatgtttgattcgtgagtatttaaaagtgtgttatttagttttcaaatatttatggatttttctagagatctttctcttaatgatttctaatttaattccattgtggtcagaggatatactttgtgtgacttggattatttttacacgtattgaggcttgtttcatggcccagaatttggtctttcttggtatatgttccatatacaatcgggaatcatgtgcatctggctgtggttgggtggaatgttctgtaaatgtcaaccatatcaggttgttttagcagcattgctaagatttactatatccttgctgattttctgtttactttctatgtcttatcagtggagaaaggtactgaagtttctgaccataattgtggatttgtttatgtcgtcttacttcatgccgcttgaaggtctattgttaggttgataaatgttaacaattgttatgtgctcctaataaattgaaccctttattattataaaatgactttttttggtccttggcagtactctttgctctgaaacctacttcagtattcatgtagccactccagctttcttttgattggtgtgaacatgatacaacctttaaaaaaatccttttacttttagcttatttgtgtctttatgtgtaaagtgggtatcttgtaggcagcatatagttgggtctcattttattatgcaatctgaaaatctgtcttttatttggggtttttagatcatttttgtttaatatgtctttgatatagttagatttaagtatcattttgctatttgttttctgtttgtcccatcttttctttattcccattcctctttttttccttcttttttattaattggcttcagtaatttcctctcttaatttttatgtattctatttattttttatgcttctgctttgtctcctttgttggctcattagccagaaatctttgttttgttattttagtggttgctttagggtttataataattgtctttaattacagataccttcaaatgacattgtacaatttcacatagagtataaagaccttccaataattcacttccatttctcctactggaccttgtgctattgttgccatacattttacttttgtatgttacagactcacactatgttgttagggtatttttttcatttaaacggtcaattttttaaattaaaaatttagaaaattaaatagtaaaaaaggatcttgtatatttaccatgtagtcaccatttccagtggtctcttttcccttgtatagatctctatttccatctggtgtcattttctttttgcttgaaagaatttctttctttctttctttctttttttttttttgagatggagtctcgctcagtcacccaggctggagtgcagtggcgcgatctcggctcactgctagctctgcctcccgggttcacagcattctcctgcctcagccccccacgtagctgggactataggcgcccaccaccacgcccggctaattttttgtattttttttttttttttttagtagagacggggtttcaccgtattagccaggatggtctcgatctcctgaccttgtgatccacccgccctggcctcccaaagtgctgggattacaggcgtgagccaccgcccctggccaagaatttctttagcatttcttatagtgcaaatctactggtcatgaattctttcagcatttgtttgaatgaaaaattattctacctttgattttgaaagatatttttgctgggtacagaattctaggttgatattttttcccccttaatactttaaagatgttgtttcattctcttctcacttgtattatttcggatgaaaaatctaatgccatttttgtctttgttccttgtatgtaacacatcttttttctcgtgctactttaaagattttctctttttattggttttgaccaatttgattatgctgtaatttggtatagtttttaaaaacgtgtcttctgcttggggttcatttacttggttctatgagtttatatttattaaatttggaaaaattttggccattattcctccaaatatttttttctatctcattcctcctcgttttgggacttgaattacatccatatttgatctttgaagttgtccagcagttcattgatgatctattattatttctgaattgttgggatagtttcagttgctgtcttcaagtttactcttctttttttctgaaatattgaatctgaggttaatctcatgcagtatattttttcatctcagacactgtaattttcatctctaaatcagttagggacttttagtttcttcgttgtctctagttaactttttgaacacatgggaatcagttataacaaccgtcttaatgtccctgatcatctttgtcaagtctggcttgattttgattgattgcttttccttttagtcatgggtcatattttcttcattctttgcaagcttggtaatttttttttcttttttttgagatggagtctcactctgttgcccagtctggagtgcagtggtgtgatctcagctcactgcaagctctgtctcctgggttcatgccattctcctgcctcagcctcccaagtagctgggactacaggtgcccggctattttttttgtatttttagtagagacggggtttcactgtgttagccaggatggtctcaatctcctgacctcgtgatctacccacctcggcttccccaagtgctgggattacaggcgtgagccaccgcgcctggccgttttgttttgtttttgttttttgtttttgagacagagttttttttgctcatattgcccaggctggagtgcaatggcatgatctcagctcaccgcaatctccacctcccaggttcaagcgattctcctgcctcagcctcctgagtagttgggattataggcattcgccaccacacccggctaattgtgtatttttagtagagacggggtttctccatgttggcctggctggtctcgaactcccgacctcaggtgatccacccaccttggcctcacaaagtgctgggattacaggcgtgagccactgcacccagccaaacttggtaattttttaattgggtacctgacatagtgaatttcaccctgctgggggctatttttgtattactgtaaatatttttggttgttccgtgatgtagtttagttacttagaaacagtttattcctttgggtcttatttttaaggtgttaggcaggaccagagctgtgtttagtctagagttaactgctgttcacatggaggcagaacacttttgggtactctactcaatactttgtgaattgtgagtgctcctgctactctagcctcctggagagctcctgtcactgctccctcaaatcattcaggtgcgtctttcctgaacttaggtcatctccccacaggcatgtgttgatcagttctcggctgaacccttgaaaccttccccagatctccagagttctctctgtccagctctctcttctctgcctcctgctctctgaatcctaactgccttggttccatccgagttccctctcctgttccatgacttgaaactttcctcaaggcagtgagctggggtagtcatggggctcaccttgtttgtttcctgtctcttggggatcactgtcctttgtggcctgatgtccagtgtcatggaaatcactgttgttcttgggagtggggtaaactgggttcctattactccatcttggctggcgttagaagtcctagcaagtgtttcttgcagcatactgtgtgtgaggcactgttctaggcactggagactcatcgtgaataacagaagacccttccctcaggcagctatgttctagcagaccaggaaggctgggcaatgaatccaagcacggccatgaaaggctcctcagccttgggcaagctgtgccacctgggctgagcactaaaagctcctcagccttgggcaagctgtgccacctgggctgagcactacagccttagacaagctgtgccacctggctgagcctcagatcctggactcttcttcatcacagctggggcttactgtgcaccgcctgttgctgtgattgccattgtttgctcatttgtttgttgaatcatgagcaagggaccttcctacccagaaaaccttttaaaaagaagtgacagtagtcccacttattggttgaattttatttttattttttgtattataaaggcttaacatttttcttacagtgcagaatttccttcagagtttagtgcatgatttcttgcctgagaagggtcatgcttccccactcatagtgagttttcgtatctcttcctaagaaaaatgaaagtcaagcctcaggagggatggtcgagattaaaaattgccaaggtgagagtgtcaattagtgtgctctttctggaaagccatttggcagtatctcattagagcctggaaacgcagtttgcacttttgacattgtaattccatttctagcaatcagtgggtcctaaggaagtaatccacactcggagcatcgtgcaccacagtagtgagggcagcattgcgtggaggtggaggattaggcacatcgtcagtgtccagcagaagacaaaggagtgagttaacaggacggtccatatgctggaattgcatgtcactatccatcaaaaattgtatatgtgacagatgtaataacatgttgcagcagctacaacagcagaaggcagtattacgtacatggatcgtctcaacgttggctgaaaacaggccctcggaagatgagaattagaaggaactgtgtcccacctgcggtcatatttccccaaggacattttccccacttctctcctttcccattggttccagttttcctaggatgaacgtgtattgatttcatatttaacaaattaaagcaaaagttaaacttccagtgtttttgtaacctacagaatgaatagtcaatgtttaaagaataggacaaatttacagaaaaggatggaatgcaatttaagatgtaaaaaaatgggcttcttctccctcatatacacaaagtgttcaaaacactctgttatactttatattttgaacataaggaaataaagtaaaataattttaaagagtctttaaagtagaagctgcttccagggatgctggctcactctggtaatcccagccgctcgggaggctgaggctggaggatggctggagccctggagtttgaggctgtcgtaagctatgattgcgccacttcactccagcctgagtgacaaagccagaccctgcctctaaaaataaacaaaaagccagaagttgctgtgtattgaggcttacagaaggggacctggctgatcagagaggcgaagtgacctgtccctcgttgaacagccatgagggatggagtcagggtctccatgttgtgaaagcagcacccccttccagtgcagactgacttatgcgttgctgtaattgatctgctggttccagaggaggtgggaggggacgccaccctggatggaggagcaggccccagctgtgcctggccttgacgtaactgcactcttctgaccctaagacgtggtctgtgtccctgactctacagaggaatgcactgagcttcagggaagacgagggctttgcaggtccccagccgactgagagtccgtctgagcccatggctcctgcggttgctgctctttattgccctggctggagtgcgatggcaccatctcggctcactgcaacctctgcctccctggttcaagtgattctcctgcctcagcctccctaatagctgggattacaggtgtgcgctaccacgcccggctaatttttgtatttttagtagagatggggtttcgccatgttggccaggctggtctcaaactcctaacctcaggtaaaccacccgcctcggcctcccaaagtgctggcattataggcatgagccaccgtgcctagcctcctctatcactttaataatcctaaaaaacagtcacatgcaccgtgcgtgttttccagcagtacatggcggccgccagctggacacagcgattggcgcactttctcctgtcttctgtttcaggacaatgtgttgaacatcattaaccagatcatggatgagtgcatcccccaggaccgcgcccccagagatttctgcgtcaagttccctgaggagatccggcacgacaacctggccggccagctgtggttcggtgccgaggtagcgggtggccacccgggttcggaggtcctgatgtggggtggcgtctagccaagtccctgcgaaccttgtgcatgggcgcctgcaggtgccgggacctggtgtctcctccaagagctccgtccactctgggttacgtggtgtggtctgagcctggtaggccgtgcacccctggaggatctgggaaagccatgaactggtgcccccaaaactatacatacaaatgaaatttcccatgtggtttttatgaggttcacaggcccccagacagccaggacctaaaagtggtttttaatggcagtaatgcccacatcaggaacaagtgttcccctccggccctgcagcatgggcagcagcaggggctggggagccgtgctgcagccccacgcaggccacatgtggcaatagcctgtcatcttcatcttcatctcccaatcaggaaactgaggcaccgagaggaaggtgcccttcaaggtggcgggaacagtctcccccaggcccccaccatgcggactccccagcctcctccccttgccgtgctcccgagcctgacctcagccccgacaccgccaccctctctattgtgccgtccccatcctgcccgcctcccctttctaggaatccctggggtgcggagtcttcatcccacgctgccccgtccctgtgtccaccatgcccaccccaccttctgagccacctggttggggtgtcctctgccgaggcttgggttagttacaggggcccgcgggcaggttctccctcctccccagcctcagtttccacctccgtggagtgggtcctggggcagtcatgagatggagcgtgttctgtgcccggctggcctggcaggggcatgcatgcacaggggtgggcacagctccttgtgtggtcctggtgccccaagctctgtgcccacctgcagcttgggcctgggcgatcagcgccgtctcattctgtcacctgggaaatggcttcttgtcctgcatcacttgatcatccctgaggggacagcaggtggattggttctatcctaaacctggcgaggccccggcctctagacaagcctccctgtgacaacaggtctaccagggcctggactcagcccctgtgccagagggcagcttggtgaaattcccagttgctgagcgcacgctggggagctgcctcgcagcacccagggcagacatgggtggatttgtgggtgcggaggagccctccttacctgcccaggagcccagggactctcacactgatgagtctgcgttccggggaaggttgcgtttctctggcagtgagcaacttgacaggtggtgtctgtggctccctagataggctggggacctcgggcccggatcagcccggctgcttcatccctgggagcacagacctgattgtggagcctggaagctccaagctccttgaacttcatccctgtggcctggacggggagcggaaaagagtcacatgaccagggttcctcctgcagggagcccccagacccaagggcctcagtccaccttcccctcccctcccctcccctgccctcccctcccctgcccttacctgccctgccatgccctgccctccctgctcctggggccctgtgaggaccccgtgggtcacattgggggacatcggttatcgccctcacgattgctctgaatgtaagaaaaacctcctgcggggaccgggaacacgagctggcctgtgctgtggggtgagaagaggggccccgaggtgcgcagtcaggttccccgggtcggcgacccctgagagcctggccctcacccgggcccctccctgagtgtgtcccctcccgcagtgcctggccgccggctccatcatcatgaaccgggagctggagagcatggccatgcgcccgctggccaaggagctgacgcgcagcctggaggacgtgcggggcgccctccgtgaccaggcgctgcgggacctgaacacctacacagagaagatgagggaagcgctgaggcacttcgacgtcctgttcgcggagtttgagctcaggtactgcagctgtgggtccacagccctggctgtatgagctgggggacggttgtgccagcttccggggctcaccctgatacttcaagctggaaaattccacagagggaggagccaggcaggttcagggccgcctgtgggtggggttaagccctggagagcatagcgtggaggtgaggtggggcatctttccagggagtggggtgagcacagaggacacaggtgtggatctggccgccgtgggcctccaggggaagggctttggagaggcccgaggggccagacatgcatgatgcctcggaagatgaagagacgtcacaggtgagaagaaaacagaggcagccaggcgggtgcggtggctcacgcctgtaatcccagcacgttgagaggccgaggcaggcggatcatgaggtcagaagatcgagaccatcctggctaacacggtgacaccccatctctactaaaaaaaatacaaaaaattagccgggcctggtggcgcgccactcaggaagctgaggcaagagaaccgcttgaacccgggaggcagaggctacagtgagctgcgatccagccactgcattccagcctgggcgagagagcgagactgcatctcaaaacaacaacaaccacaacaaacaaaacacggaggcagatggtgtccgcagaggttcagttaataagtttttcatcttgtaatctactggcccctaggagatcaaccaatgcattaagggcagtcctctgcaggaagcaagagcacggacagtcgagttttattttcttgtcttccccagattttctaaatcagcttccataagaaaaaattagagttagtgatttatttatttatttatttattttctgagacggagtctcactctgttgcccaggctggagtgcagtggcacgatctcagctcaccgcgacctccacctcctgagttcaagccattctcctgcctcggcctcccaagtagctgggattacaggtgaccaccaccacgcctggctcatttttttgtgttttcagtagatacagggttttaccatgttggccagcctggtctcaaatgcctgacctcaagtgatctgctgctggccttggcctcccaaagtgctgggattacaggcgtgagctactgcacctggcctagagttggtggtttagaaggaaagaaagtgctctcatctggggaagggttggacaagccttcacgtctcagagccactggcaggcctcctgcaagccgctgtgcccagcctgggctggcttccgtggctgtggaggtccacgtgcggaggttcatgtggggctgcgggttgttcacccacccgtgcacgtgttcattcgtttctctctcgccccttaaggctggtgccaaggtgggggatggtcccgcacatgggcagcactgggtccagggtggtcaggctccagggtgagccctgggagctggcacaactgtcccgcatgggcagggctggggtttcaagggaaggcctggggtaggcctggctggcaggagctgtgtactatgaaactgccgaaatgggatggtggtgtagggtgtgtgtgtgtattttaagagaaaaggtcttgctttgtcacccagcctggaatgcagtggcaccatcaccattcactgcagcctccaactcctgggcacaagtgatcctcccacctcagcctcccaagtagcagagactgtaggtgcctgccaccaccacacccgacttttttattttttgtagagatgaggtcttgctgtggtgcctcgaactcctgggctcaagccatcctcccacctcagactcccaacgtgctgggattacaggcgtgaggccccccgcccccaccttgcccagcattgcagctttaattgaagatgccccccactctgttttggaggggccccgccacagcccaggtgcggcctcacaggtctccatgtgtttgcagctacgtctcggccatggtgcctgtgaagtcccccagggagtactacgtgcagcaggaggtcatcgtgctcttctgcgagacggtggagaggtgagcacagggatgcttaggggctgggggcagcatctggggagtccctgcctcactccaggcccggggcagagggcagctctgggggaacctgctgtgtctcgggagtgccccagatggaaggcaccagacgtgtcttcccacactacatccggcttctcctcacaggtgggcagagggtagaggccacccctgcctttacctctgcccggcccccttccaccgccccacggtcgcttttctgtctgccagaaggtcagatcctgcaggtgaagtcactgtcagaggacaaaagctggaaggctctggcatgatggattggacgtccaaaccttgtcaccttcctcaccccctcactcctcacctactcactcctcatgtcctcactcctcacctcctcacttccccacctcctaactcctcacctcctcactcctcaccacctaactcctcaccccctcactcctcacctcctcactcacctcctcacttccccacctcctaactcctcacctcacctcctcactcttcacctcctccctcctcaccttctcactcctcacctcctcactcctcacctcctcaatccacacctcctcacctcctcatctcctcactcctcacctcctcacctcctcactcctcacctcatcattcctcacctccttactcctcacctccttactccttagctccttatttctcacattctcactcctcacctcctcaatcctcacatcctcactcctcaatcctcactccccacctccccagtccaggaatgagtttttgctgagttttaagtctgttgaacaagtgtttcttttttagggagtggggggggcagggggaagccatcaatattcttatcaggctttgtacagtaatttggagtctggttttctcaatggactttggggttaagatgtaaccttgatgtttctcttgttcaagtggtactatggtgtttggaagatttgaaattgactattatcacattgtatgtttgttatttttaaaaagcaaatttttactctttgtgctttgagagatatttcaaattatcagaaaataagatgacgggaaattccttttattttgaaaagtcacgatgccagcaggcctgctcacgaggtgcaggaaaagccctccacaagccccggggaggagaaaggaagctggtttctcagggaagtgttgaattgtttggggcagtatttttgttccgtgttcattcttgacaccggagttgtttcggtctcctggctgagcagagccgtcctctgggttgccttactgtctttgctgggcatcatagctgtcctcacacatcctccctgcccctgcctcctggggcagaggtggggactggcagatgggaaggtcaagctggagccacctgccagggcatttagggaagtgtgtggccttttcctgcagtcccagccccttgcacatatgaggactgggggtggcatgtgtcacctcttgacgtggccaccacgcgtggctgcaggtacagattgagcgcactgcctgtccctgctggggtccaacctgtggctgtggtgggccagccctcatgctgctcactgtccgtctccccggacagggccctggacttcgggtacctgactcaggacatgattgatgactacgagccggccctcatgttcagcatccccaggctggccatcgtgtggtgagtgcctcctgtgcccaggacctctgcagaaacctgcgggacgggcagggctgatggtgccaggtcccgtgcgggtgccggtccatggcgtctccacctcacggtggccgctcagctgtcccgatcagtgacaggcaggcctgctgtcagccctcagcagaccaggggaccacgtgtcctgagtgccccctgttcaccttgctggtgagggaggctctgtcaccctagatagggcaaggtggcctaacacctgccacctgccactggacaggtgagatccacaggtgagctcattagtcacaggagaccatgagggtcacacaggggtcatgctcggaacagagtggccacgcaggggctgtgggaggcagacttggtggtaacaagaggacgagctgccccccgggtccctcaggaggctgtgattggcttgtttgaataatttgggggctggcagggaggtgaagcacattgggttgaagggcaggtgggggcagttggtctggctgatggaatacctgtgtggaacctttcctgccagcggggccgtctgggagagcagggaactcaaggcagcctgtagggtcctgtggggctcaaggatgtgaacacagcacatggaagctcaggcctgaaatccaccgaggcaggatgcgcggggtcacctgcttagcgtctctgagctgtctggggccaaggttagagcccaggggtcaggctgctcatccacaccctgactccagacggggattccccatgcccctgccaggcggatggtcacgggggcggaggagtgagtggaccacagagagcttagtggagcttgcagctgggggggaggcggaagtggggagggggaagaggggagggggaaggggggagggtccagtggtcagcggccagcaggtgtgggactgggcagagtaggggatggggagcccttgagagagatgcccgtggagatgtggatgtcagtgaagtggtcggggagtggggggtgggcacagaggccacgactggtccaggctcaggctggagagacctcactgaggccatgctgaggagccccaggggaccccggggcacaggcacacgtggcagtgcactggggttgagcatggatacccctcccgtgggaaatgggggtgcagaggtgggagcacgcggggcggtggcagtgcagtgggctagggccagcggcggggcctgcaggggtcagaagtgcttaaccccaggatgcgccgaacaccccttgttggagtggggagcaatgggggctgctgccggggccagtctggacacccctgggccaggccgctcactcccctaggtcctggtgccacctcctccgggagggctccagcgtggtctctatctgctgggccctggctccccagagtcccctccaatagctcagggcctggcctgtttcctgcgccgtccttcccgtgtcctcgcagaggttgcgtctttcacaaagttagcaaaccagagagagtgagcctcacatcgcgccagagggaggctcggaaatcctcctgccgttagactcagggaacttcctttcacctgaagacctcagggctggagggcagggtgtccccagtggccagcgacaaggtggcttggagggaagtgtcctggcggggagaggccaccccagagcacagagcgccccttcccatgggccacaggatttggtgacattgtttttcttttctagacaagtgtctctctgtggccaaactcacttgaagaaaatgacaggcagttttggtccttattcttctctttgtttaaaaaacagaacagcaaagatcctgcgagccggccttgtttccaccagggcgcagggcgctgtgagcctttgcctcaggtacaggtgtctccttgtcccaagggcactcacagcaaatgaacagctctgctgtccttgtaaaaagttctccgcgagtgctttgaggtgtggcaccaagccacccgcccactcatgcccgtgtcaatgagccggtgagccctggctggacttcctcttaaaggtcgggcctggagtgtgcaggtgaccccaggtgaccctccccgcaggccgcaccccaggcatactgtgtttcgggactttcacactgagtctgctgcccgtgtttgcccgagtacaggcgaccgcagaacagcagccacttcccccaaccagtatcatctgtgtcctgcttgccgacctcagtccacctgctggtggccaaacctctgctcctccttctgtcctaggctttcatcctgggaggcaaggggaggcgggggctgggggatcagggtaggggaggccagaggagggaggtgggggggcagcttggggagggaggtgggggagtgtggggggtcagggaagggcagcagggggggtcagggaagggcagcaggggaggccagtgctgcgggggaggccaagggagggaggttggggagggaggctggagcttctgttggcagaggctttgtcccgcgggtcccctcctggaggcactggcgtggggtcccctcgggctcaggacagtgggagagcctggaaagggagtgagggacccccaggaggtgaagggggcttggattgaaggagggaggaagggcgagagggcataagagcccaaagccagagtccagggagcaggcctgtccaggggggtggccagctgtgagcccccacagaggcaggcatctagccacagagccaggctgtggatacgaggaaccgtggggtgcaccaggctgccactgcaaccctctgtgcagcgagcctcgagcagggcgggtgagtgctgagcgggtgagtgctgagtgggcagctgttcctaaggccgcccctctgggatgctcactggggccctgcagccctgcaccaccagcggatcccgtcttgttcctcgtcatccacagcgaccgctttgagccggacaggcagaggccacagctgcccgtggtggggcccagaacctgctccttcctgtgttcattcagtgagcaagtattgagtgcctactgcatacctcgccctgtgcttgtaccagggagatggacagatgggctgacccacagtgctgtggaatgttctggatgctggaagggggactcagtgcagggaccccatggggtggacaggagctgaaggcgtgagggagaggctccccagggcagccggcccagaggtgggagctgtgcaggtggcaggcaggggcacgttggtgcaggtggtgtatgctcaggggcaagtccagggctcgagcaaggaccagggggccgcaggaacttctgcagaaatgaagacccctctagcctgcattcctgggcccacaccctcgcaggatcctgcctctgtgaagtgggcatcctgggaccccccaggtgacccccagggaacactgagagcagaggggaggcaggggtgctgagcggggcaggagctgagggtggagctcctctgtggctcctgcccgtgactgtgctgctgcccgagagccccagtcccttctccagcacacagtgtcagaacagtgatgccacatttaccaagcatgagctgcgggccaggctcccgtccccttctgaggggctcccagtggcgaaggcaccgctgggggtcaacagctggaggcggcagaaccaagcccacccgagggtcagagcctgctattcacctgtgacacaagaaagcagaaaactctagttctgtggctggcagaggaggcctgcctggggcagaggcagtggtaaactgaggccttcagattggcagggggaggtggaagggagtgctgggtggcacccttccccctgtttagggtgtccccagcctggtggggtctggccttaccaggcagtgaggacaaaaactgggggtcacccctgtggggacttgctctgagccgtaggggaggggccccacttgccctgcacccctcagcctgtcccctccctaagacctgcatccagtcagtccctcctgctgattgagacacgcgtcctggggagagtgtctccacgaggctcagactctttgacaaactggttttacttttggggatttatcttaaaacagtttcttttttttgtttttaactttttatttttattttttaattaaaaaaaaaatagagacagggtcttgctgtgttgtccaggctggtctcgagttcccgggctctagcaatctgcctgccttggtctcctaaagtgctaggattacaggcatgaggtaccgtgcccagccccggccttaaaacagttcctttaaaggaagaaatgaaataaaacctctagacccagtggtcacttcccagtccccatcagcacagacctgcctgcccgcctcgctgcggcttcgcccgtctgcactcacagctgtgtgtgtgcgacgcttcccagaccggacctgtgcagaacccaggcccctctcctctacccctccctcccttcctccccagcccctccttccagcccatcccagaatctacccctccctccctccccagccccctccttccagcccatcccagcgtctacccctgccttcctccccagccccctccttccagcccatcccagaacacgtgcaggagccaccgcccacgtggcctgcaggatggttgccggatcctcttcaggggccctcacccatccacctgtgtcaaaacaaggtgtcatctctgccctgctcagacccttgccggagctcccaccgtgatctgcctgcaccgtgcccacaccagtcctctctccccagtccccacgcacccgctgccctgggtctccaccatgctgtccccttcgctcagggtccccttgactgtcctatccctactgccacactgtcccctcccccgcactgtccccttttccatgatgtttcctcctccacgctgtcccctctgctccagtgtcctcttggccatgctgtcctctccatggtgctggcccctccactacactgtcccctcctctatgctgtccccttgtctatgctgttccctcctctatgctatcccattctccatgctatcccattctccatgctgtcccctcctccatgctgtcccttcctctgcaatgtcctctcccctgtgctcctctgcactgtcccctcctccatgctgtcccctcctttatgatgttccctcctccgtgctgtcccctccatgatgtcccctcttccgtgctgtcctctcctctgcactgtcccctactccctgctgtacctccctctgcgatgtccccaccactgcaccgctcacccaagccctctcccaccagcaggttgcgtgacttactctgttatttatttttccatgttactgagataaaattcattaccctatgactcacccatctacagtgcacagtcgtttttggtacattcagaattgtgcagccatcaccacaaatttcataacattttcattactcacaaagatgtctcttactcctgagcggtcacctccaccccctattatccttcatcctgccccttaaccctagggaaccacaaatctattttctgtttctatagatttggctattgggttattcatataaatgggatttctgttatttttgtgtctcccccactagactataactcttattcacggatgcatcctgagtgcctgtcatgtcatagtgtggtggacttttgcagaattttgttgcattgatctgagggggcacaaatatatatccacaaagattatccccgaagtattacttgtaatcataaaaatttgagaagggatggatatccagaattaagggattggttaaaaacaatactgtagccatttaaataatgatggagaaaaatctcctaatgctatgcaaaaacatccccagtgtattaagcacaaaaactgttatcaaatagtatgtctctattttacagagtttcttaacattgataggtaaaacttttgtaaacagaaattaaagcaataaacattcttctttattgtggtaaaatatacataacaaaattggccattttgaccctttcttagggttttaatggcaaaaattgcaattacttttgcaccaacctaatatataggatttacccttttgtgactgtcttatttcacttcacataatgttttcaagtttcccccatgttgtagcatgtgtcagaatttcctacctttttaaggctgaataatattccattggatgtaattagctgttattttaaataagaaatgtgtgataacattcaaaagagtaaaatgcctaggaataaatttaatcaagaaggtgaaaggcatggatgctgaaaactaaaaaacgttgctgaaaaaattaaagacataattaaagagaaagacattccatgttcatggatgggaagacttaatatagttagaatggcaatactccataaagtgatctacagattctgtgcaattgctgtcgaaactccattggcctttttgttttgcagaaatggaaaaggtgttctaaaattcatgtggaactgcaatgggccctaaatagccaaaacaatattgaaaaacaaaaacaaaattggaagattcatacgtcctgatttcaaaacttactacaagtcaaaaccttatggtactggcataaagatagatgtatagaccaatggaataaaattgagaagccataaataaacccaaacatctatggtgaactgattattgacaagggggccaagatcattcaataaggaaagaacagtctcttcagtgaatgttcctggagcaactggataaccacatgcaaaagaacaaagttggaaaaaaaaaaaaaaaagaacaaagttggaccctgcgatggttaacttcatgtgtcatcttgggtaggccacattacccagatatttggtaaaataccagtctgaatgttgctgtgaaggtatttttttttctttttataatgataaactggcaatttataattgcgcagatttatagcatgcaaagttgtgttataatctatgaatgcagtgtggaataattaaatcaagctggttaacatatccatcacctcaaatatttaacatcttttgaatgagatcattttaaatttactctcttacaatttggaaatgtacagcactctattattaactgtattcaccatgatgtgcaaagaactcaaaaaaagaaaaaaaattcttctagtctgagattttatactctttggccattccccacacccccagcctctataaccactgttgtgctctctgattctataagttcaattgtttgagattccacaagtaagtgagaacatatggtatttgtctttctggtccttacttatttcacttagcataatgttctaaaattccatccaatttttcacaaatgtcagaatctcttttgtttttaaggctgaatagtattctattgtgtatatataccacattttctttattcatctgttaaacgcttaggttgatttcataacttagctattgtgaataatgctgcaatgaacatgagactacagacatcccttcaacaaactgatttcagatgtttggggtaaatacccagaagtgggattgctggatcatatggcaattatatttgtagtttttttgaggaacctctatactgttttccataatggctgtaccaatttacattcctaccaatggtgtgcaagggttcccttttctccacatccttggtaacacttatctttcatcttcttgataaaagatattcagacaaatgagaaatgatatctcactgtggctttagtttgcttttctctaatgactagtgatgttggtcatttgtatgtcttcttttgagaaatgtttttatccctgaaatgcaaggatggttcaatatacacaaatcaataattgtgatacatcacattaatagaataaaaaaaccatatgatcatctcattagatgcagaaaaagcatttgataaaattcaacatcattttatgatgaaaaactcagcaaattagatgtagaaggaatatatcccttcaagggtaccactgagtgaaaatgtaaaacagaaaaaaagaaagaatgtgccttaacgcaataaaggccatatataacaagaagcccacagctaacgttatactcaatggtaaaaaattgaaagcctttcctgtaagatatggaacaaggcaaggatgcctactcttcccacttctattaaatatagtattgaaagtccttgccaaagcaattaggcaagagaaagaaagaaaaggcatccaaataggaaaagaagtgtaattgttactgtttgatggcaactttattcgatatatatatatatatatatatatatatatatatatatatatatatatatatatatatttgagatggagtcttgctccgtcacccaggctggagtgcagtggtgcgatctcagctcactacaacctccacctactgggttcaagcgattctcctgcctcagcctcctgagcagctgggactacaggcatgagccaccatgcccagctaatttttgtatttttagtagagacagggtttcaccatattggccaggctggtcttgaactccagatctggtgatccacctgcctcggcctcccaaagtgctgggattataggcgtgagtcactgcacctggccggcaaccttatcttatctgtggaaaaccctacagactccaccaaaaaaactgttaggactaataatgaatatagtaaagttccaggacacaaaatcaagacacaaaaattagtagcatttttatacactaacaatacactatccgaaaaaagaaatcaagagaataatctcatttacaatagctacaaagaaataagatactaaggaataatttttatcacagaggtgaaaaacctgtacacagaaaactataaaacatcaatgaaatcaattcaagaagacaaagatattccatgttcatggattggaagaattaatattgttaaaatgtccatactacccaagtaaatctacatgtttaatgtaatccctttcaaaagcccaacatcattttttttatggaaagagaaaaaaatcctataattcatatagaaccataaaaacccacgaatagccaaggcaatcatgagcaaaaaggacaaagctggagataccacactacctgattttaaactgtactacaaagctatagtaattttaaaacagcttagagttggcaaaaacaaaacaacaggacacaaataccagtggaacagaataaagagcccagaaatgaacccaactaattttcagcaaaggtgccaagaagacaaggacagcctcttcaataaatggtgttgggaaatctgaattttcacatgtcaaagaatgaagctagaaccttatctcacaccatataaaaaatcaactcaaaatggattaaagagctaaatataagaccagaaactctaaaactactagaagaaaacataggggaaagactacacaacattagtctgggtagtgactttttggatttggccccaaagtgcaggtaagagaagcaaatatagataaattggattacatcaaactgaaaagcttctgcatagcaaaagaaacaacagggtgcaaagacaacctatggattgggagaaaatatttacaattcatacatctgatgggttaatatccaacatatataaagaactcaaaaaattcaacagcaagaaaacattaaaaaaaatatgggtaagagactgggcatggtggctcatacctgtaatgctaacactttgggatgccgaggcaagaggattgcttgaggccaggagtttgagtccagcttaagcaacatagtgaaacctcatcccaacagcaaaaagccagatgtggtggtgtgtgcctgtagtcccagccacttcggaggctaagacgagaggattagttgagcccaggagttcgagtttgcagtaagctatgatcacgccattgaattacagtctgggcaatggaaagagactctgtctcttaaaagcaaaaaaaaaaaaaaaaaaagtaagatttaaagacaaggggaaaaggaaaaaaatgtgagaagggaactgaatatacatttccactgaagtttttgaagccatgaatgtatttttgcacaaacgcttttatcatatgcagtcgttttttgtaaatgattttttgtaatgccagcagatataggttagagtgatttttcacctgagtatatgacagaaaaatgtttgaatcattattagttgcctgtactggcagtatgaatctggaagaaagtggttgaatagagaatagtaagagcaaggccatttagtctgtacattcacatagggcttggtcatttgcaacaataaatttgttcattggcaggatttcccaccaagttagtatagattctatgctatttgataaaagataacaataataaagttaattttttttttctcttcagcatttgctttaagagaaaaatcctgaagcttgtagggatttctgatgccaggaaaccatgaaacgtgagagtatatttagcaatcagggtgacttaactcatggtaattggcacatgtatagttacaatttgcattctagttatttaaactaagatattcttgatcaggctgaacatactgtgagtagaagattgctttccctaataaataagatagagtctttggaggatggccttggtaagttggtaagtcagcttcctctggattttggtgatttctccagttcttccataattcctcagggccctgacaattttctgagtaagccatggggttctggctgacttttctttttccctaaagtttttctttatttttcaatacaaacagaaagacatctttggttttatctactcctggatacaagacaccatcttagcattatgtggggattcgtgaaggtattaaaacggtcagagcttcttcctgctatgatggttctccagctatacacaggttcctctgtgggcaacacttcttagcagatggaatttcctctgacatgaggacagtggctgacgaaagccaggtaatttttgtcatctggggaggagtgaagatcagttgaatgttacctcagtacctcaaaagcgccttcaaatgcttcagccagcttgtcttgttcaacacaagtcatgcttcactgaatggatgattctacccatccgtgtccagtgtagcatccgctgtacgatgtggatataaccttccctgtcctctgaaacgcacgtcagcaccaccctgctgtgaggtattttaaagatgagattagcatttaaatcagtagactctgagtacagctgacgaccctccgtgatgtgggtgggcctcatccaattaatggaaggccctgagagaaatagactgagatccgcaagtaagggggaatccggcttccagactccttggattggagctgccgtgtcaactcttctccgggttcccagcagaatttggactttccagcccccacaattgcatgaaacaattccttaaaataaatattgctctcttgttctgtttctctagagaactttgatacagagggtaaatcttcctgttctcagattttgcaatggatttgacatcaaaagcaccaccacaaaaagataaaaagagaaactggacttcatcaaaattaaaaattgtgattgtccaacaatgatagactggattaagaaaatgtggcacatatacaccatggaatactatgcagccataaaaaatgatgagttcatgtcctttgtagggaaatggatgaaattggaaaccatcattctcagtaaactatcttaagaacaaaaaaccaaacaccgcatattctcactcataggtgggaattgaacaatgagatcacatggacacaggaaggggaacatcacactctggggactgttgtggggtggggggaggggggagggatagcattgggagatatacctaatgctagatgacgagttaatgggtgcagcgcaccagcatggcacatgtatacatatgtaactaacctgcacaatgtgcacatgtaccctaaaacttaaagtataataataaaaaataaataagaaaaaaaaattgtgatgcatcagaggacattataaagaaaatgaaaagacaacctaaagaatatttgcaaatcatatatctgatgaagatttaatgtccagaacatataaagaacccttacaactcaacaacaaatcgacaaacaacccaatttaaaaatgaggaaagacttgaatagacatttcttctaagaagatatacacatggccaacaggcacatgaaaagatgctccacatcgttggttactaaggaaatgcaagtcaaaaccatgatgagatgccacttcacacccaccaggatggctgtaatcaaaaaaatggaaaagaatacgtggggagagcgtggagaagtcagaacccttggattgctggcaggagtgtaaaatgccacagctgctacggaaaacagttggtggttccttaaaaagttaaacatagaattatatgatccatatggtcataccacatacccttctaggcatatacccaagagaaatgaaaacatatgtccgtgaacaaacttctacacgaatgtttatggcagcattattcataattgcccaaaggcagaaacaatccaaacttccacccgtgggtgaatgaagaaatgtatgcgcgggaacattcgccacgtgccacagcatggtgagccttgaaaacgtggtgcaaagtgaaaagcggtcacaaaggtcacgtattatgtgattccatttatatgaaacacccagaataggccaattcatagagacagaaagcagatgagggattgccagtggctgaggtgaggaagtcagtggtgattattaaaagggtgttttctggggtgataaaaaccttttgaaactagagaggtgatgggtgcacagcaccgtgaatgcagaaaatgcctcagaatcataccctttaaaacagttgttcgttatatgaatttatttgaaaaaagaaaagggaagactggccacccccacttccagcagggcccagctttctccactgtgcggggcgtcctctctcctgctcaccttagctggacctgggccaagcccctcacagtgcccccacacccctggccacaccgagaccccaggatccagcctgccaggctcaccagtgggtgctgcttacccctgctcatggcagcatggacgcaggcctgggtggcctgtcgggctgtagccatgggcagcggctgcattggacccaccgtttctggcaatagctcattcccaggcctcattctgagcctcttcagccggattcctgcaagtgccaggccaggtgcagagacaaatgctgagtctctggcagccgcccgggggccgctccccacctctggcccccacaccccgttacttcagcacctgggcctgatctcctgtcccacgggccttctctctgtcgttcgggcacctgcagagctgctgagcagcagggctcagccactgtggagtgcacggccctgcgtccagcacgcgaaagctaacacacggctggatgtggggacacagcccagggggtcttgggtccccgcaggctcccaggaggaagtggcgcagcagccttggggtctgagcctcctgatgaacgagttcttttctgaggtcctgggccagcagctctcatgggtgggccttgtccccccactcctgctgactgccctggggggcagctgggtcctccctcggccacgctgctgcccggcacaggcaggagcgaggtttccagaggggcagacgttgggtacacaggtcattgcgggactgagtcctatgctcagcaggggagggagctctactgtggttgtggatggcttccctgaggcttggccactggagtcagggctgcccccttccctgctctgtttcactctgcctttgtcctgagactgcctgattcacccataaagttaaggctctatttgggtaattgtcccctgaatactgttcgttcaatcaggacaggcagctcatgtaagagccacaaaggagaccaagcagaatggaaggctggttgtgctgtcccctcacccacaggtggtcaagacacagccccctgcccagctgagctggccactccacaggggccccggaggcagcactgcacatacttttcctgtgactttcaaatcttctttttgcacatgaaacccaacgatttttagggaaaaacattccctttgttcaattctgttcatcagcctttctcactgagctgggtgtgttagacaaggagactgtccctgtgctcccagggactcggtgttggctggacctaaccctggtgtcacgtctgctgaaagagacaggccggtggtgctccatttacacagacaggcccacatggcccttgtctgtgctctgatgaggaagaatatgatgagggacaggggacgaattcgtgggtggatgctccccaggcacctgagacatggtctggtcccaagagacccaggaggaggcacccagagaaggtcctctgggatgggtgccctcaaggagagacgggctgagacatggatgatcaaggcacactcggagctgggcagggctggacggtgcgtggagaggagtgggtgccactggaggtggcatctgggaagcttgtccttcagcaggctttgagccggactctgggggagggacagtgaggaaagccggcctcagccacatgcggccccagtcctggggaggggagcttctcggggcatggtgggcaccacaagggaggtgggtcctgtgtgggggatgaggggaggctgctttggtctcgtggcttgtggagcgttggccaggctgcaggaagggaacccgtgcgggcctcagctcgcacctccagctggttttgcttttggagaagatggttccaggtccagttctcataaagctctgcagataaatttaaccacaaatccagtttttattacttgcaagaaggtagattttggtaacaaaccttgaggctaatttatctgattgcagcactgatgtgtgcagatacacttttctgattactttatgacccctccaatgaacacaagctaatcaactgcaaaagaggatgaagtctgggtaataattctcactgcttttttctaaacttatttacaatgcaatcacacaaggcaaagcatgaggcggcggccgtgctgggacagtggcgctgcagagtcccagcgggcgtggttttcgcaggtggttaagttgggccgtccgcggcacccagggggccacagggcctgacatcctggcttttgtgtctcaaatgcagtggcctcgtggtctatgcggacggacctctgaacttggaccgcaaggtggaagacatgtccgagctgttccggcccttccacacgttgctgcggaaaataaggtggggatggagctagaggaggtgggggaggggagggggacaggagggccacaggtgggcgctgaagtcatgtttagccgccgcctccaggtcctcctcctctctgtgaggaaggatgggctggttaatattccctagggaggggtcacaaacgacccatgggggtcacagagtcctggcttttgcccctgcctgggcatcgcacggggtgggcgctctcttgggctgagctgggggagtgaacctcacacttcctgacatggtacagcaacagctaagtgtcctgctgtccccaccattcccattgtccccaccatccccaccgtccccaccgtccccaccatccccaccatccccaccgtccccaccgtccccaaagcgcttgcttctgttggagtcttggtgctccacctgtgccctttgtctttagttactggtttacgtctgtgtccacatgggagacccccttttaaaacacgacgcctttccttcatatgggccaagggctttgctgggtggcctgagccgacagagcccagccgtggcttcctggagggacgggggccacgtgaagcccatggcacatgtcctccatgtgccaccctggctctgtggcctgggacagcttggtatttcctaccacggcccctgatcactgcaaccaggtttccttcggggacccagaagcctagaactctgccccatgagggccagaggtgctgtgagtccagacagtgaaaagtgaccccgtgggctatggggtcctcgtcacccttgcagatggggttgtgagctcttggggccttggcaggtggtccttggcgtcagtgggttcaggggcaggggtgcttggttcagtccatgtttcatctgggagatggctgtcgctgctttcctcctgcttggggggatgtgagccctggacctggaggttgcagtctcatccttccttgggtgacgtggaggagaccacagtgaggagaggagacagatgccacctacaccaggaaggcacatgcaccccctgccccacatatgggggtcttacaggaaaggtggcgcaggtgccgggccgtggctggagaaggagcctcctgggcagtgtggggctggaagggggcaccggccacacaggagtggagtggacgtcctgggagcatatctgcccttggcctgcatgggtgatggagaggaggatgaagctgaacgggctggaggcagaatgctgtcgagggattaatgctaggattacaggtggaccaccatgcccagctaattaaaaacaattttcttgtaaagatggggtctcgccatgtggcccaggctggtcttgaactcctaggcttaagctttcctccggcctcggtcttccaaagggttgggattacaggtatgagtcacctcaccttgcagaaagctgtgtgggtggaacgtgcctctgctgcccacccaggggccctgatgtgggaacctcacccatgggtaaggcagcggggacccaggtgtgcacccacaggctggccctgccgccccgatggaactgctgcttgtgccccccgcccacccagggaaaacagtgagaatccacagatgagcctgcatctcctccagcgtcagggtttgaggacttatccgttactgtccacgtgtagtggtgtgatctcagctcactgcagtctccgcctccaagttcaagagattctcctgcctcagcctcctgagtagctgggattacgggtgtacgccaccatgcccggctaatttttatatttttagtagagacggggtttcaccatgctggtcaggctggtcttgaactcctgacctcaggtgatccgcccgcctcggcctcccaaagtgctgggattacaggcgtgagccactgcgaccagccaaaagatcctgcttttaaaggtacctgaactgtggaagtaaggactgggtgaactaagagcctggggaagggagcctttggaggtgagctgcagtctacttggctgttcttccccagggaagatttgatgattccaggcttgtccagggcccaggcttcccaggcagagaagctctgctggggaaagaacatctaatcaagggctggtgaaacaggctggcagcttgggggcattcaagcagcacgcctgccagtcctggggaagcaggaaatccaggcagaaagccccctgacaacaggcttcctgcagtttccaggtgcttaggaacaaaagcatgccttgaggccggcgcggtggctcatgcctgtaatccaggcaccttgggaggcccaggcggatggatcacctgaggtcaggagtttgagaccagcctggccaacatggtgaaaccctgtctctactaaaaatataaaaattagctgggcgtggtggcggacgcctgtaatcccagctatttgggaggctgaatcaggagaatcatttgaatctgggaggcggaatttgcagtgagctgagattgcgccactaaattccagcctgggcgacagagcaagactctgtctcaaaaaaaaaacaatcaaacaaaaagcatgccgtgagcacactgctagagacgtttgccagattttgaagttgcatgtggctggaggctgagctggaacttggaaggacagaactcggtctcctgcagactttggggtttgagaaggcagagagtgcagcaggctcagaactgcagtaaccaggcctaagcgcagccaaacctcaacctactccgtgtccgaagggaatgcaacaatggacctcatgcggtcagcctaacagagaaaggggtagtcccctctggtggaaaaggtgtcatctgtaacctttatgattcttttatatccaatgtctgtcatataatccaaaattgcttaaaatgttggccgggcacagtggctcactcctgtaatcccagcactttgggaggccaaggtgggcggatcacctgaggtcaggagtttgagaccagcccagccaacatggcaaaaccccatctctacaagaatacaaaaattagccagacatggtggtgcattcctgtaatcccagctacttgggaggctgagaccagagaatcgcttgaacccaggaggtggaggttgcagtgaaccaagatcgtgccactgtactccagcctgggtgacagagtgagactctgtctcaaaaaaaaaaaaaaaaagttaaagaaacaagaaaatactgtaatcccagcactttaggaggccaaggtgggtggaccacaaggtcaggagatcgagaccatcctggctaacacagtgaaaccccatctctactaaaaatataaaaaatcagccaggcatggtggtgcgcacctgtagtcccagctatttgggaggctgaggcaggagaattgcctaaacctgggaggcagaggttgcagtgagccgagattgcaccactccactccagcctgggctacagagcgagactccatctcaaaaaaaaaaagagagacaagaaaatatatctgatagttgagagaagagccagaaagtggatgcagagttctgatgatccagataactactcccaagaatgtgaacacagtgctgattaacatgttaaagaaaatagaagggggcaaattagataagaggatagagaatttaacagagaattggaatctatacagagagacacaaccaagtgtggtggcatgcacctgtagtcccagctgctcaggaggctgaggccggagggtcacttgagcccaggagttctaaatcctagtgtgctatgctgatcaggtgtctgcactaaactttggcatcaatatggtgacctcctgtagcagggaaccaccaggttgcttaaggagtggtgaacctgcccaggtcagaaatggagtaggtcaaaactcccatgctgatcagtagtgggattgcaccattacagtgcagtgtgatagccactgcactccagccaggacaacatagcaagactccatctctaaagaaagaaagaaaggggaaggaaaaaaaggaaaggaaggaaggaagaaaaaaatgacattctaaagctaagaaaattcacaatttgacaataaggacgcagtagatgggtttaatagcagatcggacccagcagaacacagaagtagtcagcttgaggatagcttaatagaagagacccaaactgaagctcgggcaggaaaaaagaggggaaaaacaacaagaaacaacaatagaaaaccagaatagagcataagagacacgtgtaacaaactcaaaaggcctaaaaaacataattggaatcccagaaagagagaaaagagagaaggggcagaagtaatattcaaagaagtcatggctaaacatttccccaaattccaaaagacaaaaatctctagccacagattcagcaagaaaactacaaacaaaaaaccaaccagcatacctgggtatatcatagtgaaattgccaaaaacaaagacaaaaaatttgacaagcagcaagagaaaaaggacatactactttgaaacgaacataagatggatagctgtcttctcaacaaatgaacagaaacaatggaagctgacaagcagtgaaataacgtatatttaaactgccgaaggaggttgggcacagtggctcccgcctgtgatcccagcactttgggaggctgaagcgggaggatcacttgagccaggagttggagaccagcctggccgacatggtgaaacctcgtctctactaaaaattcaaaaatcagccaggcgtggtggcgggcgcctgtaatcccagctgagacacgagaatcacttgaacctgggaggcggaagttgcagtgagcagagatcacgccaccgctttctagcctgggcaacagagtgagactctgtttcaaaaagaaaacaaaacaaaaaaaactgctgaaggaaaatagctgacaaccagcattttataaccagcaataatatccttcaaaaatgaaggtgatattttgccttcatgaattattccaaaacatagaactgaaggaatttgttatcagcaacctgcacataaaacaattaattggagttcttcagaaaaaaaaattgtatcagatggaaatgtagaaatgctagagaggccaggtgcggtggctcctgcctgtaatcccagcactttgggaggccaaggcaggaggattccttgacctcaggagtttgagaccagcctggacaacatagtgaggctctctagttaaaaaaaagaaaaattagctgggcatggtggcatgcctgtagttccatcttactcaggaggctaaggtgggaggatcatttgagcccaggagtttgaggttgcagtgagctatgattgtgccactgcactccagcttggatgacagtgaggccctgtcttaaaaaaagtaatgcaagagagactgaagaacatgatgtgggttaacataagtgaatattaactgtacaaaataattatagtgtctgtggagtttaaattgtacatagtactaaaattcatgatatacaagtagcagaaaagacagaaaggggtaaatggaattttaaagttgtactggaaatgtgattgaataaattatttatattagaatgtgatcagtcaaggatcactattacaatattaggataacactaaaataataaagatgaataactagcaaattcatagaaggaaaaacatccaaaataaggtaagagcagagaaagagaagatacaacaaatggaccaaatagaaaaaaatagtaagatgaaagatacaaacccaaccacatcagtgattacattaaatacaaatggactaaatattctaagtgtaaaaccaagattaccagtctgggttgaaacagcagcaacaacagctgtacttggctgacgagagacccagtcctgacacaagtacgtgaacaaggttgagagtaaatagacaacataaaccatgcagacaccacccaaagaaagttgttgtagttatatttatcaaagtaaactttaaggcaagaaagattactacagataaagagaaatatttcatgctgataaacaggcaattcagtaggaagatgtcacaatcccaaatctgtatatatgggctgaataacatagctgtaaaacttatgtaaagcaaataacagaaatataaggtggaatagacaaatccaaaaccagcaggatactttaatttacctctctataactgatggaactaacaggaaaacccttgagaatgtaagaaatctcaataacaaaactaataaacttgacctgacttacatgtgtaagttacatccaacaattgccagaattcacgttctttttttttttttttttttgagacagagtctcactctgtcgcccaggctggagtgcagtggtgcgatctcggctcattgcaacctctgaattgcaacccaggctcaagcaattctcctgattacaggcacgtgccactactgcctggctaatttttgtattttcagtacagactgggtttcaccattttggccaggctggtcctgaactcctgacctcaaatgatccactcacctcggcctcccgaagtgctgggattacacacatgagccaccgggcccacccttatgttcttcttaaaagtatgtggaggctgagtgcagtggttcatacctgtagtcccagcactttgggaggcccaggtggatggattgtttgagcccaggagtttgagaccagcccaggcaacatgacgaaacactgtctctacaaaaaatgtaaaaaaatgggtgtggtggcacatatctgtggtcccagctacttgggaggctgaggtaggaggatggcttgagcccaggaggcagaagttgcaatgagctaaggtcatcccactgcactccagcctgcaccacacagccagaccctatctaaataaataaattaattaattaaaaaaaaaagcatgtggaccatttatcagaattgattatatgacagaccgtaaagaaacccacagtgaacctcaaagacagaaagtattcataatatgtactctgactttagtgagccaggtatcaaaaaaaaaaaaaaacctggaaaaacctggaaaaatccccaattacatgataaattaggcaaaacacttctatttatttatttatttgagacagagtcttactctgtcacccaggctggagtgcagttcgcatgatcttggctcactgcaacctccgcttcctgagttcaagcgattctcgtgcctcagcctcctgagtagctagaaccataggcatgcgcctccatgcctggctaatttttgtatctttagtagaaacggggtttcaccatgttggccaggctggtctcgaactcctggtctcaagtgatctgcccgccttggcctcccaaagtgccgggattataggtgtgagccactgtacctggcccaaaacacttctttttttttttttttttttttttttgaggcagagtctcgctctgtcgcccaggctggagcgcagtggcgcgatctcgctcactgcaagctccgcctcctgggttcatgccattctcctgcctcagcctcccgagtagctgggactacaggcgcccgccaccacgcccggctaattttttgtatttttagtagtgacggggtttcaccatgttagccgggatggtctcaatctcctgacctcgtgatccacctgcctcggcctcccaaagtgctatgattacaggcgtgagccaccgcgcccggccccaaaacacttctaaataattccttgttcattgcagaagtcaatggaaatttttctttttttttcttttgtaatatagatgggatcacactatgttgcccaggctggttttgaactcctgtgctcgagccatctgcctgccttggccttccaaactgttgggcatgagccactgtgcctggccaaaatttaaaaatagttttaactacatgataatagagatatgatatatccatgtggccaggcccaatggctcattcctgtaatctcagcattttgggaggctgaggtgggaggatcacttgagcccaggagttcgagaccagcctgagtgaggcaattctcccacctcagcctcctgagtagctaggactacaggtgtgagccaccacacttggctgtttctttttgtattgattccaattatctgtttaaattcttcatcctcttatctaatttgccccctttaattttctttaacatattaaaacaacaataaaaaacttagttgggcatcatggcacacgcctatagtcccagctacttgggaggctgaggtaggaggattgcttgaacccaggagtttgagggtgcagtgagctatgatcctgtcactgtattccagtctgagcaacagagtaagacctcatttctaaaaaaacaaaaaggaaaattaagatgaggcctaagcagtgttttgaaggaaatttatagcactaaatgctataaattagaacagaataaaggatgaaattcaattatataaaattttgtctaaagaagctaggaaataataagtttatcatacctcaagaaagcaggagaaaagaaataataaaaataagaacagatgtcaatgaaatgcaaaacaaatgtatagtaggggaaagacaaacccaaaagttaggttttttgtttgtttgaggcagagtctagctctgtcacccaggctggagtacagtggtgcgatctcggctcactgcagcctctgcctcccaggtttaaacaattcttctgcctcagcctcccaagtagctggaattacagatgcctgccaccacacccagctaatttttttgtacttttagtaaagacagggtttcactgtgttggccaggctggtctcgaactcctgaccttgtgatctgcccaccttggcctcccaaagtgctgggattataagcgtgagccatcatgccaggccccaaaagttagttattttaaaagattaataaaattgataaattccaagctggactagttcaagagaaaaaagataaaacataaattactaataatatagatggaaaggagacatcaccacagaccttacagatattaaaatgatatgaggatattataaacaactttatatcactaaatttgacaatttgcattggacaaattcctcaaaaaagcaattaatcaaagctaacagaagaagaaatagaaaaccttttaatccaatatctattaaagaagttgaattcattattttaaaaccttcccacagagaaaacatcagacacagatggctttccttatgtattcttctaaacatttaaagaagaaataacacaaatcttatataaattctttcagggaatagaaaaaaagacattttctaactttttttataattattgaacaaactctcactttgtcatgcaggctggagtgtggtggcacaatctagactcactgcaatctctgcctcccaggctcaagcgatcctcccacctcagcctcctgagtagctgagaccacaggcatgcaccaccatgcccaactaatttttgtattttttgtagagacagggttttactgtgttgccccagctggtctcaaactcctgggctcaagcaatctgactgccttggcctcccaaaatgctgtgattacaggcatgagccaccatacccagccctaactcttttttttgtttttcaataagagtataatctagacatttaaacctgaccaagatattacaagaaacaaaaactacaccaatctctcatgaacatagatgcaaatacccttaaaaagatacagacaaatgaaaatcaaccatatataaataagatatatcatgaccaagagaaatatatctgggcacagtggctcacacttgtaatcccaggactttggaaggctgaggcaggaggatcgcttgagcccaggagtttgggaccaacctgggcaatatagtaagacctgatctctacaaaaaatttacaaattagttgagcatggtggtacacatctgtactgacagctacttgggaggctgagatgggatgactgcttgagccagggaggcagaggctgcagtgagctgtgatcaggccactgcactccagcctgggtgacagcgcaagacattatctcaaaattaaaaaaaaaagaaatgtattccagatatgcaagactggcttaacatatggaaatcaaattgatgttttgccacattaattttaaaaattggaagaaaaatcatataattttgaaagattcaagaaaagcatttgaaaaaatttcacaccaattttatggtgaaaacatctcttagcaataaacaaaacagaacaagaaaagcatctcttagcaaactaggaataggagggaatttccttaacctggtcacagatagatatagaaacagatttcgtccgtgcgtatctctgtgtgtgtgttgtctgttgtgtgtgtactgcagcacacttccctgagattgggaagaagatgtctactattcactatctccatttaacattgttttctggcccagcaagtgcaataaggcaaaaatagaaggaaaattaggaagttacacagcattggaaatgaaggactaaaactgccattttatgtagataacgtgatcaagtacctaggaaactcaggagcatcttcaaactattagaaataataagtagatttagcaaggtcactaggtgaaacatcaatatacaaaaataagtggtctttctgtatgccagcaataaataaatgcgaaatgaaatcaaaatactgtcttagtcaattttgtgttgctatcacagaatacctaagactcagtaatttataaagcaaggaggttcgtttagctcatgattctggaggttgggaggtccaagatcaagtggctgcatctggttaatttcttgtgcggacctcgtgctctgtcataacgtggcagagaagcaggaggggaagggggcgtgtgcaaagaggccaaacacaagaggcaacctcacttcatgacaacccactcttgtggtaactaatttggtctcatgagaaatgcattaatctccttaatgacctaatcacctcttaaagacaccacctctaaacaccaccacattgggaactaaatttcaacctgagttttgatggggacaaaccacccctaaaccatagcaaataccacctatggtagtgccagtaaatatcaaatacgtaagcataaatcaaattaacgatgtccaagacctccattgaaagttataaaatgttattaccataaatttttaaagccctggacagcaattccattcagagagaggaacccctgatgttatgaagatatcagttggtctcaaattaatctatgagttcaatgcagtctcaatcaaaatcccagaagctagctagcttccttccttcctccctccctctttctctcttttctttccttccttcctttcttttcttttttctttcttttcttttcttttttcttttcttttcttttctttctttctttctttctttctttctttctttctttctttctttctttctttctttctgtcttctttctttctttctctctctctgtctctccttccttcctttcttgctttccttctttcctttctctttctttctgcattctctcctccccctcccctcccctccctccctccctcccttccttccttccttgtagaaattgataaactaatactaaaatgcatgtggagatgcaaggggcctggaatagccaagcagcagcagaacgttgtctgttctactctcaatgggctttgggtagtttccacaaatagtgctgctgtgactacccctgtgtgtgtctccaggtgaacatatgtatgcttttctgctgtgtgtacttcataaaaaaagaacaaaggccaggcacagtggcttatgcctataatcccaacactttgggaggctgaggtgggaggagctcttgagcccaggaggtcgaggctacggtgagctgtgtttacatcactgaactccagcctgggtgacagaacaagaccccatttcttagaagaagaagaagaagaagaaaattggagacatcttctattgtaaagctatagtaatcctgacagatatggtacaaggatggacttgagacccattcaatagaacagaaagtctagaacagaccaatgcatatataggtctctgatttaaggcaacgtgacattacagaacagcgggaatggttgtttttctttccaataaatgggctgagtcaatagaagaccacatgaggaaaaatgtctcatatggttatctattagtgtctgggttcttaccactactgtacacaaaaatcaactccagacagagtgtagatataaatataaaaagtaaaacaataaaatccaggcatggtggctcatgccgtaatcccagcactttgggaggccaaggcgggaggatcacttgaggccaggagttcaagaccagcctgggcaacatagtgagaccctgtctctaaaaaaaatttttttaattaaaaataattagccagatacggtggtctgcacctgtagtaccagctgctcaggaggctgaggcagaagaataatttgagctgaggagtttgagtctccagtgggccatgatcatcccagatttgggccacagagcaagaccatgacttaaaaaataataaaaagcttttagaggaaaatatcaaggagaacatctttgtgaccacagagtgggaagagatttcttaaacaggacacaaagcactaatcataaagaaaaaatgttataattggactttattaaaatttaaaacttcctcaaaagcaccattaagagaatgaaaaggcaagccaaagagttggagaatatatctaataaagaactcaaatccaaaatatataaagaactcaatcaataagaaaaaggcagacaacccaattagtaatgggcaaaaagcttgaacaggaactttacatagagaaaatctaagggctgataagtaaactgtgaccgacttcattggtcatcaggctaaaacaatggaaagccataataagataagatactattactcactcaccaggaaggattcagttaaagacagtagtgctctcgagggcctggggcaagccatgctgtcagccaagctgtgggcaggtgtgcctggatcccggctgctcccctctgtcaggctcagcagtcccaccccatgtgtgcattcagcagaaatgccctcgtatgttcttcaagagagatacacgaagatgctgggtcacagcagccaaaacctgtcgggtgtaacagataaaggaactacgtatatttaccccatggaagacggtgcagccacaagaatgaatgacctatggcaacgtgctttatgatgggtgaatcttacgaaatagcgttgccagatctagtaatacaacagcagaaagcccagttcagttagaatttcagataaacaaaaaactctttttagtgcatgtcccaaatgggcagcatttggagtacacttacaactatttctaatgacattttaaaagtacttatttgttgtttatctgaaattgaaatttaactgggtgtcctatattttatctggagattctacacaaatataacatcagcaaacaaatcctgccacaagagagtgtagactgagaattcccatttcctcagagaagcagagcaggtgcgtgcctcggcctatggagtcaggatggtgtcatgcgagagccagggtgccgggggcctggttggggtttcacttctaaatctgggtgctattcacatgggtggattcagcttatgaaagttctgcccagctctgcaaagcgcacttcctcacaatagccatggctgtgctggaatgtcccatgtgggactcagaccacagacacacccggagcttctcgcagcagagagcagcccacagtcggcctgtaggagcctgctccaggagcttcctgctcagcatcactgaattaactgcacctttgggtctcggcctcaatgcttcttcctccaggaagccttcccggcctcagccaggtgccctgctgcaccctccttcatggcttgcattgtctttggttgcagctgtcattattgtagttcagtcattgtttgtataaatgcttgtttatcatctgcctcacccaactgcaggctaagtccacaagggcaggagcatgcctgccttcttcctcgtgtcctggtacccagctcctgctgcatagccagtgcccaatggtatttgtggaatgaaaggatgaaggtttatgtgtaaaccagcatgtattttttcactccttagagtttttattcatgcagctaacacatgcctaacaattagggctttcttcttttcagcaaaagtttccagaatcttgttttaaaaaagaaactgtactagaatcccagccggccaccttgaacaccgttgtcctggccggcgagaccggagccttgttccgtggtggaggagacgtgctggtgccttgagaattcagttgcaagcattcagtgcctggctgttgttctgctggtgcagactccagggtgctgcgtccactcctggccaaggaggctggtgtggcttttgggaccctcacccttgggttttgtcttgattcgtagggatttgctgcagacgctgacggaggaggagctgcacacgctggaacggaacctctgcatttcccaagacgtggagttccccatccgcgcagacgtgcagggacccgctgccctggcgcctgccctctctgcccctctcccccctgaggggccactctcagctaaggccaaagacccggatgcagagctggcctgctccatgcagtacgacgaccaggagctggagcagctcagccgcatggtccacagggcgggggacgagatgtcctctttgctttcaccgcccattgcctgccagtccccagctcacaggccaggagcggagggcagcccaggcggggaggcctctccaggtagaccgcgcctgcggtcaggcagtgacgaggaggagcgcgtgttcttcatggatgacgtggaggggacggcagaagccctggccaggcccgagtccccagctggcccatttgggtgggcaggcagtacctgggccgacccccaggagaaagggcagggtgggccaggcggagcggcggggatcagcttgcccgcctcggaaaaggaggaggacttgagcaacaacaatctcgaggccgagggcacagatggggccagcctcgcgggcaccagctcctgcagctgcctggactcgcggctgcacctggacggctgggaggtgggtgcggatgacgcagagacggctgagatgatcgcccaccggacagggggcatgaagctctcagccacggtcatcttcaaccccaaatcgcccacttccctggactctgcggtcgccacccaggaggccgcctcggagcccgtggccgaggggatggatggcggcccccacaagcttagcactggggccaccaactgccttctgcattcctgcgtgtgctgtgggagctgcggggacagcagggaggacgtggtggagcgtctgcgggagaagtgcagcccgggaggcgtcattggtgcctcgtacgctgccggcttagccaaggccagcgacagggcccctgagagacaggaggaggcgcccccaccctcagaagatgcctccaacgggcgggagcccaaagcccccacttccgacaagtgcctgcctcacacctcaggttcccaggtggacacagcgagtgggctgcaaggagaggctggggttgcaggtcagcaggagccagaggccagagagctgcatgctgggagcccctcggctcacgaggcgcctcaggccctgtcgggctccaggtaagagccagtctggcccagagactgggtttgtcctctctgcactggggggcaggtgctggcgcattctccaagcattgcagtgtttctacctgagccatcttggccaccggcaggtgctgggccctggccgagtgtggggtctgtgtgtgaggaggggcaggggcaggagctggctgcagaggcacctgccctgtggggcgtcatgcaccagaaaatgtgcgccagcgggcccgcttccctgtttctgatgttccgggtgcctgtcaggtgacatgggcgcagtgccaagccctcagctcacctgccgcagccccggcccatcccgcccctggtgtgagccgcgtgcctgtgcggggcagtgggagcgggctgtgccagcgccgggccccttgccctgagccgcatccgagcgcactgcccacttctctttgctgaccactgtggctgcctggctcacaccgggctgaaacgagacgcagacccgtggccgtgggcgcggagactggggccatgaggggtgctgagaccacccatgggcaaattcccaggggtgttcccagggcctctgcccctcccaggactctctcctccttgccctgcactggggggagatggggaggtctcctatctcttctcatgggctcccatcccccactctggagacagggagggaaaggcaggggctgggcccagcccagggtcactcatggctgcgttgtcagggccattgaccccctggccaggaccctgccctacagggctcccactctggctgtggccgtgtctataggcctcgctaactggaagagagacggaggacagggaggggacgaggttcaactggagaccagaaaagcccccaccaggagccgtgggagccgggcagcagatggggatgaaggtggggggcacagatgcaggagtgaggggctgcgttgaaggatggcaggcaggcccaggagagggtcctcacactggggaagggggttcttggtggcgggcagacgcctccttcttcccgtgctcggtcctcccaggtcgtgagctcgctggaggagtgggagtgaccagggtcccgtgacggtcaggccgttcttcctttccgctgcccactcaggactcagggcctccctgcagctctttcctgtgctgcgggctgggtgggctgggcctggttcccggtgtccctccccactccccatcaggccctgggagcctcagtcactttccatcgatgggttcgcctcttctggacatttcctgttaacacattcacgtacaggtggttccagacttacgatggctcggcttaacgagggcgcggcaggaaccgtcctccgcgttttgaaggctaggagggtcagatgcatttctgacttaggatacgatgggttaagtcgagaaacatctgtggtgtgtgacctccagggtccggcttcgtccaccagacgtaacgtctgtaagggccaccatgtagaggcacacggcaacacgccgttcctttttatgactgaatcacgctcactgcatggggagaccgtctttcatttcttcactcaccagtggatggtggatgtgttgtttctaggttatggatgtgatgaaaattttcgtccaagtttttgtgtggacacaggtcttcagctcatctgggtggatccctgtgagcggaattgcggatcatgtggtcactctgtgtgtggcattttgaggagctgccagactactttctaacgtggctgcagttggcatccaggcagctgtggatgtgggttccagtttcccaagtccttccttacactggtcattgtctttgttttgtccttagggcatgccccactcgtcagcagtcagctgatgtctctaaggccactggacaccatttcctcacagcaggttcattggtctcattcagcattatgtgtgtagaacttgccattgacagctgattcaactttatatttgtgtggttcccagtcaaatctataaataagatagacccagagaagtctgtctgaaggaacctttttctcccctgcccccaaagggaacagttgaagaatgttttatagtatattcttcaattttcaaaaatgtaagcaaaggcacatgagtggatgttcagatacacacccgcgtatcccccatccccgtatttggtgaagggcctcctgctacaagcactcgcccccacctcgctctcctggccttctgcccgagccgctccagtgcttgctagagatgtcctgcttcccttcactgcggggcagggcctcatgcgaggctggcctggcgtgcactcgggcccaagtgctggcttgggcttgtttccaggcttttcctgtcacagacgtgccacgatgaacagcctcgcgcgaacagcctctcctctttcttttgggtgaggccgtttttgagatgcagcatgagcttcacggccgtgtgaggcagagcaccttttccccactactggatgctttcctcaggggctcagacccagttcactggcaatggatcgtttttctccgagtttgacatgaaaccatcagaaattctttgacaggataagtgggagagtttttggtttggggcctgcacatcttttgctgctgggggtggtgggggttgtccaggtgacagccagtggacgcccaccccctccagaagctcctcccaccttcctggcgtgagctctgtgccccatgatggacacagcctcttaacgcggcctcagcttcccaggccttatgcagctcagcacagacgctgaggctcagctgaggaaagggaaggagcccaggtggtggtgtcatcttccagggaagcgtttctggcagtgctgaggatccgagaaagcaagcacatcacagggtgatcaggacagtacatgttcggttcaatttaggtcagtgcctgggcccagcactgtgcccggaggtagctggaaatcaggtcagcgggcggcagcacatggcagctgtcccatccaaggcacaggcggtgtgcaccgtgggagcatcattcattcccccactcatctgtgtctcaagcatgttccggggtggctgggccaagcaccggagacccaccaaggaacaagagacatagcctgtcctcccaggtgtcacctcacaccaatacgggggtgatagcgcagtgggggtttttaaacagacagacacaggagaccagcttcacacacacagaaagttcacccaaattcaaacagccccgtgtcaggaagcatggctggtgttaagtgacgtttgtgcgaggccggtcgtgtgcacaggtgtggctgtgtttggttacgcctcccattctgcagtgggagagactgagacggagagggtggtatttgcctcagctgagagcatctggaagagcccgggcctgtttggccgtgagacccgctcgcccggcagacgcccctgcagcccctgtggttgtggcgtggacggttcagagggaacagtgggcacggccttgattcacggcttccagtctcacgtgcgagtcgcgtctccgtgtactgcaaatgaaggaaatgtgtggagctgcggccgaccagcctgtgagattcccccgagacccctggagcctgtgtttctggccaggcagacgacagcctccaggaggaaggacagggcttcccagccaccagccaggggacggatgcacgcaggaggtgggttggcacatggcccactggagtcctggcgtgagggtcccagccaggaggagcccctctctggagcgtttcctcaggtgctgtcacctgggagtccggacatcgtcctcgacagacagcagtgaatcagccttgcagatgtgaatgttctggaacctacgcccttcagctcttttcattttactggcttctttccgaccttctcagtggtcaatgaatccttttggagaagttgacattttttaaaagcttattttcccttcagctagccttacctctttgatccagaaccttccgtcctctcgaagtcacccttggaagttacttgtctagatgacagaaagtccactcaggctggttgtctgttccttccagggacaccatgaagtggatttccagcctttgccttctgcaaaaagtaacactgactccctgtttgctaattatagatgtggtccctgttcattgtagaaactttggaaaacataagaaggaaagtctgggtctggtggcttatgcttgtattcccagcactttgggggctgaggcaggcgtattgcttgaggccaggagttcaaggccagcctggacaacatagcaagaccccatctcatgaaaagtaaaagtaaattagccaggtgcagtggcgtgggcctgtagtcccagctactttggaggctgaagcaggagaatcacttgagcccagaaggtggagactgcagtgacctatgactgtaccactgtactgcagcctgggtgacagagtaagaccctatctttttaaaaaacaaaacaaataaggaaataaatatcaccccaaatcttatgaacagttttatttttttttccactgaacatggttttatagtttcctctatggttttttgtctgcctcttggattctcttttctttttctttcttccttttctttccttcctccctccctcccctcccttcccttcccttccttctcttttctctttttaaccacagggtctcccttggttgcccaggctggagtgcagtggcacaaacacagctccctgtctgggctcaagctgtcctcctgtgttagcctcccaaggtgctgagattacaggtgtgggccgctgtgcccagccttggattatttctttagaattggtccttagaagtagaatcaccacagcaaaggtatgaagccttttaaagctctgccactcactgtcaaactgctttccagaaagagctgattacccccagcagtgccatccctcgccaacacttccaactccaacttgagggggaaaaacggagtacccttcgctgttcctgaggtttgccccctctgatcactgccaacctgggcagttgttctgttagcgcctgcgtttttcgttctgggaagtgactgtgttttctgctgtttttcagctgggatgtcacgctttttggacttgaaaatgttccgtctggtctgttggtggctttctccaagttgttcttgccctttgactttgtttttgaatgtcttttgatttgcagatgtcctcaattttatcttgtgtaattaagtttatagaaattctagaaacaagtctgttcctctgcctttctggttgatcgcgtgtggtgcgaggcgcgctgctcctctgtggtggggccggggaatgttcttctcatctctggtggcctgggttttgttttttgccatcaatcctgcagccccgatgactagtcgggaggaggctggaaccagcgcaagggcctctgtgcatcagagtgggactgacggaggctgtggccgtcctgacacacggtcaaggctgcccgggcgctggcttagggaggtctcagagcctgtcactgtccgtcccacgggggcaaggccaggcctgctccgtcgtgcagtcgggcgcctctgtgactgtacttgagtcctcccttccctgccacttgtccaccgtgctcagcatcctctctggccgttgctctaggtagaatggtaggagtctcacaggcttctcaggacagacagtggccaagcctctgccccaaccctgtggcacatgccccgcctgtgtgcgccttccttccggaacttggcagtggcagacagatgacagacactgagggatatcccttttagaggaatcgctggagtcatggtggggagtgccctgctccatacgcagatgtgaggggaaaggcagtgcctggtgaaccgactgctcagcctgagcctcagttttgtcatatgcaaaacggaccaacagcaggccccagctacatggcaggatgcactcctcacgcatcaccactcatcctctgccgttcctcccagcacagcccgctgtgtcactgtgtcaccgtgtcaccccactgtcaccgctcatcctctgctgttcctcccagcacagcctgccgtgtcactgtgtcaccccactgtcaccgctcgtcctctgccattcctcccagcacagcccgccgtgtcactgtgtcaccgtgtcaccccactgtcaccactcgtcctctgccgttcctcacagcacagcctgccgtgtcactgtgtcaccatgtcaccccactgtcactgctcgtcctctgctgttcgtcccagcacagcctgccgtgtcactgtgtcaccgtgtcaccccactgtcactgctcgtcctctgctgttcctcccagcacagcctgctgtgtcactgtgtcaccccactgtcaccgctcgtcctctgccgttcctcccagcacagcccgccgtgtcactgtgtcaccgtgtcaccccactgtcaccactcgtcttctgccgttcctcccagcacagcccgccgtgtcactgtgtcactgtgtcatcccactgtcactgctcgtcctctgccgttcctcccagcacagccaaccatgtcgctatatcaccgtgtcaccccactgtcactgctcaccttgctcccagattgcgcttgcagctgttcctggccatctttgccatgatcagtcttggctttgcctctggatttcattgtttcctggattcacatctctgtcccccgctcttctggcggtgacagctatcccgggtggcatcaggcattgcagtggcgcttcatgacctcgctcccggacagtgggtcctggcctccagcttgaacatccacccaccgcgccccacctggcgactcctccgtgtggcctggggtcattccaccaagctcctctgccctctgccagtgtgaggacagggctcagaggtgtcacggaggagagcctgcagccggtctatcccgaggtggctgcagctctcccgggcctgctgaccctctgccccatggtgaggtcgctgctgcaaatcctcctgggcccctccaggccatgacacagagggtcctgtggcccccagcctggctcccggtgcgcagcccagaggagggcaggttgtagctggcacatcagtgaaggcgccgctgcgtggggagtcacctgctgctgggctggcacttctgatgtgcttcgttcccacatccaccattcggctttcccaccagcagacaggtgttcagccccttccctgggtggggcctcaaccaagggccatgcggtgctgtggcctcggtggcccggaagcccacgcttccctccctgcagcgcagtcagggctgacagagccttcagtggcccggccctagtgtggagctcttctgggggctcagaggacacaggcagcctccaggtagaaggctgagctgctgggctgtgggggctctccggatccgggggctccccagtggacccactgcaggacaaggggacggagtgacaggtctgggactgaggcagcccggccttgctccagtgcctgtgaccttgagcagcaggtgccgccccgcgggcctcccctccccctcactgggaggctcacacggctgccatttcccccagactgtctggggcccggtggcaggtgcttgctaggctgctgcagccattggtccctaaagcaggtgtcccgaggtcctgcagggaacaccgagaccttccacccacttcatgcccctggcaggaaaaacaagaatgattgaggggtttaaaaatagaggaggacttggaattaattagactcttgaaaaacagattaggtgtaatgactgtcattaagccaatcgtttataagtgacggggcctcctgggctgacacggtgagtcggggataagaccagggctggtccgccgtgcacaggcccaggtgagagggcagggctgggttcttgctctcgctggccccaggcatgaaaccttagcaagctcggtgatgcctgtgtcaccagaaccccacaagggacagtgatcgccctgcaaggccctgagtggtggcctggatgcagtaggcacgcaggccagcaaagtcctgggaggaggtgccacccttcttgcagatgggcctcctcccaattcacagctggcctagagctggagagaaggccccagcctggctgtgctctcggggaggcctggctgaggggatggtcattaccgcaggtcccccacatgtcctcatgaccccacccagggcccatccttacaggccctctgttccctggtgaccacagcttctcccctagcctctggaccgcaccccgcacctcttgcgacatctgccaccctgatccttccccaccatcaccatccactcaagggcaccacctgcaagcagctgcggctacatggaaggagcccctcaccatcctctctccctcacgccccctacctggtcctctggccagtgctggaaagaaattagaattgtttcatgaggtgaagggtgccagtgaggcagctccttttgtgagagcaatctggggaggcctcctgcaggcgctgacatttgctgaggcctgaatgaagggaaggggctggaggaaaggtgcccaggtggcaggacctgtgagggccgaggtgctgggaaggagcagaggggacagggagcagggcagaaggaggtcgggggtggggagcaggaaatctcagagagctttgtgggcagggtgggcaggaaagacttttctgagagaaggaacggcatcagaggcggtaacgtgagcatggcggtgaagtggtctggtggtttaaaaattgttgtaaatgctgggcatggtggctcatgcctgtaatcccagcactttgggaggctgaggcaggcagatcacttgaggtcaggagtttgagaccagcctggccaacatggtaaaaccccgtctttactaaaaaaaaaaaaatacaaaatttagctgggcattatggcaggtgcctgcaatcccagctacttgggaggctgaggcaggagaatcacttgaacctgggagacagaggttgccatgagccaagattgcgtcactgcactccagcctgggcaacagagtgacactccatctcaaaaaacgaaaacaaaaaaatgttgtaaatggctttattgaaatatgattggcatatgataaacaacagcatatgagagttcagttcctctgtgtccttgtcaacacttggtatggtgggctttttagccattctgataggtgtgaagtggtacctcgttgtagttttaatttgcatttctctgaggaataataatgttgaaaatctttttttttttaagtaattttttagagacagggtctcgctatgttgcccaggctggccttgaactcctgggctcaagcaatcctcctacttcacttcagcctcccaattagctggaactacaggcacaccacctcatcgactcaagcgtcgcttcatgtgctatttgtcattggttgtttggtgaagcgtctgttgacatcttttgctgtttctttcacttgggttgtttatccatattgagtactgatagttctttatatattctggatataattctgttatgtgattttcaaatattttctcccaatcttgtcttgtcttttcattctaacagtatcttttgaagagcaaaactttttaattttgatgaagtacaatttatcaattttttattttatgaattgtgattttggtgccatatctaagaattattttcatagcccacagtcacaaaaatttttttctatgttttcttctggaagtcttatgcttttaggttttacatttagatctatacagtattccatttgaagtaactcatgtatatggtgtgaggcatggatcaatttttgttttgcataaggaaagtcaattattccagaattatttgttgggaaagactattccttctccactgaattgcctttgcatttttatcttcagctgaccacatggggtgggtttacatctgaactctccagtctgttctattaatctatttgcctgtattgacaccaatgccacactgtcctaaatatggtagctttataataagccttagttggaagtgcaagtgcccagctttatcttcttttgaaggttgttttggctattctgtctcctttctgtttccatgtgaattttagggttgtcaacttttaccaaaaaaaaaaaaaaagcctgctgggattttgattgggattatgtagaatctatgtagtaatttggaaagaattagcatcttaataatagttctggttcataaacatagtatatctctttatttatttaggcctttaatttatctcagcaaagttttatggtttttaactgtacaggtcttgcacatcttttgtcagatgaatcctcaagtattctatattttgtgatgccattgtcaattggtttgttttataattttaatttgtaattgttcattggtaatatagctataactgatttttgtagatcttctagaagatttttttttttttttttttgagatggagtcttgctctgtcacccaggctggagtgcagtggtgtgatctcggctcactgcaagctctgcctcctgggttcacgccattctcctgcctcagcctcccgagtagctgggactacaggtgcctgccactacgcccagctaattttttgtatttttagtagagacggggtttcaccgtgttagccaggatggtctcgatctcctgacctcgtgatccacctgcctcggcctcccaaagtgctgggattacaggcttgagccaccatacccggctgatcttctagaagattaatcttccagattgatcttgctaaactcactttattagttatggttttttcaaagatttcatcagttttcctacatagatgatcttgtcatctgagaagaaaagcagttttgcttgttttcaattgtacgtcctatatgtattcctttttcttgtgttttttaaccagccagaacctccagtataacgtcgaatgaaaacaatgaaacaggatgattctgccttattcccaagcattcagtatctactgttaagtgtgatttgagctgtaggattttcacagatgaccttcatcttctcaaataaaaaaggagttctctcctattcctaatttgctaagaggttttttttttttttaatcaagaacagatgttggattttctcaaatgctttttctgcattctttgacgtaatcacatggttctcctgtttagcctattaatgtaataagtcacaatgattgatgttcagatgttcggccagccttgcagtcctggggcaaactgtacatggtcatgaggtattagcctttgaatttactgttggctttgatttgctgaacttcagtaggattttgcatctgtctgagaggactgtcaggcagccgtcttcttgtcatgcctttttctggtgcaggagcatggctgtccaggaggagctggggagtgctccacctcttcgggtttctggaagagcttgtgtagaacgggcattatttctgcttgaaatgtgagacagacttcaccagggaagccatctgggcctggagttttctttgtgcgaagatttttgactacaaaatcaatgtctttctagcagactgtctgttgaattatcatcttattccgtgaatggagtttctttgctgcagtgttgagtaatccgttgaccctgctccatcctcctgacgtcccctcagaggcactgacttgttatcaggcactcgatgacctgatctggccctcgccacagccctgcccctgcaatcggcttcccttgtccatgccaaaccaggggacctgcttgtagaccccttgtgccctcctattcctgtccctgtctgcccctcgacctagcgttgccctatgctgtggcctccctccctgtccctttggcatggagccaccatcgttcagcccatggctgcctggacgaagatgtagggagctttgccagctgggtctcactgagtcccacagctgccttcaaggtgggcatctccatgtctgtggcattcctgttcgcttcatggctgggccatcccttccaacccagctctccggccgcctgcaggacccatcccagggttcagcctgtgcctctcaggctctgcagcatggtgtcctcccagccccccatgctgtgtcccagagcacctggatgtgactgaggagcctggttgggggacgtgctggctctaggctaagtggaaaggaggtggcactgagggctggaaggcagcaaggcctgggaggacgtgctggagcctggcccattgagacactcacatccctgactctccctgcaactcctgccctgcagcccggccccctctgctccccaccctagctccttggcccagtgcagcaccatggactggctggtggctgtccagcctcagcctcccagggcacagacgctggggcccacccaggcagggttcatgtcctccaccagccaggcgtgtggggagtgggatgggcatcggcaagtgtggcaggctgccattccgaggggggctccaggagaaggagctgggcagagtccaggcctgtagtgctgccccttgaggtgcagctctcagttcccgctctcctgaccccaggacccccagccctgtccctcaggacaggtctcagtgaggcacacagcagtgtctgaggtggagagagaggggactcagggccacttccggccctactccctgctcctggcagcatcagggagcccgtcaaggggtggaagcgggggctttggctgcagtggagcctgcttggtaagcattggcccctcctcggggagcctagaaggggatggggcctccccgtgagcccaagaaggtgagaaggtgccagccacttgctccccagtggctccaggaagcattctcaaggggtcgttttcctccaccccatgggaccaggaaaattccagggggaacagccccttctcgaaagccaagcatctcctcccaccttcactgagccgaaagcaagaggaagcgggtttcaaccgcggtgatgctgcagccggagaccaggatgccgtcctcagctgacttcacccacctctctgagactcgccagttgtggtggcttctgttcagagagctttttaaagcagcaaaagcgcctgcaaggtgcgagacgagaagggcgacaggagctcctcccgctcgtgtgccgggggcaggagcacacgtgcaggcactcttcgctaatctgcatttcctcatttttttagggtgcacatgtattgcttatgtaattacgaagaaaaacataaagggatagtttcccagaccataataatagtgggatcttttcaagagctgggctgtgtctaggcctgggcttcactgtgtccccagagtccagatcttggccaggcagggctgggccaggagggaccagattatggcccccacccctccccaccactgctcggcttgtgcttggacttaataggggaagcaaggagccaggtgagcaccccaaggcgatgcctggcccctggcccagccctggcctggcccctgccccacagcaggagaggggtgaggccgtcccagaggagctgacttcttgaaggacctggtgagccgtggacgtcagcagctgctctggggccagggggcaggtgtggtcgtgtcctgctctgctgcacctgcccccatggcccccggcttttggagacatctcctgggggccatcagtgagcagcgttgcatcctcacgagaggacaaagctggagagggccaacagacaggagtgtcagggtagctacgggatcatggaggggtcaccatgacgactggcaaagtggcccttggggcctgcaacctgcctgtctcaccaggcacattgtgatcctctgaaggatcacactttgggaggccaagagttcgagaccctgttctgtagctgaggagaccccagctcctcggagaaggcaggcaggcttgtggtcacacaccttccaggtggcatggtcctggggactgccgggccatccccatatgggctgctctctctgggctccgggttgccagcatgggcggccttgtcccctgaggagatcttgcacgtgagtcccctggggcacagcctgggggcctggtgaccggggggtggctctgacggggcctgccatcacgctgctggctgaggcctggctgtctgtcagttgttgagctgggctggcctccgcaaggacagcggctccctgggcctgtccactgtctgtctgtgtctgtcctccccctgagcttctgcagagcatccctggggtgaggagtgctggccacagctggctgtcccctgtgggtgatgaggatcgggggctcaggggaactcaggttcgccgagttcttctggacaccaccgtgatgactgaccagagacatctctgggacctcctgagccccaagtccacaagtgtcctggagcacgatgcacaggcccccgcaggctgtggtaagctgtgtcacctctgccgtctgggcagggaacttaacctcccagcacctcagtttacttgtctgtaaaatgggaaggtgaggccaggtgctgtggctcacacctgtaatcccattgctttgggacccgaggcaggaggatcaccccagggggcgacggggctgctgacagtgtggggctgcacctggctccgtgcccaccccctgcctgaccctccagagggctggcctctttgatgacagcaggtggcaggaggctgtggccctgaggtctggcccagtggcctcagcctttgtcacataccacccccctcactttggggaggctgtgctacagcctgtgttacgcggcccagggccacacccaggacctgagtgcccacttactccacccctgctgaggggcacccttgttcgaaggaatctgtgtgggcagtatcgtgctcctgttttattttattaatttaatttaattattgaggcagggtcttactgtcacccaagctggagtgcaatggcatgatcttggctcgctgtaacctctgcctcccaggttaaagcaattctcatgcctcagccaccagactagctgggaccacgggcacttgccacccccacagctaacctttgtatttttagaagagactaggttttgccatgttggccaggctggtctcgaactcttggcctcaagtgatctcccaccttggcctcccaaagtgttgggattacaggcatgagccaccatgcccagccttagcactcctattttattaatttaatttaatttttgaggcagggtctcactctgccacccaggctggagtgcagtggtgcaatcatggctcactgcggcctaggattcctgggctcaagtgatcccgagtagcttggaccacaggcatgtgctgccatgcccagctatctttttttttaacttttagtagagacagggtctcactgtgttacccaggctgatctcaaactcctggactcaaatgatcctcctgccttggcctcccaaagtattgggattaaaggcgtgagccattgtgcccagcctcactttcccgttttacagacaagtaaactaaggccctgggaggttaagttccctgcccacatggcagaggtggtgatgcccaagggccttcagctcacactgcctaacctgtgactcaccaacccagcttggagacaccctccccatggcaggacctccccttggagcagcagccacgtgcccaggtcccctcgggggtctcctcttattgccagcccagagcccctcggaggcaggcgctgctgctccactgtggccccagcacccagcccagggcccgatgctcccccactgtgtagcaggtgctcacctggcccaccccctcactgcacagatcaggacttgccctcattagagatgaggttccgttctagtgtcacctgttggttttcctgggagccagctctggggccacaggggggcttaggagatggaggccctgtacccagtgatcatggctgggaggtgatgcaggtcctcgggccttcatggactcagggctgggtagggccatatctctgctcaggccaggccgcctcctccaggaagccctccctgctgtatggtgactgtgccttgctgtcgtgggggtgttgggcatctgaccacaggccagttgcttctgccttccgaggcccactgcacctcgatagggcccggccagacaggagtgggggtggagggagtgtgaaaaacataaaggaattcgtgttcctaactgaatcccaagagacatcaaggcaatgctgctaaattagaggagatgggaaaatagctaattttcagagcattcacacatccatatccagtgtctccttatgttcagtactttggaaccaaactgcgggtcctacggtgactccccctgccccctcagagtgcccccctcgccctgcagcccccactgctgacgcacagcggtgtccacatcacaaaaggcactgggagggcgggggcagggaggggctgtctcccttccagagacctaaagagatcccaagggcgcctgggacaccccttcctccccttagctccagacgtcctggaaatctgtgatgtctgctggcctctgtagagggaacaccagccgcagccacctccacgtcagtcaccgcagagaaaggaagatttgtggaaggaatacagcaaatcaacgcctcctcgcaaagcactttccctggatgttgaaacagtgactgcaaactcagaggcccttcaggggcttaagccaggattcgttcagcccatcctacggctgctgcacgtgaggcccgaggcccttgctgcatctgcactgcacccacgccgctgagaggatctcacttgtctgacccgtcagtggctatcttactgtccgtgtctgtggctcaggcagcaaagctctggaccacataacctgcccagggtcgcccagcgggtgagagatgctcttaggatcagatgacagattccacctctagatgcctgtctggggctgctgtaacagaacacccatgagctgggaggcttaaaaccgtggggatttgctggtttacagttctggaggcaggcatctgagatgagggcgctggtggggtggcactgcagcccaaggttctaggggatgatcctcctgccgcttccagcttctggtggctcctggcacttccttgccttgtggccaagtcactccaagctctgcctccgtcttctcttggcccctcgctgtgtctgtctcttgtaaggatatttattggagttggtatccatccagatagtccaggatggtttcatctcaagatccttaacttaattaaatctgcaaacaacctttttctaaaaaaggtcacagtcgcagattcacattttgggggtcacattcagcccaccgtgacgtctgaatcctgtgcctccagcccctcacccctcccgtcaccccccaccctgtcttcaggacacagcagagagcaggggctggagagtcagcagccaagggctgagctccttccctaatcccacctggcataggtgaactggagaccgcatttgctccaccaagagcccacgtctcagctttgcatcagctagctgggctgtgtataagcaatgccgagtaagggtcctgcagcatccatgcgtcagatgcctgtctcagcacagctgggttctgtgctcagggtctccccaggctgaaatccaggtgctgtggactgcgctctcgtctggagcggctgacgtttatttcatcgcttcttgttgattgagaagagactatgagatgcagttgtggcaggtgtggagcttagcacttgacatcctcggaggcagcgtccccgtccacgcctgatgccccctcccacccccgcaaagggcaggcctcggggctgacctctgacctgctgcctttttggcatcctcccgctgaggtcccttaggtctcattagcaggaagcagggctggcctgggcgccgggagggagaagctgaggggtggggaccatgcagcccatgctgggagagcgagtgagccagtgcccgtacagggggctgtcctctcgccgcttctctggccgctgaccccatgctccccacagggaccgaagtcctgcagcagcaaatctcaggccactgtccctgcaccccctagagtgcctgcatggagcaggtttggaggtgggtgggggagcagtgactgggcccagagtgtctggaaggacccctggacctgtgcccacaccctgagaccggaggaatatggacattggagggtgctccaagacaatgcgccaagaccgggtgacacatccaggagagacctgcggaccaagctagtgcctgcctgtggggaccacagaccccggccagctgaccagggcggggcagccctgagatcccggcttcaatttccctccctcccgctgagctgtttctgggatgggcgcctgccctcctggaccggcccagccctccttcctgtccctcggttctgtccttcattctggcccacagtggcagcggcccttctgaggatgccctggtcacggaacagcattcgtctccttctcagtcccagcctgtgctcaacccaggggctgtggagctgcagtcaggagctgtggtgagaagactgacttccttgggaaggcgagtcacacaggaaaaccacgagagagaatgactttgcaaggggctggagaggaaaggaagcagggagattccagcctgctcagaagaaatcagcttacttgctgctggaagttattagggctgacaccagtgcaaaggcctggcagccacagtggggccggcgccatggcggggtcagcgccacgtgttagttcccccggctgctgtgacgaagcaccgcggcaaggtgggttaaatcacgagggcgtttgttgtcttgcagttctggaggccagaagtcgagatcaaggtgtcagcagggctggttccttctggggccataagggagaatctgtcctgggctgccttccagcctcagggggcttgctggccatcttgggtgtgtacttggcttacagaagcatcactccagtccctgccttcagtccacgtggggttctgcccaggtgtgggcctgcacccaaattttccccatgggtaaggacaccagtcaagttggcttagggcccaccctactcctggatgaccttatcttaactttagttacacctgcaatgaccctgtttccaaataaggtcacattttaaggtattgggggttaggacttcaacatatgagcttgctggggggccccaattcaaccccaaacagcacactcgcgcctccctgctaaatccttgccgtactagactcagggcacctgccaagaagaggggtctacctgctgttggtttccgctgtggcctgagctgagctggtacgactttggcagacagttccagagccgattcctggaagggtgtctcagccctccctgatcccaggactcacagaggaagtcaaagccaggccttgtgcattgcagactcagccccccggaggtctttgtgaggcaccataagaggagacaagatgtcccagcaggctccaactcctctggggaaccagaggcgtccaggactgtgggattgtcctgacctggtggccagtgtgaccgggcagcaaggccttcacctctgactcctgggaggctgtgctcagcccatcttgggctcctgctgctgaggtcctctccatctcattggtgaaatctccaccaaaatgcttcctctgaaagctgggttgtccaccactgtgccccgtcgcgctctcctcctccccatcatggtcttcaaagccccaggcgagccacggtggcctatacctgtaatctcagtactttgggaggctgaggttggaggatcatgtggggcccggagcttgaggttacagtgagccgtggtcacgccactgtgctccagcctgggcgacacggcctttatcacggtgggaaatggtctcatttctgaacactcatttgcaggctggctgactccctccactgcgtacacacgtgaatccggtcttgtgtggccacatgctccacagcgagcctgagctgtcgattgatgtcaatgaatgtggatgcgggggctccaagaaagagagcacctgtgctctgttcctcaaactctttttccctcaagtgtagcctacagggaattgcgttctgtggagcatcctctgggggcactgaccaacaggccaaggtccgaactgtccagccctcccagtgggcctctgcttagcctcaacctctgcctggtctctcccagcatcaccagggggttccctacagtctgtcggctgcttcccacctcttggctttcattcaagctgtcctcatgctgcgccttccaggaaccctccctggcactccagacctctctccagcctgagtgaggagtctcccctctgacctcccacaacaacacccttgatggttcctctgttacactttccgtgtgtgataattaactgttcacctattgatctctgccatcaaatcgtgagctccttagggctgaactgtgcaattcctggatcatagttggtgcttagtgcatgtttgtagggcaggtggatggatggatggatggatggatggatgggtggatggacggttggatggttggatggatggatggatggatggactgatgattagatggatgggtgggtggatggatggatggcaaatgaatgagtggatgggtggatggatgggtgggtggatgggtggatggatgagtggatgggtggatggatgggtgggtggatgggtgggtgcatgagtggatgggtggatggatgattggatggatggatggatggatggatggataaatggatgggtgggtgggtagatgggtgggtggatgagtggaagattggatgatgggtagacggattggtgggtggacaggtgggtacatgggtggatagatggatggatgattagttgggtggatggatggatggatgcatggattggtggatgggtagatgaatggatgggtggatggatggataggtaaatatatggatgggtaaatggatgagtgggtgggtgggtggatggatggatgacttttacaagaagcagccagcccaccatttgcgtcagggcccaaggtggctcattagaattggtatgtggttgtacaaatgcccgagctgctaattttcccacatccaagcacaattaaaccttgcctctggagcctaccagtcactcttgatgttctttgtttttgttttttatttatttttctttagagatagagtcttgctatgttacgcaggctagccttgaattcctgggctcaggggatcctcctgcctcagcctccccgtagctgggactacaggctgtttttctcttcattagcctttgcaaatggtttcaagagttcaaaaattaatgtatctgatgtcataatgagaaacatactgtgatgctgttagtctttccaaagttggcattctcttctttcacagactcctagaggttcaaggtggcaaagtcctgtctttctgtttgcatactcacttgctaaatttgctgcatcagattcatttgggctttgctatggtctttcttttccatagtaattggaattaaaattataagttcagtaaacttccctcttctgctctatccaattgctgaattcagacgtgttccatgttcccaacatctcagaggctcccctcaccacttttcccaccccaatgatgacatcagccatttatcccccctgtgtgctgttcaagaggagcactttggaaacctggccactgtcctgtggcctaactgtgacacagctgaagacacaggctgggcagcctttggtattgatgtgactgtttagaattgcactgcctttctttaccagagaatgacatttcatagtagttcaaaccgaagtggggctgttgcagggagtttttgctgccttctgtaagagagtggcaggaagcaacattcaggcagccggtgcgggagtgtctggcagctgcagaaggtggctggacttttagacatccgggtgaacatgctgaagtgacgttgatccactgacttgagaacatcagtgacaagggttcagactctgtggtgagacacaggaagctgttggcagggcaggtgcccttcactcttctagcctctgcttctcatggctccctgtctttctgtgacttgagctgtggctgtatctcacccgtactgttcccttcctcaccacagggatggacccgctgggcaccagctcacttctcggctctgtattgttaatgtgtgtggctcccccactagacttggtttttgggggacacatagtgtctgatctacccctgaggtcctcctcatggccctaccctgtctgttcagcaactggccacaggggataaacacccttccaaaggcagtgttcctgggccactggcatccaaacagtgccccctgctgtggtttgaatgtgtgccccaaagttcatgtgttggtaacttaatccccactgcaacagcgttgagaggggggaccttaaagaggtgatgaggtcatgaaggctttgccctcctgagcggattgatgttattgcaagagtgggtttgttattgctgcagtggggtccttataaagggtgagcatggcccccttcccctctctcttgcccatgcgatgccttcctccatgtggtgacatagcaagaaggccctagtcagatggggcccctccaccttgggcttcccagcctccagactgtgagccagaaacatgtctgttcattataaattacctagactgtggtactctgttatagcagcaggaagcaaaggaagacacccatccacatggccccaggaatggctgacccagaaggacccaggctcatgctctcggtgaaatcctgggttctacctccccactctgctctcttgttccctttggcccttccaagcccagccggttcccttgggcagtacctcattggtttttctacctgtgacatctctgtatggggccccttggctctctctgtccacccattccccctcccacgccaccagagcttccagccaaccagggcagggaggcaggagagggcctttcctgtggcaagtgaagggtgtctggggttgagatggccatcagcgatctgacctacccgtgggcaatcggccagccttggcctggcctcggtctcaacctgctggtagaagccattgttcttatgccacactcaactctctgttgaacgtcagggcccttcccctgatttctcatctccaggggtgcttcagtagcaggatgcttgtccagatagccttcccagcttcagggtgttggtccaaggggctggagctgcggggctgaatacttcccatgggcttctcctttcacagggaaacaagttcctcgccacaggcagggcccgagggtgccatctgctgccagcaggcactttcctttcttcttgaaatggcatctcttctgatcacaaaagcaatacttgatccgcgatgagactttagaaaatgataatttacctgtaatcttactactcaagtaagtgtaagattaatgccttaccttgagtatcttccccagtgtgtcatttatgtacatatgacatctctaatttttatttttattattttatttattttaagagacagggtcttgctcgttgcccaggctggagtggagtgcagtggtgtgatcacagctcactgtacccttgaactcctgggctcaagcgatcctcccacctcagcttccagagtagctggtactacaggtgcacaccatcatgcctggctaattttggattttttgtagagacagaggtcttgtcatgttgcccagactggtcttgaactcctggcctcaagtgatcctcccgcctcagcctcccaataattgttgggatcacaggcatgagccactacacctcgcctctaattttttaaatgctacatttttcatttcatattttaacatttccagtggaccatccttctggagattgtttcaccatagggatatgacctaatgtattgagtcaacccactgttgatggacatttagcttataagctatttcttgcatatgagtttgctgggcgattacaagaaaaacattctcttctgttgtttgtgagatgtacagctcagtaatttgtggtacatccatgaggctgtacagccaatatcactgtctaattcaaaacattttcatcaccccataaagaaaaaccctccccatcagcagtcaccatgttcccctcccccttcagctgttgcgaccacggttctgctttctgcccctatgggtttcgcctgttctagacatttcatgtgaatggaatcaatcatacagtatgtgatttttttttttttttttgaaggagtctcactctgttgtcaggctggagtgcagtggcatgatctcggctcactgcaagctccgcctcccgggttcacgccattcttctgcctcagcctcctgagtagctgggactacaggcgcccgccaccatgcctggctaattttttttgtatttttagtagagacagggtttcatcgtgttagccaggatggtctcgatctcctgacctcgtgatccgcccaccttggcctcccaaagtgctgggattacaggtgtgagccactgcacccggccagtttgtgatcttttgtgactggcttctttcactcagcacgatgggtgtgtttttgtttttgtttttttagacggagtctcgctctgtcttcaggctagagtgcaatggcacgatcttggctcactgcaacctctgcctcctgggttcaagcaattctcctgctcagcttcccgggtagctgggattacaggcatgcgccaccacacccagctaatttttgtattttcagtagagacggggtttcaccaagttggccaggctggtctcgagctcctgatgtcaagtgatcctctcgcctcggcctcccacagggctgggatgacaatatgatgtgttcagtgttcatccacacagtagcatgtataagtgctgcgttcctttctgtggctgaaaacttattccattatatagatagacattttgtctatccattcaactgttttccaaagtgtctgtgccattttatttttccataaggaagagaggaggattccagttccttcacatcctcaccttcctcaccacaacttcatattttctgggttttttttttttgaggggggggggaacattctaatcgtcctaatagataaaatggtatttaattgtaatttttttggcatttcctgactgacagtgatgttgggcatctgttcatgtgtttattagccatttgtatatcttctttggaaaaatgtctattcaaatccgttttccatttgttcagtagtgtttttttttttggtctttttgttgttggattgtaaaaattctttctatattgcagatactatgtccttatcagacacatgatttgcaaaaattattctgtgggttttctcttcactttcttggtggtgtcctatgaagcagaaagtcttcagtttgatgaagtccagttatctgttttctcttttgttgcccatgctttaggtgtcatgtctaggaaactgtggcctagcctaacgccacaaagatttactccaatgttttcttttaagaattttaagcctgggcgccgtggctcacgcctgtaatcccagcactttgggaggctgaggtgggtggatcacttgagtccaggagttcaagaccagcctgggcaacgtggtgaaaccccatctccgctaaaaatgcaaaaattagccgggcagtgtggtgcacgcctgtggtcccagctactcaggaggctgagatgggaggctcacttgagcccagggaagtcaaagctgcggtaagccatgtgagacaccatctcaaaaaaaaaaaaaaaaaaagagagaatctttgagttgtagctctgacatctagatatatgattcatttcgagtgaatttttgtatgtggtataaggtcagagttcagcttcatccttttgcatgtgtgtctccggttttccggcagcatttgttgaaaagactattctttcctggttggtcttggcacccttgctgagaatccactgcccataagcatatgggtttctttgcggactctcggtctcattggtctgtatgtcggtcctatgctgctgctgcacagtcttgattcctgctctttcatgccacattgcaaatcacaagtgtgagtcctccaacttgttttttttcttttggctattctgggtccctcgagtcactcccacattaattttaggatcatattgtccatttttgcaagaaaaaaaggcagttggcactttcgtatggattgcattgaatctgtagatcgatttggggagtcatgccgtctcaacaatattgtcttccgacctgtgaacacgagatgtcttcccatttatgtaggtcttctaatatttttcaacaatgttttgttgttttcagtgtatgattcttgtacttcttttgttaaatttattctaagtattttaatcttttttatgctattgtaaagggctaaggattgttttcttcatttcactttcagtttattgctaccatatctaaacacaaatgatcttttttttaatttttattttatttatttatatttttttgagatggtgtctcactctgtcacccaggctggagtgcagtggcacgatctcagctcagtgcaacctccgcctcccgggttcaagcaattctcctgcctcagcctcccgagtagctgggactacaggcacacgccgccacgcccggctaattttttgtattttattagagacggggtttcaccgtgttgcccaggctggtctcgaactcctgaactcaggcagtccgcctgcctcggcctcccaaagtgctaggattacaggcatgagccaccacgcccggcgtgatctttaaaaaaaagcctttattgatatgtaacatacataccacaaaattcacctttctaaatcacacagttcagtggttttgggcaataatacccctgagccttctgtgtcgggcgccacgccaatccggccttctgccatgtacttgccgcctccgttcccttgcctctgctctctccctgccccaattcttttttttttatatttttaatttttgtaaaatatatgtagcataaagtttactatttagcccttcctaagcgtacaatttcgtggcattgaacacactcagtgccgtgcaactgtcaccaacatcatctccgcaacgtcctcatcttcccaaactgaaactgtttccccatcactcactccccccgactccccgccctctgcccaccctggcgcccaccgttctaccttccatctgtatgaacgtgacggctctcaggacctcgtgtcggagactcaagcaggacgcatcctttggtagctgggttgtttcactcagcatgatcttgccaacattcatccgtggctgtagcctagatccgaatttccttcctttttaaggctgaataatattctgttgtatgggtggaccacatttggtttatccacgcctctgccaacagacacctgagttgctgccgtctcttggccgctatgaacgtgggcgtgcaagtatctgtccgagtcccaaatttcagttcctttgggtaaggctctgatgaggctgggggtaccgagtggaagctgacatcctggacagtgaaggcccctcccttattcagctcccagggcagagggcagcaaggcccacacccccaagctgaaggtaggggcttcatctgtggaaccctgaccacctgggaggggagagccacggagcattgttggggtcccagcagaggatcccgtcccatgggcccaggccccctaagcctcctaccgtgctcccacgttccggcaaatattcagctatgttagcacattgccatgagggagggggccccgtgcagctccagggacgcttccagcctcctcccccgctctgccgcagcccgctgccctgaattctcacgtgcgccacgcctctgtgcttctgcagggtttacgtcacgaggctgtgtccctaaattagataccaggcagttgtgcatgtttcccacggtctgtgaaaagactcacgccacgtgggattcgtgcgcgttggcggggctgtggctggctcgcctccgcctccgtggcctctgctggtgggcgattagatcacggtgggtcttccattccattgctggcggacttgggatcctgcccagcgtttcactggaatccccagcaccgcgtctaagaccctgcatctctgcagacagacgcagatgcgcgtttccagtgtatgccggcaacagaggccaccgggctccagagtgtagacagccctggctttactgaaacggtgcgaacattttttccgaagtggttgcaccagctgacgctcccaccagcaaggtgaaggctcctgtggttgcacccacactgttcttatttttgcacaggtcgacgaggatccccgaacatttggggcaaggctcggcatgagacacggccaaataaatgagccaagccctccaaaagaggccgtgcaggatgccagtggcaactgaaaaaaattatcacgaatatttctaggtagagaaaagattttgcatccatgaaacgacagtaacagcagtaaatttaaaacttgatagcagaaatttaaacgtcaagagtaaaattagaagaacgagttgggggaaatttcccagaaaatgggacaaaaagataggagataaattagtttaaaatgagagggccagtgggtgcacccctagagttgggcgaggtgaacctccggagttagtacaggcccagctgtgaacgatttatagggtcaccgtggaacccctgagtagcaaatctgatgaaagctgaggacgcagctgctgggaagatggagaccccatgcacggagggtccctcagcctccaagggcatccacggacagagcctgaggtctggaagtcagaaccgatgcccagggaggccagcgaggcctgtggggtcttgtgcagaggcccctggaggtcccgggccctgttctgactccaggcagggaagtgtaggtgggggcggggggatcctgtattcgtttcttgaggctgctgtccccgcaaactggcctaagccctggaaactgtctcgcagtcggaggcccgaagtgcaaactctggcagaacctcactccgtctgcaggctccagggcaggctcctctcgcctctcccagcttctggggactccaggtgttccttgggttggggccgcgtctccggtctcagcctccgtggtcacatgggctctcctgccctctgtgtctgtgtcctcttctgtctcttataaggacgtttgtctttggacttatgacctgtccggatcattcagggcaatctcttcatctccagatgcttcacttaattgctcctgctgagaccccttttccaaatgaggtcacgttcacaggcttcaggggctggggtggggagagatatttttgggggctgcctgacactcaggccattagaaatggtgtgaaaggtgagttgacgcttccataggggcagtcggtcgatattaagccaggagtacagcctcagtgggtgagtcgccaccagctgtcaattccaggaggcccagcagaaatcaaaggcccgggactggctcagagccctgttgtaccacctggtatatgtggtgagcatgttacactgaggacattttaggtgaagttacaggaaagttgtgtatctgggcaacagatacacgcctgtggggtgggcgtctgcgaggacacagacttttgtcttgaccagtgaccttcgggctccacggccccttatcatgccccaccccacacaccggtatctccttctccatgcagcagctccacagctgggtcctgctcctcagacaagatggggccagaggcggccccagcagccacgcatgctgccccacaggccacaagagagaagatccggtccaggtttcacggcagccacgacctcatccaccgcctgttcgtctgcatttcaggtgtcatgtcagggcctgagaccggtgcatggcttgaggacacacgggctgcgctttaggggaggtcaggcggggcgtgtacaacctccccctcactttcctgtaaacagcagcccactctgcccctaaggagccagcactcctgttcatggagaaggctggactgaccccacacaggcaggaggaggaggggagctgcgggtgagggtgggaggcgttttcctccagggagtggcggcgggggcagtggggtgggggcagaagagccaggcgctaggcatcacctctgggcagggtccaccctgggctcccagccacgtaggctgctggggggctgtgcctgcgaggggtggacatgctttgcaggtagacacatttggatgcctgagtggctgtgacagtcacaagcactggcctgggggtgggcacagtgcaggggctctgtaagtgtccctcagcgcgtagcctggccagcttagtggtgatggctgtgacctgtgcataaaaggtgtgaatgtcagcggcagaccgactgtggcggggctgtctgtctggtcgtctcccttcccctgatctctctcgactcccgagtttttattcttgcaagggaatcctcccccaaggggttgggcctcctccctccctgactgatctgagaacacgctggcctgggctgtgagctctggctgggtctgcccagcccgcagcaccgacctccgcagttccttccatccgtccttctgtcgtggttactgtggccttccttcctcaggtgtggctgaccagctgcagacgaactatgccagtgacctgagaagtattcttaaaacactgtttgaggtcatggccaccaagcctgaaacagacgacaaggaaaagttaaggaagggtgagtgcccactcaggacgggctctgaggcctgcgctggtggccgtgtccctgcccacagggaggggtgctcagaaatccacaccttctggccctggggagatagggtcccgaccaagcaatcgtcgaccccaggatcccctgacctctgcactccaaatgtgccaggctgcccttcctgctggggagccaaggggcacagcagcaggcccaggaagtgcccagatgggctgcccgcccaggaagtcactccacccctgcaaacgagcagatgggccagggcccatggcttgtgcccacagccccggcttctgtcccctgcatgtgcagcagcaaggtgactgcacctctgcgtctgatggaggctgggagaacccaaaccctccctcttaaggatgagactcggccgtggtgccacgtctcttctaccgagagctgcccctcagagcagcccgaggctgcccaccccgaacccgcctctctatgggggtggaaaggagtccactgctgcccatgagctgctgaggtatcacacatgcttgacacagcagaagcacacaggcatgctctcacagccatggtcacacagagacacgtgcacatacacgtgcacacatgtactcacgcatacccacacccacacacatgcacacatgtgcacatacgctcccactcacacgtgcgcacatgttatctgggagggagaaggcagggactggttaggcacagggagtctggccctcggtccctgtaggatccagggtgggaaaggggactaagcccctactcgccacccctggtgctctggtgctgagctgaggcacttgttccagcagagccatccctcaccacagaggcttctgttcatggggcgtccgggcacatggggcagcccgcctggtcctggagccctggcccagcagggcatacccttgccagcagggaggagcccatgtgccgacccagctctgccctgccgaatccacaccgccaggctgcattctaccagggaggttggcaggactgccttctggaaatcatgattcagagacggcaggtgacatggccctgttctgcacacggaggttgtgagctgcagtcctggccacacacgtgccatgcaggggctccagggctggatgcccctgtcagggggagcagccacaggcttctgggcccccatgttgtgcaaaggagaggcccctgctcaggaagacccccagccaggatcggcgcccaacctgctgtggtgccacctgccatgagactgccagtgggcttggggagctgaccgactgctggaagcccccagctgtgcccagcaagtgcaggtgaccctgcatcaattgcccgcctccctcaccataccccgacggccccccttctccactagtcacccagactctgcggagtgcggccttggaggactgtgcactgtgccaggagaccctgtcatcctctgaactggcagccaagacccgcgatggggactttgaaggtgtgtgggaggctctgggtcaggacactgcactagacaccagtgggggctgtgggagccacaggagccttcctcctgggggaggggctgcaggccaccctgtccgggcatgtgggagctgggagaccgcccccccggaggctggctggaggccaggcggcttggcagtctggaaaggagggcccagggtaggttgagggtcccggcccagcccacctgctcctgccgtcgctgatgtgacgctgctgttgttgtgacagaccccccggagtgggtgccagacgaggcctgtggcttctgcacggcgtgcaaagcacccttcaccgtcatccgccggaagcaccactgccgcagctgtgggaaggtgggtgagaccccttgcacggagggtccctcagcatccaagggcgtccacggacagagcctgaggtctggaagtcagaaccgatgcccagggaggccagcgaggcctgtggggtcttgtgcagaggcccctggaggtcccgggccctgttctgactccaggcatttgaccacgggaacctggatggtgcccatgtccagtcccggctgctgcagagccagccacagagaggggacagcgagtgtgaacaggagcctgcagcagccttggtgcaggacgtggacccctcatagagtccagcctcctgaaggtcacaacccctggcagctggggctgggcagtccccacccaccaatgcggcctgagctgggtgggtaggtgtgtgggagggcgaggagccagggtgggtggggctggtctgccgcagaccctcactgccccaaccccattccagatcttctgctcgcgctgctcctcgcactcagcaccgctgccccgctacgggcaggtgaagccggtccgagtgtgcacccactgctacatgttccatgtcacgcccttctacagcgacaaggccggcctgtgacgtggtgccaggggcagccccaacccacccgggccaggaacccccaggaaggtggggccacgctgcaggcaggtctcactgcgtctcatgaggccgctgccgctgctgcaggggcacccagacctccagagcatccagagcctctgtcctgcccacgctagcctccctgcagggaccccgggccggctgcaggggccaacaagaggtcagctttgcccagcaggggacccggaggagcctggtggctgcctcagggcagggtgcctggcggagaaggcctgggccctcccactggtccctcggagatctgctggggctatgggaatcggggcgggtgatggaggtggacaagagtggggccactctgcgcctctgctgttgcggtgaatctggaagccggagcaagggccactccacaggctctttggcacagcagggctccctatgtgcctcccaaacgtcaaatgcaggctacccattctccccatcagctgcccacctcgttccccagccctcacccctcacccctcaccatccttcctcaggacttggctaaacaacatgcatctcatttcttcttggagtggggagatgcgggaagctgacccagtggtcctctaggcaggcagggtgctcctggtgtctgcccaccactgtccccttgctgatggcatgggggtccgaccaggcactgacaccgcaggcagaggttgctcggggccttgggtcgggtttaccaatcagccaggacgcccggggccaccagctcagctaccacttccccttccctctgcaccctctggaaccctggcccaattcctcagaccccagagtggcctgggacccaagctgccgcagctgagtggccccagcggacacctcctcaggcttaaatctcaggcttcacattgcaatgacgattgcagttttatttttggagatgacacacctactgcttcttttctaggataaatctaattactgtttactggtggagtacatatgcatagaaacggcttctgtcggggggagagtatataatggaggaaatattatgtattgagattatatttattttctaaatgctgtaatttgaagccatttccataaatctatttaaggattgcagacgctctcctttcttccatgaacgcggatcttttttctctgtctggaaagcgatggtgttggtgctaacatgcattgtcctctaagaagctggaggctcctggactcttgggacgactgaagggcgggacttggctcccaccagccctcaggagcagtggccaccccctgcttcctgcaagctccttcccaccttccagggctctgcccctgtgatgcccatccccccctgcccatctacctgcccagctcctcttctcacaggcatcttcagctcagccctctggcctgtggggggcagggttagtgctcatagccaccccgacttggggcctgccctgcctggtggccctggtcgtagggctgtgctaatcacgcctggagcggctgccttctggagtgtcctggagagaactcaggagggcggccgcagcccaggttgcctcgacgatgggcctgtgcccacaggactcgggtaccctgccctttggagatgggcactggtgggtaggcagatactgggcttgctttctttctggcaacggagaaagtgttttggaatgtggggccctgtctgagcagggctgagttattcgggagcagaggagaagggatatccgggggactctgagatggcctgcctgcccccacgcccaccccagcggacagctgtgctgcacgaagctgcgccacatcccctggctcctcacaggcacccacggtggccgccttccgggctaaggcaaggggctcctcctcgtccaccaggtcagcagtggcagagggagcggagaccaagaagggtcttcccctcagaggtctggatgtggcctgtgtccccggcagccctccagaccagccttggcctgccttgtgcaggggggaggggagagggcagcccctctaagagctgccctgcaggaaagcctggggtcgcaggatccccccagaaagggtgaccaactctcttgttcccccaggaatgagaggttttctgggctgcgggactttccatactaaaggcaggacatgtggtcaccacccacccacggggctgttcccaccccaagggcagagtcaggacctggggatgagaggggctgggccaaggcagaaccagctctggaaggctctaaaagggatggcctgtcgcccacccacagctggggctggggactgcagtctctgggttgggggcaggagagtgccatggggtctggttgtggggtcagcccctgtgggcctcagtttctccaccatcaccatcattgctgttgtttcctgagcagggctgtctcctctcctcccacagcccctcgagggagcagcatccccgtgttgtaggtggggaaactgaggttcgaggaggtctgtgacagaactgggttgtgcgtatctaggagggtctccaagaggcagacacagaagttcctgcgatgggaggggctccaggaagcactggccgtggccgatggtgcctggatggtgtctggaggccatttccagggaaggctgctgcggaggcaggggcgtccccacccgagcacccgggttcctggtcccagcagctgcagaaaggctggggctgcctgggccaggcctccctgcgctgcccgggctatgcacaggactgggaggatcccccaagctccctgtgtccaaggggctcaggaggaagcctggggcaaagagaccattgccatacctgatcttggggaggtgggacgaggtgggggagaagggagaagccccaccctgtcctgccctgcccactgcaggctgaggcgtctcccgaggccctcacccacctgcactgtggcgggtcccctgtggctcacctgtacagcggcccttcctcgggcagcaagctccccacccacactggctgtgctggttcctgggctgatggggataaggaggctgtgagcaaaggggcaggtggctctggggaggcctggggcgagaatgcagggaggctcagaagtggtgggcgtccttgctgggccagggagccggtctgaggcagggactgtcccctcctatcctgcggcccagacccggccccaccccccaccgcagcccttgcttatcttcaggagtcctggtgttgtccctaatggccaccaaggcccgcccaactccactgcctcctcgaagcagtgcaacttgaggtgttggggtctccccaccgtggccaggcaccctaagtctggacagagaccccagcgcggccgacccggtagccaggccctagtcctcagggtcctacacctgggaggaagatccagagaggccctagctggtacagcaatgaccaagggcaggacagaccatgcccccagtgttcctggttggagccggacgcctgtaccaccagggctaggcggggagctggcagaaccctggggaggcagctttatggcatctgtgcactgatgcctccctccaccagcacccagccactgctcttcccaccctctggactctgcagtgggagctcaggggaggcaggcaggcctcaaagtgcccgcccacactacccccatgccccagagtcctggaggtgctcccaggccccatagacccacctcctccaggaagccttcccagatagcagcacccctaccattcacgagaggaggacctgctcttctaccccaggcctcagggaagaaagggggtcccggaacagcagcagggccaggcagggcctgtccagcttcagaggtcctggccctccgaattttaaaggccacccccagacaccacagcaagtgccttgaatctgcagccacggcctctttcataaacttgtttttctcttgtaaaagtgtttgaaaggaaaatttcctcttttgcttttggacattttgggccataggaaattcatttaacttatagttgtctgagttgtctgggggtcttctgcatgctgggaaaaccttttaaagtgagaaaaaaaatctaccccaccaattgttcacaaatagaattatctgattttaaatttaaaaataacgctgacattatgtttggttatataaacatttaattacatctccatgcattttgattgtgccgtcttcttttcgtattctggagacagtgttttcctgagtgtcaaactttttggaaggcccccaagaggcctggcctggggcccgtggctggccagccgggcagccaaagctccacccgggttctcagcgagactctgctactgaccggctgagactgggcaggccctgtctctcctaagccctgtctctctgtgggcagggccgaggggttggaggctcttgctgatttggagctgatgttcacattcctggcacttcctgggcaccccttagtgcccagcccactgctgtgcagggctttgcatgcatccttcatgacacaccccaaccacccaagaggcaagtactgtcacccccgattttacagcccaggaaacaggcccagggaagctgacaggactagaatccagggtggcttcaaggagaggcaccatagggactccccctggtgccgggacacaaccaggcctcttggtgcaggggagccaaggcctcgggggactgggtgcgtgctgagctggtcacagctctccagccctgacccgggccaccccactgacctagaacctgccacccctcagggctgtggagatggggactgtgctgcaggattctgacggagtggaggcagggcagcctcccgccctgaatgctggtgcaggggacctgggggctgctggcagcccacccagtgacaggaggcccaaggtgggaggggcagggtgtcagtggccaagtttggggatcagggcctggtcagcctggaagtgtgggaaagaggctctgcagctgccggggcctcaccaaccttccctccctgggtgtgtgaggggtgctccctgaggctctgccgagactcagataccccgagaagtcatgtgtgtgtggtggccatgaggagtttgtggatcctgagtccagtgaaaggaagttggggcccagtgggcgcaggaaggccaggaagctgtcttctggaggtctctttggggctggccttagatactctcacagatcctgcgggtggggagtcagcccagtagcctttcccaagccaaaccaggaatcctttattcctattccgtcctccatatgtcccaagaggcagcactgccagccccgttcacagccagggaagctgaggctgtggcagatggggcaagataactcaggaaatccaggcagcggaagacaagcctgccgtggccttccacccaaaaccggggaagcccttctgcatgcaggccctgtcccttccctgggagcccctgcctggggtgggctggggagggccgtcgtgagggaaaggagacagagggcgaacaacccaaggagaatgtaaggctgggtggggctcagaggatggggcaggaatgagatgcaccctgggggtcccagagtggcatagagaggtcctcccagagtagggtggggggactgggctccccagggaaggaggctggagatgtctgccccctccctcctagctttcattggtgcccattggacaggtcctggctctggggaagggcagggcagggctgggcaggagcttgtgcccatggaaagctccctggagatgccacaccctgcgggggacctgccctacagaaggggacatggcccatgccctgcagggcttgggtccaactggctgacctgagccacgtcctccccactcctcaaccacccctgagactccatgggcactggtgcctgccggcactgacccaagatgcctctgcccatcttgggaaggacaagttgagacccgtgggtgtagagaccctgccaactgcaggtgggaccagtgcccctatcccccaggggctccagacctctcctggcagggctccaggcccacctgcagccatctgggccaggccaacatcacctccaggcctctcctggctgctccctccccttccctctcctcctgccattgctggccgatgcctccagtacctccctccctagctgcagctcagccctcagtcatccatcgcctcctgcagcttctcctcccaaccccaactccttcctgctcccccaggcagtggtgcccacactaccaggcaaggtttgagcccagggacaccagggaagtgcttggtcctcagtgtggtggggaggtgagggtgagtccttaaatggcctaaattgaggctaaaaatctcttagactggggtagcatgcaggtgcctccccatagacacacctgcgcacctgtgctgcccactgccacacagaacaaatctcttggcccatggcaggaagggggcgtgcactatgcccagcaggtgcacttgtactaggccaggtgtccgctttagctgtcggcagcaactcacccagtggccaaagcagggatggggcaactttgcaaaatgctcatccccaagtggagagctgggtccccagagcccaaacacaccctgctcctccccagacttgggcacctttctttaccatgcacagctctgagcagccatgcagacaaacctggagggcctcagtgctgagttcttgtgaggggctctgccttgggccctggcgtcactgtggggcgggaacaggaagggcccctgctaacatcaagggggttgtctcaatgtccatgcagggctgtctcatagcagtgtccgagttccccactgggtcctgcagggctctgtgggaacacacattattctgaagcccacaccacaggcttacacccagcaggaccagccaggccaggaggctctggcctctgcattcctatagccctgagccgtgtgtggcagcactaatctccattctgctgagatttctgggagaccccagcaaatccctgagcgtctagtcccatgtcctgatctgcaagccgggcatgcaaaacacagggagatgcacacgaagctttcacaggagtcctggtgctgaggttttgcattttttgttcagtttcattgccagcagcagcccctgtgtcccactgagtacttctggaggggtccagccaccttatgcctccacactctccagcctgcggggcctggcccttggcacatccaggccaccaacctcaaaaatcaaatcagtgagatgggtcgggcgaggtggctcacacctgtaatcccagaactttgggaggccgaggcgggcggatcacgaggtcaggagatccagaccatccatggtgaaaccccatctctactaaaaatacaaaaattagctgggcgtggtggcacgcgcctgtagtcccagctacttgggaggctgaggcaggggaatcgcttgaacccgggaggcggaggttgcagtgaactgacatcacgccactgcattccagcctgggcaacagagccgtctcaaaaaaaaaaaaaaaaaaaatctgcgagagggtggggggtgccgaggccagtctgggccagccttagggtcaggggtcactagggagacccgccagctgggatttgatgaagggttcactcccgtccccacttagggcgtcctcggccagaggtggccagcgcctgcctctaggaacgtccctgcccctcaggccagacacagagcatgcagccccccactccggggagcctctcgactctggccgcacgtctgtgtcccttccccagacctgggccctccctcagctccggcgtccactgggcgatctgaggagcccgcccgctctgggcctgtttccccactgacaccctcagagacgcctggctcttaggatcagagcgtctgcgtccctctccgaggtcccggcccttcccggggccactctgcgcccggcggggaggggagtcgttcacggccccacgcaagacccccgggcagagcgcgaggcctcgtccccccacgcagccactgctttcgtcgcgctcagacccggcggcccggcccggcccggcgcacgccccggagcgccctgcttcgctctcgtagcggagacgctcctgcgtcctaacgggcccccaggacggcgggcggtccccgcgcgctgcgcttcctctcggcaacgcgtccggctgcggcgccctcattggccgcgcgccccgccaccggccattggctcgcagtgcctgttttacataggccgctctggccaatcggcgcgcggcgcctacttaacatgcacggcggccgccagtcagctagcgcgggggccgggccaccacgtgctgttgctaagctcgggcttctaaattgttactagcgcggccggcctatcccagcccagctctgcatctgtcaacattctcggcccggcccgaggcgctcgacccgtccccattggccccagcccggcccggcgcccgcccccggggcgcgaacgccgcctcccattggctctgcgggccgccgctctcccttatgtgtcaatttgagggcctgaggcggagggtggcggccgagcgccggagtccgcggagtctggaagtgcggcggccgggcgcgcggggtgggcggcgagcggagccggccggagcgggccgggcagcggccgccgccgtcccggggcggacgggcgcgggcgggaggatggagctgaactccctgctgatcctgctggaggcggccgagtacctggagcgcagggatcgaggtagcgctcgcaccccattgtgcgcccgcggcggtgggcgggcggcggggccgtgccgggcgggggccgctgaccgcgccgtgtgtccgcagaggccgagcacggctacgcctcggtgctgcccttcgacggcgacttcgccagggagaaaacaaaggcggccggcctggtgcgcaaggccccgaacaacaggtaccgccccccgctcccgaccccgcccggcccggtccgaacccccgcccccgcccggagcgtgctctccgggccccgattcccggcccgcggccctcagcgccgccgccgcgcgccccggcggccagcctggaggaggaggcgcgcaggccgcggccgcagccccgcccggccggccccgccctcgccgtcgccatcttcccgcggccgcgcctcccgggccgctcgcgtaaacagtgccacgcgtacagcgcccgccgccggggtccgctcccgcgcccgctccccgcccccgagttgttctggacttttccaggcggtagaaaagttgtcagcgggcgctggccggtgccccgtgggtctggggaaacaggctcagccagggtctgcgggggctgccggccctaaccccttctctccgcgggtgggtgggcggcctcctttcgactggctctgccagccgaactctgctgctcggccaccttcccccgcccccaggagcctagacagagaagcgagtggaggcgctgtcctgggccctcactcctcccagggtgcccaccgcttctgcccagcctcctgacacagcgaaactccagccaccagtatgggggtcctcttttttaagacagaggccttttaagggggcgggaggagggggcaggctgcagggcaggggccccatgaagtcgttactacgggtgccagctgcgccctccataccttgacctcgtgttcaggcagcagaagccctgaagctggggtgcgtacaggtcccccgcgtggggagtggggaccctgggccggggctccccggggatttccaccctcctggctgctgtgaggaccatagcacacctggtcctgtctgggcccaccttggcccagcccttttgtgtgagcaggctgggagctgcgtttgtagggggcttcagagccccagggcatggctcattcctgtggtccacctgttctagggaatccgaaaggctggtgtagggacccatttctgtggcatcctgagccaggcgaggaattggttgagtctccagctgccctggctgggacccgtccctgagtcccagcccctggtcccctactggggacagtttggggaaggacaggagtgtgacgagggaaccattgcctcaggcctcctcagtgagcaagcccggcccccgctgccgcttctctccaaaccaagtccctgacccgtggagaactctggggcgtgagctggggctcccccagcatggagaatccaaagctgacaaccagcgtcctggccaaggctgcccgaacactgcctctatgctgagcgtttcacacatgcagccagttcatcttcaccccaggctcagagaggtgatgtgatttttatctctatggccaaggaaactgaggcaaggagaggtttggttacttgcctgccactcacccatctctgatgacgcctgttcctgagatggggtcccagctgtccacattctgctgggacagagaccatgggggcactggtgagggagacagagggctccccaactctggtgcatctcccctggctcctctgggccgagccccgctcccccggggcctgaggcagcccagggctggcggcttggccccttcctcgggtgggcagcactgccctggaggtttcctcagccagcccagacaagtagctgggcggagcagggggccagaggatctctgagcccctgacttgtccccacctgtgaggcttccatgctctgccaaggtgagggaggggacatggcacagtgaggctggggcaagggtagggagtggggccggaggacagtgtcagggttgagggaggcggcagagcactggggccagcctgcaggggggtccattctgtgggaagtgtgcttgtctcctggggtcacgggaatgctgggaacgcacttggcctggcctcagcggggacaggtcccacctctcctgagggatagagtgctcctgggacccatgttgcaaacatccccctcgatggaccccaagggtctctgggcccaggaggagctgcaagaggggccctggctgctggaggagggccccctgcctccagggtggggtccagccccgtgccacccttcaaggggtaggcaggtaggcttttatgttgaagggcacctgctgaccccgacctccctcttgactacagacccacgtggccaggctgcagtttgggctgaggacagagagtacggctcattcctgcggcctgcctattctggggaagcagaaacgctggcgtaggggcctatctctgtgaggccagtgaggagcatatggctgtggcctctgctggccctggtcggccctggctggccctggcagtgattcggaggctccttgtccagcccatgtgaccaacaggccctcccggaccctgagacctgggtctggaggctctgctgaggctacacaaggaggcccagggcctgttggtgcagcgggtgggaggggcaggcccttggcctgagtggttgggacaggagac

SEQ ID NO: 1626 - DNA, 4096 bp, Homo sapiens
gcgcggtgggcccggggctcgcggcgccctaggcgcatgtgcggcgcggggcggccgtgaccagcggagcgctgggtgtcagtgagcagcgaggagccgcgcgcccccgtacccgcgtctgtccgtgcgcccgagcgcccactcccgggtctgaggtctgcccggcgcgccgcttgcagagcatactcagggccgcgcacctgccccgcgcacctgcccgccgcccgctcggcgctccgggcttcgctagccagcctccctgcgacagcgcgggggctccggccgtgcctccgcgtccgccccgcgcctcagccgggcccgggcgcagcgctgcggagggcgagggccgcccggagtccggccagggccggcgcggcgatgatgaacaggttccgaaagtggctctacaaacccaagaggtcggatccgcagctgcttgcccggttctactatgccgacgaggagctgaaccaggtggccgcggagctggacagcctggatgggcggaaggacccccagcggtgcacgctgctggtcagccagttccgctcctgtcaggacaatgtgttgaacatcattaaccagatcatggatgagtgcatcccccaggaccgcgcccccagagatttctgcgtcaagttccctgaggagatccggcacgacaacctggccggccagctgtggttcggtgccgagtgcctggccgccggctccatcatcatgaaccgggagctggagagcatggccatgcgcccgctggccaaggagctgacgcgcagcctggaggacgtgcggggcgccctccgtgaccaggcgctgcgggacctgaacacctacacagagaagatgagggaagcgctgaggcacttcgacgtcctgttcgcggagtttgagctcagctacgtctcggccatggtgcctgtgaagtcccccagggagtactacgtgcagcaggaggtcatcgtgctcttctgcgagacggtggagagggccctggacttcgggtacctgactcaggacatgattgatgactacgagccggccctcatgttcagcatccccaggctggccatcgtgtgtggcctcgtggtctatgcggacggacctctgaacttggaccgcaaggtggaagacatgtccgagctgttccggcccttccacacgttgctgcggaaaataagggatttgctgcagacgctgacggaggaggagctgcacacgctggaacggaacctctgcatttcccaagacgtggagttccccatccgcgcagacgtgcagggacccgctgccctggcgcctgccctctctgcccctctcccccctgaggggccactctcagctaaggccaaagacccggatgcagagctggcctgctccatgcagtacgacgaccaggagctggagcagctcagccgcatggtccacagggcgggggacgagatgtcctctttgctttcaccgcccattgcctgccagtccccagctcacaggccaggagcggagggcagcccaggcggggaggcctctccaggtagaccgcgcctgcggtcaggcagtgacgaggaggagcgcgtgttcttcatggatgacgtggaggggacggcagaagccctggccaggcccgagtccccagctggcccatttgggtgggcaggcagtacctgggccgacccccaggagaaagggcagggtgggccaggcggagcggcggggatcagcttgcccgcctcggaaaaggaggaggacttgagcaacaacaatctcgaggccgagggcacagatggggccagcctcgcgggcaccagctcctgcagctgcctggactcgcggctgcacctggacggctgggaggtgggtgcggatgacgcagagacggctgagatgatcgcccaccggacagggggcatgaagctctcagccacggtcatcttcaaccccaaatcgcccacttccctggactctgcggtcgccacccaggaggccgcctcggagcccgtggccgaggggatggatggcggcccccacaagcttagcactggggccaccaactgccttctgcattcctgcgtgtgctgtgggagctgcggggacagcagggaggacgtggtggagcgtctgcgggagaagtgcagcccgggaggcgtcattggtgcctcgtacgctgccggcttagccaaggccagcgacagggcccctgagagacaggaggaggcgcccccaccctcagaagatgcctccaacgggcgggagcccaaagcccccacttccgacaagtgcctgcctcacacctcaggttcccaggtggacacagcgagtgggctgcaaggagaggctggggttgcaggtcagcaggagccagaggccagagagctgcatgctgggagcccctcggctcacgaggcgcctcaggccctgtcgggctccagcagctccacagctgggtcctgctcctcagacaagatggggccagaggcggccccagcagccacgcatgctgccccacaggccacaagagagaagatccggtccaggtttcacggcagccacgacctcatccaccgcctgttcgtctgcatttcaggtgtggctgaccagctgcagacgaactatgccagtgacctgagaagtattcttaaaacactgtttgaggtcatggccaccaagcctgaaacagacgacaaggaaaagttaaggaaggtcacccagactctgcggagtgcggccttggaggactgtgcactgtgccaggagaccctgtcatcctctgaactggcagccaagacccgcgatggggactttgaagaccccccggagtgggtgccagacgaggcctgtggcttctgcacggcgtgcaaagcacccttcaccgtcatccgccggaagcaccactgccgcagctgtgggaagatcttctgctcgcgctgctcctcgcactcagcaccgctgccccgctacgggcaggtgaagccggtccgagtgtgcacccactgctacatgttccatgtcacgcccttctacagcgacaaggccggcctgtgacgtggtgccaggggcagccccaacccacccgggccaggaacccccaggaaggtggggccacgctgcaggcaggtctcactgcgtctcatgaggccgctgccgctgctgcaggggcacccagacctccagagcatccagagcctctgtcctgcccacgctagcctccctgcagggaccccgggccggctgcaggggccaacaagaggtcagctttgcccagcaggggacccggaggagcctggtggctgcctcagggcagggtgcctggcggagaaggcctgggccctcccactggtccctcggagatctgctggggctatgggaatcggggcgggtgatggaggtggacaagagtggggccactctgcgcctctgctgttgcggtgaatctggaagccggagcaagggccactccacaggctctttggcacagcagggctccctatgtgcctcccaaacgtcaaatgcaggctacccattctccccatcagctgcccacctcgttccccagccctcacccctcacccctcaccatccttcctcaggacttggctaaacaacatgcatctcatttcttcttggagtggggagatgcgggaagctgacccagtggtcctctaggcaggcagggtgctcctggtgtctgcccaccactgtccccttgctgatggcatgggggtccgaccaggcactgacaccgcaggcagaggttgctcggggccttgggtcgggtttaccaatcagccaggacgcccggggccaccagctcagctaccacttccccttccctctgcaccctctggaaccctggcccaattcctcagaccccagagtggcctgggacccaagctgccgcagctgagtggccccagcggacacctcctcaggcttaaatctcaggcttcacattgcaatgacgattgcagttttatttttggagatgacacacctactgcttcttttctaggataaatctaattactgtttactggtggagtacatatgcatagaaacggcttctgtcggggggagagtatataatggaggaaatatt

SEQ ID NO: 1627 - protein, 879 aa, Homo sapiens
MMNRFRKWLYKPKRSDPQLLARFYYADEELNQVAAELDSLDGRKDPQRCTLLVSQFRSCQDNVLNIINQIMDECIPQDRAPRDFCVKFPEEIRHDNLAGQLWFGAECLAAGSIIMNRELESMAMRPLAKELTRSLEDVRGALRDQALRDLNTYTEKMREALRHFDVLFAEFELSYVSAMVPVKSPREYYVQQEVIVLFCETVERALDFGYLTQDMIDDYEPALMFSIPRLAIVCGLVVYADGPLNLDRKVEDMSELFRPFHTLLRKIRDLLQTLTEEELHTLERNLCISQDVEFPIRADVQGPAAPALSAPLPPEGPLSAKAKDPDAELACSMQYDDQELEQLSRMVHRAGDEMSSLLSPPIACQSPAHRPGAEGSPGGEDGRPRLRSGSDEEERVFFMDDVEGTAEARPESPAGPFGWAGSTWADPQEKGQGGPGGAAGISLPASEKEEDLSNNNLEAEGTDGASLAGTSSCSCLDSRLHLDGWEVGADDAETAEMIAHRTGGMKLSATVIFNPKSPTSLDSAVATQEAASEPVAEGMDGGPHKLSTGATNCLLHSCVCCGSCGDSREDVVERLREKCSPGGVIGASYAAGLAKASDRAPERQEEAPPPSEDNGREPKAPTSDKCLPHTSGSQVDTASGLQGEAGVAGQQEPEARELHAGSPSAHEAPQALSGSSSSTAGSCSSDKMGPEAAPAATHAAPQATREKIRSRFHGSHDLIHRLFVCISGVADQLQTNYASDLRSILKTLFEVMATKPETDDKEKLRKVTQTLRSAALEDCALCQETLSSSELAAKTRDGDFEDPPEWVPDEACGFCTACKAPFTVIRRKHHCRSCGKIFCSRCSSHSAPLPRYGQVKPVRVCTHCYMFHVTPFYSDKAGL

SEQ ID NO: 1628 - DNA, 4686 bp, Homo sapiens
gcgcggtgggcccggggctcgcggcgccctaggcgcatgtgcggcgcggggcggccgtgaccagcggagcgctgggtgtcagtgagcagcgaggagccgcgcgcccccgtacccgcgtctgtccgtgcgcccgagcgcccactcccgggtctgaggtctgcccggcgcgccgcttgcagagcatactcagggccgcgcacctgccccgcgcacctgcccgccgcccgctcggcgctccgggcttcgctagccagcctccctgcgacagcgcgggggctccggccgtgcctccgcgtccgccccgcgcctcagccgggcccgggcgcagcgctgcggagggcgagggccgcccggagtccggccagggccggcgcggcgatgatgaacaggttccgaaagtggctctacaaacccaagaggtcggatccgcagctgcttgcccggttctactatgccgacgaggagctgaaccaggtggccgcggagctggacagcctggatgggcggaaggacccccagcggtgcacgctgctggtcagccagttccgctcctgtcaggacaatgtgttgaacatcattaaccagatcatggatgagtgcatcccccaggaccgcgcccccagagatttctgcgtcaagttccctgaggagatccggcacgacaacctggccggccagctgtggttcggtgccgagtgcctggccgccggctccatcatcatgaaccgggagctggagagcatggccatgcgcccgctggccaaggagctgacgcgcagcctggaggacgtgcggggcgccctccgtgaccaggcgctgcgggacctgaacacctacacagagaagatgagggaagcgctgaggcacttcgacgtcctgttcgcggagtttgagctcagctacgtctcggccatggtgcctgtgaagtcccccagggagtactacgtgcagcaggaggtcatcgtgctcttctgcgagacggtggagagggccctggacttcgggtacctgactcaggacatgattgatgactacgagccggccctcatgttcagcatccccaggctggccatcgtgtgtggcctcgtggtctatgcggacggacctctgaacttggaccgcaaggtggaagacatgtccgagctgttccggcccttccacacgttgctgcggaaaataagggatttgctgcagacgctgacggaggaggagctgcacacgctggaacggaacctctgcatttcccaagacgtggagttccccatccgcgcagacgtgcagggacccgctgccctggcgcctgccctctctgcccctctcccccctgaggggccactctcagctaaggccaaagacccggatgcagagctggcctgctccatgcagtacgacgaccaggagctggagcagctcagccgcatggtccacagggcgggggacgagatgtcctctttgctttcaccgcccattgcctgccagtccccagctcacaggccaggagcggagggcagcccaggcggggaggcctctccaggtagaccgcgcctgcggtcaggcagtgacgaggaggagcgcgtgttcttcatggatgacgtggaggggacggcagaagccctggccaggcccgagtccccagctggcccatttgggtgggcaggcagtacctgggccgacccccaggagaaagggcagggtgggccaggcggagcggcggggatcagcttgcccgcctcggaaaaggaggaggacttgagcaacaacaatctcgaggccgagggcacagatggggccagcctcgcgggcaccagctcctgcagctgcctggactcgcggctgcacctggacggctgggaggtgggtgcggatgacgcagagacggctgagatgatcgcccaccggacagggggcatgaagctctcagccacggtcatcttcaaccccaaatcgcccacttccctggactctgcggtcgccacccaggaggccgcctcggagcccgtggccgaggggatggatggcggcccccacaagcttagcactggggccaccaactgccttctgcattcctgcgtgtgctgtgggagctgcggggacagcagggaggacgtggtggagcgtctgcgggagaagtgcagcccgggaggcgtcattggtgcctcgtacgctgccggcttagccaaggccagcgacagggcccctgagagacaggaggaggcgcccccaccctcagaagatgcctccaacgggcgggagcccaaagcccccacttccgacaagtgcctgcctcacacctcaggttcccaggtggacacagcgagtgggctgcaaggagaggctggggttgcaggtcagcaggagccagaggccagagagctgcatgctgggagcccctcggctcacgaggcgcctcaggccctgtcgggctccagcagctccacagctgggtcctgctcctcagacaagatggggccagaggcggccccagcagccacgcatgctgccccacaggccacaagagagaagatccggtccaggtttcacggcagccacgacctcatccaccgcctgttcgtctgcatttcaggtgtggctgaccagctgcagacgaactatgccagtgacctgagaagtattcttaaaacactgtttgaggtcatggccaccaagcctgaaacagacgacaaggaaaagttaaggaaggtcacccagactctgcggagtgcggccttggaggactgtgcactgtgccaggagaccctgtcatcctctgaactggcagccaagacccgcgatggggactttgaagaccccccggagtgggtgccagacgaggcctgtggcttctgcacggcgtgcaaagcacccttcaccgtcatccgccggaagcaccactgccgcagctgtgggaaggcatttgaccacgggaacctggatggtgcccatgtccagtcccggctgctgcagagccagccacagagaggggacagcgagtgtgaacaggagcctgcagcagccttggtgcaggacatcttctgctcgcgctgctcctcgcactcagcaccgctgccccgctacgggcaggtgaagccggtccgagtgtgcacccactgctacatgttccatgtcacgcccttctacagcgacaaggccggcctgtgacgtggtgccaggggcagccccaacccacccgggccaggaacccccaggaaggtggggccacgctgcaggcaggtctcactgcgtctcatgaggccgctgccgctgctgcaggggcacccagacctccagagcatccagagcctctgtcctgcccacgctagcctccctgcagggaccccgggccggctgcaggggccaacaagaggtcagctttgcccagcaggggacccggaggagcctggtggctgcctcagggcagggtgcctggcggagaaggcctgggccctcccactggtccctcggagatctgctggggctatgggaatcggggcgggtgatggaggtggacaagagtggggccactctgcgcctctgctgttgcggtgaatctggaagccggagcaagggccactccacaggctctttggcacagcagggctccctatgtgcctcccaaacgtcaaatgcaggctacccattctccccatcagctgcccacctcgttccccagccctcacccctcacccctcaccatccttcctcaggacttggctaaacaacatgcatctcatttcttcttggagtggggagatgcgggaagctgacccagtggtcctctaggcaggcagggtgctcctggtgtctgcccaccactgtccccttgctgatggcatgggggtccgaccaggcactgacaccgcaggcagaggttgctcggggccttgggtcgggtttaccaatcagccaggacgcccggggccaccagctcagctaccacttccccttccctctgcaccctctggaaccctggcccaattcctcagaccccagagtggcctgggacccaagctgccgcagctgagtggccccagcggacacctcctcaggcttaaatctcaggcttcacattgcaatgacgattgcagttttatttttggagatgacacacctactgcttcttttctaggataaatctaattactgtttactggtggagtacatatgcatagaaacggcttctgtcggggggagagtatataatggaggaaatattatgtattgagattatatttattttctaaatgctgtaatttgaagccatttccataaatctatttaaggattgcagacgctctcctttcttccatgaacgcggatcttttttctctgtctggaaagcgatggtgttggtgctaacatgcattgtcctctaagaagctggaggctcctggactcttgggacgactgaagggcgggacttggctcccaccagccctcaggagcagtggccaccccctgcttcctgcaagctccttcccaccttccagggctctgcccctgtgatgcccatccccccctgcccatctacctgcccagctcctcttctcacaggcatcttcagctcagccctctggcctgtggggggcagggttagtgctcatagccaccccgacttggggcctgccctgcctggtggccctggtcgtagggctgtgctaatcacgcctggagcggctgccttctgga

SEQ ID NO: 1629 - protein, 918 aa, Homo sapiens
MMNRFRKWLYKPKRSDPQLLARFYYADEELNQVAAELDSLDGRKDPQRCTLLVSQFRSCQDNVLNIINQIMDECIPQDRAPRDFCVKFPEEIRHDNLAGQLWFGAECLAAGSIIMNRELESMAMRPLAKELTRSLEDVRGALRDQALRDLNTYTEKMREALRHFDVLFAEFELSYVSAMVPVKSPREYYVQQEVIVLFCETVERALDFGYLTQDMIDDYEPALMFSIPRLAIVCGLVVYADGPLNLDRKVEDMSELFRPFHTLLRKIRDLLQTLTEEELHTLERNLCISQDVEFPIRADVQGPAAPALSAPLPPEGPLSAKAKDPDAELACSMQYDDQELEQLSRMVHRAGDEMSSLLSPPIACQSPAHRPGAEGSPGGEDGRPRLRSGSDEEERVFFMDDVEGTAEARPESPAGPFGWAGSTWADPQEKGQGGPGGAAGISLPASEKEEDLSNNNLEAEGTDGASLAGTSSCSCLDSRLHLDGWEVGADDAETAEMIAHRTGGMKLSATVIFNPKSPTSLDSAVATQEAASEPVAEGMDGGPHKLSTGATNCLLHSCVCCGSCGDSREDVVERLREKCSPGGVIGASYAAGLAKASDRAPERQEEAPPPSEDNGREPKAPTSDKCLPHTSGSQVDTASGLQGEAGVAGQQEPEARELHAGSPSAHEAPQALSGSSSSTAGSCSSDKMGPEAAPAATHAAPQATREKIRSRFHGSHDLIHRLFVCISGVADQLQTNYASDLRSILKTLFEVMATKPETDDKEKLRKVTQTLRSAALEDCALCQETLSSSELAAKTRDGDFEDPPEWVPDEACGFCTACKAPFTVIRRKHHCRSCGKAFDHGNLDGAHVQSRLLQSQPQRGDSECEQEPAAALVQDIFCSRCSSHSAPLPRYGQVKPVRVCTHCYMFHVTPFYSDKAGL

SEQ ID NO: 1630 - DNA, 134790 bp, Mus musculus
  misc_feature (1)...(134790): n = A, C, G or T/U
ttttttttccttatctgaagagacacctatcacctgaggagttccaagaagtgtttgggatgagcatcgaggagtttgaccgcctggccctgtggaagaggaatgacctcaagaagaaagccttgctgttctgacagctgccaacatcttaccaggagcctgctgggggggcagggctgaaggaccccaccagtcccctgaaaatcccctcctgcaccttgctctgcttctctgtgtcagtagggcaggcagggtgcctgcaggaggcagggtggggccaggccctgaggagcatccagcaggcatggtcccttgtatagcaaggatgctcttgcctgtagtttagggccaggtgccagcttgacccactccttcccgccacaactgggcatcagggcagtgttgcagccagctatcctaggagatagggacagagcagtcagccagcccagcacctttccggggcacctggtgtgcccacacctgtgctaggcactggggcacagagtgtctgggacgtgagtgaaagacttgtcaggggcagactctgacacagcaggaatggtaagtgtgagacttctcggagcgtgaggaggtaccaagtagccttgcagactgaggcaggggagccaggccaaagtctgcgaggcagtgggacggaggttttctacagttattgtgatagatcttttatggggaatgaatgttgacctgacagggtgccccccgctaatgctctgtgtattgtgcccctcttccagatcacccccttagttgcctaaatgatatctttcaagttacacagaagtttttattttattaaaaagtatcgcttccttacacatatgaagacatatatgcagagtttagttttacggtccctgagaaggggaccgcctccgccttacaactccccaccccactcccaccgtgcaggcctctgtgcttccagtcctccgcgctcctcacagacaggagccggtctgtttcccttcgtccctgctcctttgtatgtgtcacacagacagcctcaaagacactcactcgctcgctcagcagtgccgtttgtaaatacatgtgaaatgtatccatctccttttccctctgtcattttcccaagtcgctaagagaagagcgccccctgatggccaaatccctagaataaaggtttccccactgtggcctagtctcacatcaacctgaccagtcttcccagtaaagacactcactgtagccctccaccacataaaacacgcatgcccaggaagcatgctgtcacgtgacacagccattgactgcagcggcagagatggacagctagaggcggtgcctcctccaacctgggtgtctagaagtgggggctaactggggccctggtagcgggtatggaagagcacccctgctgcagaatgggtggacactgtggtcctgggtgactctagctgtcccctcctctgggttgccctcactttctcacatcccgggacatgtgttgagtctcattttgtgctggggttctcaccagcctggctgggccgtggaggggaacttttggtacttaatctgcttcctgccacttagcagtctggacctgcgcaactggaaaacccccacctcctcactcatgaggtgtcatgtcatgtctgatccctgggacacctgggaaaataaatggtgacacactgtaacttgcgaaaggacaaaatgtgttcaagcatgcttggttttagaagcacgggtaggatgtgtgcatggagcaggccaggccaccagggaaaaactcttgccccatccagaggtggccatgagggttggagccttggcttggtcagccttagggagccaacagctggcatctgcctacctgaggcaggatgagggtgctctgtggtaaaggctaaaggaacccccagtgcacccccagatgttagggaatgctttctagagatgcccaggattggtcttgaaagatggtctcatcaacatcacagaagggcatcccaggctgatggaacagtgagacttagaacagtcttgggtgttctggaagttttgctgtctggaaatggctaagtgttgggctggagaaagggcagaaaagaaagaaaggccagcaggggtcttcagggaaggactgatggcatcctgggttaaatgtgtgacactctctaaccttattccaatagttggcaattctgctgaactcagtgttttcgcccaaagcctagctctgtgcctcctgtgtaagcagccccatggtctaccactacccaagcaagaacctggtgcatttttggtttttcccatccctgagtcttggcaattccaccatctgccttccaactatcatctctctctctctccttgagcactgctatctccagataagcaaaggacaggaggtggcagtgtgacaaagaaccctgggtgcaggtgcaaggctttctgtcttaggaattgtggtccaggctacactcactgctcacagctcactcccaagtgccctattgttacccaacaggcaagagcaaaactgtcgaacagcagtccagttgtgccaaactgctagcagccttgagccatggctccagcctcagtgcctctgatcatcctgacccctactgggcagctggatgtcacagcccctgttctgtctgtctgtcccacacactctgggcagcatgaccttgacttaaacactggcttccttcccaggtgacacctgctccccaagtgtcctcatcatattcctggtgtattcggcaggtgtgtatgtggtgtgtttgtgaatgcatgggtacatttgattgtggagactagtctctctctctctctctctctctctctcacacacacacacacacacacacacacacacgcacgcatatacatttatataatatgttccctgttgtcctatcatgtccttcccttcctgccaaatctctacattctcccattaagaccctcctcctactttcaagtcttttttaatagaaaaaaattttttgtgtgtcgtggaaggcacacatgctacagtgcatgtgtggagatcaaaggacaacttgggcaggttgtttccttcccacatggcttccctgggattgaactcaggtcattaggctcagtggcaagtgttcttaccagttggactgtctttctgactctagtctctttgtgtgtgtgccctattgcatttaattaatgttgcttgcattaccttctgtattgatgggagtgtgtgtgtgttatatttacttgaatgagagaaacttgccaatggctatatagaaggaagatgaccctcccctagaaaccattaactttttctagctacccagggatgggtagggcattaggaacacctcccaatccatgctggaattacgtgacttctctaaatcagcccgtgctgccatgagcctagggtacaacagccacatgtccagaagacaatatttcttaccactcctcatcctatgactcttacattctttctgctttctcctccacaatttcctcagcaccttagaagagctgacactgatgtccctctatggctgagcactcagcagccgcttaggcttagttcttcaaacagttttgagtctatgtgttaatggtaacccacgatggagatctctaatgcactaatctatgggtacaagaaaaaccatttggaaggtagcttgatgctttgcagaaagcaacaatagcaggttctcttagggtctgtgaactctccagcaggggctcctgaccaggtgatagtaccaggcctgggttctctattttgggggacagggtctctcaataggatctggggctcactgcttaggacacaagactggtgagtgagcactggggatcctcctgtctctgtccccgagtgctggggttacagcatattaccatgcccggattttttgtgggtgctggggatgaaacataggtcctcatttttgcagagcccccacccctctggaggctcttcattatttcaccgatggcatccctctatctagatctaagcccacaggggctgacttgtgcatcactagcccgacatgcacaactgccctagagtatttgaacacacccaaccacatcctgtgcccactccaaaccatcacatggagtggtgctcctagaccagcgtggtccacattgtgtgatgatgggggtgttctagagccatgctatctgccctgctacctaccaatatgaaatatgaccactgtgactgagattgtcaataagctaagtagccatgtgtagcttgtggctgggcactgcaaaggattgagagttggtattacccttgcttgggacaggactcctgccgttcgttcctgtttagcaggaagcgtcctttgacagcatccatagtgtacctgccatcagtgacatctgccagctgaactctgggattcctgcacccaaaggaccctctaacaatgcatccagacctgatgatacatgcctgtgaggccaggcagcaagatcagaaagaaggctctacaagcccctatcttccactaaaagctaagtaaaagaataccaatacccgctccacaagcgttggcagactagaatcccatggccgctgcttacaatgaggcatagaggacttcctccccactagcaaaaaatccatcaccatcccaggtcccgtaggagatatttaccaggtgttccagtaccagtggcaactccaggtgggtttcctttgtcatatgattctttaagtcctgagatgaccacagatccaaaggacatcaagcaactctgaggcctacagttgtgcctctgtccagcggatagcctcttggtcttgaccccagtctcatccttccctgcctccttccaaggctactgaccctacctttatactcagagcctctggggcagtacaccaatcccaatgtgtcagcctctgggagctgctctgggccagccctgttcccagcttgggtcagctctccttctctttcaggctccttgactacctcttcggaggtaaagaaagccagatggaactcacacagggtcaggcaagttatatcagttgtggatccctccagaagctaggcctctcctcccaaagcagatagaattttggggccaggcaatctatctaatctaatcgtcctgttccagggctaagtggggttgcatggttaagtcacagctgggaggtctgttcccagcacaaagccacctctgaccaaagcagtgggaggtttgtgcttccctgagcactcatggctgagcggggcttcaggaaaggcagtggctacttcctctccttcttgagccgaaggcctgctaatggccctcagaatgactgtaagtgtgggtgtgtgggggtcagaggtcaactttggatgtcattacttgatttttttttcagatttactttatttgtgccagtgttttgcctgcatttatgtctgtgcagcatgtgtgggactggtgcgtttggtggtcagaagaggtgccgatcacatggaactggagttacagactgttatgagctgctgtgtgggttctgggaaccaaacctgggacttctgcaaaagcaagcagccagtgttcttaaccactgtaccatctctctgcagccttgccatttcctcgttgttgagacgaggtctctcattttcctggggctcactggttaggctaggccggccggtgagcgctgggatcttcatgcttctgctttctcctttctctgtgttgggatcacgagtaaggtatagcccataaatgtctctatagaccatgtggtattactgtggggaaagctttttgaaatgtgtgcatctctgcagatgctcgtggaggccagaagggggcgttagatcccttggagtgggagcagcggatctcaacccctttgtgggccacatatgagaaattctgcatatcagatatgtacgccacaattcataaccatacaaaaattacaattatgaggggtctgcaaccctataggtggaacaacaatatgaactaaccagtaccccggagcttgtgtctctagctgcatatgtatcagaagatggcctagttggccatcattggaaagagaggcccattggtcttgcaaactttatacacctcagtacaggggaacaccagggccaagaagtgggagtgggcgggtaggggagtgggggtggggaggatatgggggacttttgggataacattggaaatgtaaatgaagaaaatacctaataaagaaaaaaattacaattatgaaataacaaaataattttatggtggggggaggtcaccacaacacgaggaagtgtattaaagggtcgcagcattaggaaggttgagagtccctgagatggagttacaggtgttttgtaagctgcctcagctgaactctgaactctgatcccttgatagaaatgtaagcattcttaacgactgagccatctctttagcccctgggggaatcattaaactctaaaaaatggaagtggagctgtataaatgaacacagcatacacatattgcttgaattagacaaacaaccatttgttgcattgttcctgggagcaatgaagcatgacgtcatggttttgccagcattcacaggactcctgttggttttgggggtgtgtcatgtgaaatgtaattagagaaagacaatatgcacattgcgttgaaatttgaaaagaatcagaaactttaaggctatcttccagaaactaagctgggaggcctcggcggttaagagcactgactggtcttccagaggtcctgagttcaattcccagcaaccacatggtgcctcccgaccatctgaaatgggatccgatgccctcttctatcatgcaaacacagcacttatatacataaatgaataagtcttaagggaaaaagagagaaactaagctgcatatggtggctcacactcctgtcatctctaatcctggctcttgggaggtggggcagaaggcatgggaattcagggtcatccctgctaagttcagagttcaaagccagtttgagaacctgtttcaaaaaaagaaaaaagaaagaaaagaaagaaattgtattggccagacccagcatacaagaggctgaggcaggaggatgagccattatttacttccctcctcctcctctgtatacacatgtgcttgcatgtacacacacgcatacacacacacacaaacatgcacaaacatgaacatgcacacacacacatacacacacgcattcacacatgcacacacacatgcacatacacgcacatgcacacacacatgcacacacatgcacacaatgcacacacatgcatacacacatgcacatacacgcacatgcacacacgcacatgcacacacacatgcacgcacatacatgcacacacacacacacatgcacacacatcaggcagctgatctaatagcattacagcttgggggagttcatgggtctcaagctggggctgtggagctctaggccctgcccttcgtttctgacactctcctcctctctacctttcctacaagtgtcaaagtcaccaaacacggactgatacatgtggcgtggctatcgtttggggtgggtgttggggggaacagccacaagcaaactactagttagcacctgcatttgagtgtctatccagaagctcagctcacccaccgatgcagatcaaccttggccgaaagggtgagaggcagaggaaggagagggagccgaactgaaatcctggtcctcagagaagccgaggcgcatgcgccggacgagcctcagaggtcttctggtcccttgctcaggttctcaaggaggaagcctgagtatgaaggaggaggtgacctcacctcagagccaggaaagagattaatgtcctcccccatcagtgtagcacagacccagagtctgcagacggctcaaaaataaataagtaaaggtatttttcatgagttatgattcattttagaagaaaatatctacaattatgtttggagcctggggcactgtccacatccacattttattgctgtggagtgaactggccagaaatctatgcagatgccaacagggtctgtcatctttgaaaaagccaatttgaaaacttggactgaattgcttgagcttcggataaaatagtgaatgatgccctggaggactcctttatggccaacccctttcaactccaaccagaaccagttacccccaaccctccctggaccctgtctgctcatatgaaacgggcctgaggccactggaggacactcaggatgacagcatgagagggtaacacaggttggagtgactggcctttagacatttctgttcttagaatgttccgggccataatagccatctctcccatcctcacgccacctgccttcccctcccatcttccttggctccctttatttgtctccttctctggccttccccaagcacagctgctctcatttttgagcaaagcagcccaccatcctgcctctgtgtcccagcacagctcgtacagcaggacggtgtcccagaatgtctcgcttttctgttgtcctgataatacctggacaaaagcaagttaggaaagaacggtttctgttggcccacggctctccagctgtggtccagtccttgactgtaaggaagtcacagtgtcaggagctggaggctgctggtcctaccacactcaccttcaagaagctgaggccaattaatacctgaactcaactagatggctccttttaaaacagaccaggacttgagcccagtgacaagtgctacccaccttcagtgttagtcttcccacctcaaccaaatctaggtaactactttgtacatgcatgctcagcgatgaggtaatccttcacaacaagttaacaattaacactaaccacaccaatcaaacccattcccaagaatagctcttctcgaataaggggctgtaccaagaggccccagtgcctgggcaagcagatcatctgttggcttggggagtcagacaggaggattgaggctctgcatggactccaggactcactgaggagcggcaggctggcctgtctctggaagtaagctatttgtaatttggggggagtccaactgaggtctggtgatcactgctgactggattggatcctgcagtgatcatgtatgtggatagggcttctgatgagggtatccatcccaagagaagcatgctgtctccagccatgatcacaaaggctctcgtcagaggcagaagggaagtcttggagaagagggacaggttgtgaaatagagggaaatccacgaatgttgtagagatacattccagaacagtcctctaaggcttgggcgaattttaaagataattgagatatggataaatggaaatggtagtaggtagataggagtcatgcctggtgggggaatggaaaaacaaaaaacaaaaacaaggctctgagcaggaaagggatgagattaataattggatcctgaagtaggacagcgaaatggatctgcttggcacagcacctaaagggagttttctctttctttccacccttaatgataccaacacccttcgaccagaagacggacaaggctatgaggatcgcaattcggatggcaagaaccatcagttttcctttagaaccaattctagctttggggtgagcaccgagtaccactgagcttagtccacgtgggcgctgagcctgaagcgaaatcagatcagcgcagagtcccgggtgccggctcggacccacggccccgcccagcctctctttgttcctcctggccccgccccctccgcccaactccctaaccattggctagagggcgggttcttgctgttcagggggcggggctatggaggcaggcggggcctgtcgcgcctgcgcagagtcctccggccacagctcgcaccggcggtgtctgggctcccggtcccgaccgagagatcgctgagctgcgcagggccccgccccgggctccattgttgaggcagcgggcgctccgcgggctgcgctcctctcggccgtccagtgctcacgagccactgaatcctgaggtgaggcggcggcgactttgaacccgtagcggggccaggtgtcccacgatgtcctcgggcaaggtccccaagctggatgccctgggccgggcagggtccccagacaaggctgggcaggatctccagggccgggtagggtcatcgaggcccttcagggtgttagacaggactgaccagggactcctgacagggcagcgtctccggacagggcatggtccctatacaggggtggacggggtctccagggctaagttggatccctggaggtcagagtccccagggccaggtagggtccccgaggcccttcagggtccccagacagggctgggcagggtcagcgggctgggatggttttccaagaactgttcgaagatccggtcatccgagacctaaaggacagaccgcatatttggacttgcaggacgatcgctaaggctgaactggggttcccggcttggcagtcggctgaaatgggtcggagagtgtgctgcccggttggtggcagctgccttctcctctagagggacaggaacaccgagagggctggcctggatggacccgagcactcaggagtctgtgcgccctggcattgtctcgccgccgggtggcacagagggctctgcacctccaggtcctggccaccccacgagtgggctcttttccggccctccttcttgggtgtagctagttgattgtcaccaagagggaccgggggttgggggacccttgtgtgagggagccttcctgtttccctatgtggtgtggatggctccggaggtaactacgtggacttaagtgtgtggggaggcttggcgggtggaaaggctgtttctgtccctgtattggtacgatttcgtgtgtcagtgaaggtgacagcgtggacacgcgcgcatgggatcctggtcctgtgtcccatggcttgtcgacccaggctttgcccattcagtcctggcccccgctttgggtgtgcattgggcactggagtttcggtgaggtgagcgaagccctgtgcgtgctgggcgcagttagcctaaggtggtgtggaccggactttggtattgtctttattcagtgagttgaagcggggagcgggcggggtggggggcgctacacgggctctggagtagcccgtctgagaacgtgcccctcaccctgcgggtctctggggagcgtggggctgtcactgtgctggaagctgcaagtccagccatggagtttcttactcctgacttaggcctggcgacccagaggccggtgctgattggagggagcagagcctctctgccctcagcttcttgatttcttccgttgggaagaaaaaaaaaatctggaaagccagagagttgactttgtaactcccagtcagcgcctggcaagtggaagaaactctcccaagaacttggcgtgctgcagaatgagtttgaatcaagaaaatccacacccagggaaccaagccaaagcagttacagttggagatcagatttatgaaggcagccctggggtgaggtccagggaggggacctgatgctgcccctcaggctgggccctcctcagctactaactaatgtggagaccattcattagatactgcttctttgagcatttcaaaatcacttgtcatgtatccaggatggtgtgtgtgtgtgtgtgtgtgtgtgtgtgtgtgtgtgagagagagagagagagagagagagagagagagagagagagagagaaagaaatcaagccagtgtctttctgtggggagaaggcaggcagcatttggaactaggagtttcaataagcaacccacagtttgtcctaaaagagagcccaactctaatagcaggataggatatgaaacagctaggagccatccttgtcctgctataagatgcacacttagtctctgccatctcctacttctgtgcttgcaccagctcagctctgggtgctgagctctggcaagcttctgcctcatcaaatgttctctctgagccttccttatgttagttctgtcctttagacattgtgagtttgggccaaaagtacctatcatagcttgttaaaacaaacaaacaaacaaacaaacaaacaaaaaaaccaacactctgaaagccacagacccagtttgtaccccagagcagggaggaggtggggcccaaatgagagagcctttgtctacaccatgaatccaggtacaaagcctcaacccaccaaagatagtaaagattttttttaacctgtctgactgagtgtgttttatgatgtagagtactcgaacagagttcattgagtctaattttggccctgaagttgatttactgtccttcctgggtagtttctcctctaggttttagcagtctcacctttgaaagtcttcaagtagacaattttaaggaacattcttggccctaaacccttcattcttttaaccaaatatagcagaaggaagttggcctatggcaaagatataaaggagatatttgaaaaatgtagtctaaagagcaagctacttccttgcttctcagtttctttttacaaaggtttatccaaggactgagagatggctcgtggtcaaggttgctggctgcttgtgcagaggacctggggcggtcctatacccacatggtctagctccagggcacccaatgccatctctggcctctgcggacactgtgtgcatgtgatatgacagacatatggaggcaaaacgcccatagtcattaagtaaaataaaattgaaatttataaaggttgggtagatcatcagtgtttgggacaagtgtgtgcaatggaaacttgcactttttggtgttgtcttgcatgctttttgaaaaattaaaattaaatttgattttggcctttttgaagatttacacccccaccagagagatgtgcgtgtgcatgtgtatgtgcacatacacatggaatgccttgggaggtcagaagagggcatcagatatgctgggtctggagttgcaggcagatgggagcctcctgatgtgagtgctgaaaaccagattccctgagcacagcagcaagcatccttgaccatgaactgtctctcagcccttacactctcttacccacaaagcaccgctccagcccctttgaaccctttataattgtattctgtttgcatctccactatatcacattcctcccttaatgaagccgttgggtgcagatctgttttcaagagcatctgttggtgtgttgtcggatggagtctgccaactgcgcatttccaggtcccaatctatagccaggattttacttgagagactctgaaacaagtggaatcttaagagtaccccaagtagatgccctgggctctgcttaaatgttgaaaggctcatctgatcttagtgctaaaaacatcatgtgttaaagggttggcagaggagttcagctctaaggagcagaagccaacccttccgtgctcatctgtgtgtctgtggtgaggtgggaattcggtgtgcagagtttcttctggccgggtgtctgtgtgtagaaaggacacagttctccctgctatctagataacgacagggattgaaagttgatgatggcagctctgcctagggttgacgttctttactgcgacacatcccctttcaatttgagtttctttcctcggtttcaatttgttcaatttgagtttctttcctcggtttcatttgtagctgccttgatttctgtccagatgaagtgacaggggtttctgcacagggataggggttgatctccactattgtcctcttgcccgtattcacacatcactgaacacatcaggttggttaggtgccatctgtctgctcccaaccatgtctggagatttctgtggctgccatgagggctttaaaccatgatgtcacttcctttattctacagcttgatacctctgtaagtcaccatgtagccctcacataacagtggaggattgctcttttcagactgtatgtctacggctattgtgtcactaccactcagggcttcccaggccaccctttccactctcaggttcctatgtctgttattgcactgggacccagaaccgttccgtgtgtcgacaggatgtagatgtgaatgaggttaaggatcgcgtccgacagttctctaggaggggtcttgagttagagtttggctttttaatcaggttctctcagcctcagttccttgatctgcacaagtgcgttagttcttagtaatgcctttaaaatgttattattatttggaagattcaatgcaattacaaagagaagagttttttttttttaagttgtaaaatcctatgctgccaaagttataaaaagatgcaacattaatagtcgatttttctctgcttttctatacacactcaagagtcctggatgcggtgccaggaaacttagcattgttttatatcctgaacgatcagtatcatttggtgggcgtttcggggaaatcatcaagttcgaattccggttttatatggtttatatgaaaatgtgtgtgtgtgtgtgtgtgtgtgtgtgtctgtctgtctgtctatctatctgtctatctgagcttctgatggtttcagaaacagttcagagccacaagcaccttccatttataatttctttcttgatgttttggctcctaagggacctgactggagattcgggaaggcaaagttcagaggtcaaggccaggaaggcagccacttgttgtaattcggtatcctactcgtgaggggcaagtgtcagggtgagtccagctcttgcagcaggagggttgcttggatcattctctccccaagccatcttggcagccctatgttgactgtcccagggccagatgtcagtcctgcccccatttcctcaccaatttctactgaacacttttgttgctctaatgttgcaacaggagagcacagaggctcacaaactcagcagtgggtctcaacgaatgcctgttgagaaatgcagatattaatatacaacatcctatgtggcatcaacagacatacagagttcctgtggtgtgggaaagccagcaaacgttcctagggacgtttgatggttgaatttcctgcaacactggtattgctggactggtaaaggtaaggcagtgtattatgggaaacataaattttgtcgtcttctggacaaattagaatgcctgaaatctgtgactgtaatgaaaactgtgatctattgttttggatgaaatgtggccatccttctcttttgtggttgtgtgtgtgtgtgtgcatgtgtgactgaacccaggaccctgggcttgcaaggcaagtgttttgcttttctattaaatgaaatcctaccaggtggtagtggcacacacagcctttaatcccagcacttggaggcagaggtaggcagatctctgtgagttagaggccagcctgatctacaaagtgagttctagaacagccgagggagaaactctgtcttggaaaaaaaaaagatagaaaaaaagaaaggaaggggaaagaattccagtcctcagccctgcctctagctttaagggagttgctgaatgccacgctgctggctactcttgttaattcactgtattcgtttctttctaccacacacttaacttcctcaactaacatacacacaccagcccacactgttgctgggcagaaagcggcaaggtagtgttgttcagctctagaaggagttgcttcaggctcagtgtctcattggccatgaggagtttcttgtgaccatagaaccaggttcccattttccctacaagctagggactctgaaaggccagcctgcctgcctgcctgcctgcctgcctgcctgcctgcctgcctgcctgcctgcctgcctgcctgccttccttccttccttccttccttccttccttccttccttccttccttccttccttccttccttccttnnnnnnnnnnnnnnnnnnnnnnnnnnnnnnnnnnnnnnnnnnnnnnnnnnnnnnnnnnnnnnnnnnnnnnnnnnnnnnnnnnnnnnnnnnnnnnnnnnnnnnnnnnnnnnnnnnnnnnnnnnnnnnnnnnnnnnnnnnnnnnnnnnnnnnnnnnnnnnnnnnnnnnnnnnnnnnnnnnnnnnnnnnnnnnnnnnnnnnnnnnnnnnnnnnnnnnnnnnnnnnnnnnnnnnnnnnnnnnnnnnnnnnnnnnnnnnnnnnnnnnnnnnnnnnnnnnnnnnnnnnnnnnnnnnnnnnnnnnnnnnnnnnnnnnnnnnnnnnnnnnnnnnnnnnnnnnnnnnnnnnnnnnnnnnnnnnnnnnnnnnnnnnnnnnnnnnnnnnnnnnnnnnnnnnnnnnnnnnnnnnnnnnnnnnnnnnnnnnnnnnnnnnnnnnnnnnnnnnnnnnnnnnnnnnnnnnnnnnnnnnnnnnnnnnnnnnnnnnnnnnnnnnnnnnnnnnnnnnnnnnnnnnnnnnnnnnnnnnnnnnnnnnnnnnnnnnnnnnnnnnnnnnnnnnnnnnnnnnnnnnnnnnnnnnnnnnnnnnnnnnnnnnnnnnnnnnnnnnnnnnnnnnnnnnnnnnnnnnnnnnnnnnnnnnnnnnnnnnnnnnnnnnnnnnnnnnnnnnnnnnnnnnnnnnnnnnnnnnnnnnnnnnnnnnnnnnnnnnnnnnnnnnnnnnnnnnnnnnnnnnnnnnnnnnnnnnnnnnnnnnnnnnnnnnnnnnnnnnnnnnnnnnnnnnnnnnnnnnnnnnnnnnnnnnnnnnnnnnnnnnnnnnnnnnnnnnnnnnnnnnnnnnnnnnnnnnnnnnnnnnnnnnnnnnnnnnnnnnnnnnnnnnnnnnnnnnnnnnnnnnnnnnnnnnnnnnnnnnnnnnnnnnnnnnnnnnnnnnnnnnnnnnnnnnnnnnnnnnnnnnnnnnnnnnnnnnnnnnnnnnnnnnnnnnnnnnnnnnnnnnnnnnnnnnnnnnnnnnnnnnnnnnnnnnnnnnnnnnnnnnnnnnnnnnnnnnnnnnnnnnnnnnnnnnnnnnnnnnnnnnnnnnnnnnnnnnnnnnnnnnnnnnnnnnnnnnnnnnnnnnnnnnnnnnnnnnnnnnnnnnnnnnnnnnnnnnnnnnnnnnnnnnnnnnnnnnnnnnnnnnnnnnnnnnnnnnnnnnnnnnnnnnnnnnnnnnnnnnnnnnnnnnnnnnnnnnnnnnnnnnnnnnnnnnnnnnnnnnnnnnnnnnnnnnnnnnnnnnnnnnnnnnnnnnnnnnnnnnnnnnnnnnnnnnnnnnnnnnnnnnnnnnnnnnnnnnnnnnnnnnnnnnnnnnnnnnnnnnnnnnnnnnnnnnnnnnnnnnnnnnnnnnnnnnnnnnnnnnnnnnnnnnnnnnnnnnnnnnnnnnnnnnnnnnnnnnnnnnnnnnnnnnnnnnnnnnnnnnnnnnnnnnnnnnnnnnnnnnnnnnnnnnnnnnnnnnnnnnnnnnnnnnnnnnnnnnnnnnnnnnnnnnnnnnnnnnnnnnnnnnnnnnnnnnnnnnnnnnnnnnnnnnnnnnnnnnnnnnnnnnnnnnnnnnnnnnntatcttccctctgcaccatcacttcacccgagtcgagtcgagtatatagcgttgcattgcgttgcattgcgatagcatttcgtaacagctagatgcctggaggcctcaggctagccccccccccccccccccccagccaggagctccgggggcaggatgagggtggagaatctcagctccacccccagcggctggggagcatgggggctagaggctgagctaatcggcaaaggccagggttgtaagcagtcagccagcctccatgatggaaccttcacaagagctgggaacaatgggtttaccaagctcacctgctgctgtggctgtctggagataaggggagggagggggcagctgtgcccatggcgcccttgaagctccatgcccttttgcaaagattctcccaactttttcctctagatccttgtatgaagtttttatcattgttttaaatttcaaaaaatcctttatagtttttgtagggaggagatatgtagcacgcacacacacaaacacacgcacgcacgcacgcacacttgctcatgaaggcacacatcctgtgttcgaggatttcgttagattttcttaaacagctatgttattttctttttttcttttctttttttctttctctctctctctctctttaagatttatttatttattatatgtgagtacactgtagctgtcttcagacactccagaagagggcatcagattttgttatggatagttgtgaaccaccatgtggttgctgggatttgaactcagcacctttggaagagcagtcggtgctcttaaccgctgagccatctcaccagcccccaacagctatgttattttctaacttgcatgtaaaatgtatgtgtttttaaatgtcagccttaggattgtcacctctccagtgcagttccttttgtgatgatcgacctttgttgttgatacagaggtttgctgtgaagtttgtgacttggaagggacactgctggtgtgtatgtggacagttctgggattgcagagatgttggagacagaacacannnnnnnnnnnnnnnnnnnnccctccctccctccctccctccttcccttccatgtgaccttcagatagagcctcctgttaaatgtaagataccccttacacatgttgcttttctactcagagaaagttccaaagttggtttgaaggcagatgtgtttacttgaccacctagataagagaggaagagacggtttgtcatgcactatgacagcctcgggtctagggtttgggcacaagtgtctatggggatcagccattgtgtccactgacgtcacctgatccccttactgccacatcctgtgaggttgctttgttattttccattcatggacatgtaaactggggcaccaatggattaaacctatcaccaggggtatgaagattcccttctgtttgtctgtatgggcatgtgtgctgtgtgtgaacatgtgtgttgtgtgagtatctttgctcacacagaagacaactttcatgacttcaagagctggtttgccctttccggacactgagcctagtcatagagaatcaaacctaggatgtcaggattttgtggcaaacctttttacctgagaggcagaggcaggatgccagtgagttctaggccaacctgggccatattgagagcttgaggccaggctgcagagggagaccctgtttcaaaaacaaagatgtattgctctgactttctgtggaggtttacagtactggagacaggtcagcctcaagcagctggttttggagccttgaagtggcctgctgagagtagagttttgccaagaaatcctctgagattctgctggtggaagaaacacccaggtgggggagtttgggaccttgccttctcaaggcttagatggaggaccccttgtttctggaatagactcagctggaatgagtcagctcagctgacagtcacattctcaagggtcaggacacctactgtttcaaggcagacagcccccatccctgtgtaggaaaggttagctttgctctgaaaggaattttatgacgacccagaatctgggctggggtgtagctcagcagcagagtgtttgcctagggtgcaggatgccctggggttcaccctcacctctgtaaggaaacacaaacaaacacaaacaaaacacctagaacctttccttttaagataggacccacccgggctgggtggacttcggaatgccctgatctcctgtgcggatgctttgcgtgggggtgtgtttttcctgggagagggatttacagctttccccatgtcttcaaagtggctgggctccctaaagcttaggaatgcacactccgtacgggtcttcttctcggtcaaggctcagattttgtttaaacattaaatacccatcttaaacacagttacacaagagcacggttttaggagtcaaaagttcttcagagcttgaaacaaaaacagagcaatcaaccctgtccttctccatgccagctctgctcccaaggggccaacactttgaaggttttagctgagaaggcaggggtggagggtgggggnnnnnnnnnnnnnnnnnnnnnnnnnnnnnnnnnnnnnnnnnnnnnnnnnnnnnnnnnnnnnnnnnnnnnnnnnnnnnnnnnnnnnnnnnnnnnnnnnnnnnnnnnnnnnnnnnnnnnnnnnnnnnnnnnnnnnnnnnnnnnnnnnnnnnnnnnnnnnnnnnnnnnnnnnnnnnnnnnnnnnnnnnnnnnnnnnnnnnnnnnnnnnnnnnnnnnnnnnnnnnnnnnnnnnnnnnnnnnnnnnnnnnnnnnnnnnnnnnnnnnnnnnnnnnnnnnnnnnnnnnnnnnnnnnnnnnnnnnnnnnnnnnnnnnnnnnnnnnnnnnnnnnnnnnnnnnnnnnnnnnnnnnnnnnnnnnnnnnnnnnnnnnnnnnnnnnnnnnnnnnnnnnnnnnnnnnnnnnnnnnnnnnnnnnnnnnnnnnnnnnnnnnnnnnnnnnnnnnnnnnnnnnnnnnnnnnnnnnnnnnnnnnnnnnnnnnnnnnnnnnnnnnnnnnnnnnnnnnnnnnnnnnnnnnnnnnnnnnnnnnnnnnnnnnnnnnnnnnnnnnnnnnnnnnnnnnnnnnnnnnnnnnnnnnnnnnnnnnnnnnnnnnnnnnnnnnnnnnnnnnnnnnnnnnnnnnnnnnnnnnnnnnnnnnnnnnnnnnnnnnnnnnnnnnnnnnnnnnnnnnnnnnnnnnnnnnnnnnnnnnnnnnnnnnnnnnnnnnnnnnnnnnnnnnnnnnnnnnnnnnnnnnnnnnnnnnnnnnnnnnnnnnnnnnnnnnnnnnnnnnnnnnnnnnnnnnnnnnnnnnnnnnnnnnnnnnnnnnnnnnnnnnnnnnnnnnnnnnnnnnnnnnnnnnnnnnnnnnnnnnnnnnnnnnnnnnnnnnnnnnnnnnnnnnnnnnnnnnnnnnnnnnnnnnnnnnnnnnnnnnnnnnnnnnnnnnnnnnnnnnnnnnnnnnnnnnnnnnnnnnnccgcccactccccctttttggccctggcgttcccctgttctggggcatataaagtttgtgtgtgcaatgggcctctctttccagtgatggccgactaggccatcttttgatacatatgcagctagagtcaagagctccggggtactggttagttcataatgttgatccacctatagggttgcagatccctttagctccttgggtactttctctagctcctccattgggagccctgtgatccatccattagctgactgtgggcatccacttctgtgtttgctaggccccggcatagtctcacaagagacagctacatctgggtcctttcgataaaatcttgctagtgtatgcaatggtgtcagcgtttggatgctgattatggggtggatccctggataaggcagtctctacatggtccatcctttcatctcagctccaaactttgtctctgtaactccttccaagggtgttttgttcccacttcttcgttagattttcttaaacagctatgttattttcttttttcttttctttttttctttctctctctctctctttctctctttaagatttatttatttattatatgtgagtacactgtagctgtcttcagacactccagaagagggcatcagatttcgttatggatagttgtgaaccaccatgtggttgctgggatttgaactcaggacctttggaagagcagtcggtgctcttaaccgctgagccatctcaccagcccccaacggctatgttattttctaacttgcatgtaaaatgtatgcgtttttaaatgtcagccttaggattgtcacctctccagtgcagttccttttgtgatgatcgacctttgttgttgatacagaggtttctgtgaagtttgtgacttggaagggacactgctggtgtgtatgtggacagtctgggattcagagatgttggagacagaacacagtgttctttggggccggagagatggctcaacggttaggggctcttgcagaggacctacgttcagtccccagcaccgcatggcagctcacaaccacatgtaactacttggagacccgttgtggcctctgccgttcatggcatacacacaatgcacaggcgaactgtgcagttttagtacttttctgtggctgtgataaagcaccgtggccaaggcagcttctagaagaaaggcgtgtttgggcttatgggtctagagnnnnnnnnnnnnnnnnnnnntaagatttatttatttattatatgtgagtacactgtagctgtcttcagacactccagaagagggcatcagattttgttatggatagttgtgaaccaccatgtggttgctgggatttgaactcagcacctttggaagagcagtcggtgctcttaaccgctgagccatctcaccagcccccaacagctatgttattttctaacttgcatgtaaaatgtatgtgtttttaaatgtcagccttaggattgtcacctctccagtgcagttccttttgtgatgatcgacctttgttgttgatacagaggtttctgtgaagtttgtgacttggaagggacactgctggtgtgtatgtggacagtctgggattcagagatgttggagacagaacacagtgttctttggggccggagagatggctcaacggttaggggctcttgcagaggacctacgttcagtccccagcaccgcatggcagctcacaaccacatgtaactacttggagacccgttgtggcctctgccgttcatggcatacacacaatgcacaggcgaactgtgcagttttagtacttttctgtggctgtgataaagcaccgtggccaaggcagcttctagaagaaaggcgtgtttgggcttatgggtctagagggctaagagaccattctagcagggaaacagggtagtaggtgacaggcacggaggctggagcaggaagctgagagcctgcatcctctactgcaagttgtcctaacatactaaaaggatcaatgtgttgtccacttacaggtgcatatcttcccccccccctgttttaggcattattgagaggaggggactgaacctcgtgtgtccccccatacgaagggtgaatccctagcactggtgtgatggatgttactagcaggtggggactctgctaatcaaggtctagatgaaggtggtggggtttctgatgaggtcagttccctgacaggaagggacacaagaaagcattctctgcctccgtccttgacatgtgagaacagggactgtctgcagggaagaaagaatagcttctctagtggtcaggtctgggacatcccagcctccagatgatgagaaatagatttccgttaagccacccagagtgcgagattttgttacagcagctggcggacggatatagacagggttctagaatattgatagtgccctaaaaatagatacattcctttgtatgtaaagatggtggagtggaatcaggctgcctgtgtctgacgacttcctatcttcttttctcattgatgacctacagctaagttacacgtgccgtgattttctttgggcctctagcactccttgtctttccttttgttaaggtgcagcgtggcgttgctggcctgcttcaaggctcataatctgtgtgtggactccaagtcagtgttcagcttctgagtcaccctcatcaacttctcagtctgagagtggcacttggtggcttgttcttgtcagtgtccttgtcctggcatctgctgcttctgctctttcaccccctgtcatgttcaagccttcaagggctgcctttcagcattgctctctgatgtccaagttggagctgcccctgagcgcatcctcacgccttcaactgtgcctttttggacaacacttacccctgagcttgactagggcagcactcatgcttgttaggcagtgtcattaggttttgcaacttgtgataaagcatcgagtcttgtgcagctttattctcaaggctgccccagaacccttgccacttccttctggatgcatccaggaggctgcgttgagcatcgtggaagagcatgttcattcatagtgttaccatagagttgcaccgtttccctggaccacccctggaaagcccatccctagtcttctggaatggccagcaactgttctgtcttgtttgtagttctcatggatttccatggctatgaccatggactgaattcctaaggatgggactgttcatcaaagggtgcacacatgcacaatatcgattggcatggcggattctctttatcaggtttttattctcagaatgtgcaaccgcatgttcactattccttgaccaaatgttttattctctgccatgctacaggcaggtggaaaaattagatagtacaacactttgctgggtctcctaggacgtgttagactaggcccagagcttgttttataatttcagaatttgtttgcctcctgcgtgctgtggagaagtggatacattgctgagatgggccagtaactcctgagtttagctcctctcctagattgtctcattgatttatttaacgattgattgtgtgtgtgtgtgtgtgtgtgcacgtgcatgctcccgagtgcacatatgtagagaccagcggtcaaccccaggtgcttctcaggaatcatctaacttacttttggagacaaagtctctctcattaaacctggagctccaattaggacaggctgcctggcctttgagccccgagatccttctgtctctaccccaagcactgagctataatcaccctgccttgccgttgtgagagtgcgccatcacctgacccctctacatgggtgctggagatggacctgtgccgtcccctacctcccaggcgtgcctggcaagcccttcactggctgagccgtcccccagctcctctcctacggtgcaaacttttttcttttctggaaagcaatttaagatgtagagaattttttttaaataaatgttttgtatagatctgaaaagcaaatgcacttccgctaaggagcaggacgggctgagctattgtcagtccgtggggatcagtgcctagggctccccaactctgagacgtctttttgagtcaacacgatttgctgtgcctgcactgctgtgtgctgcttgcccgcctggcttcatgtggcagcccctgcctgaaaggcatgacatcagttttggccactgagtatttatagccgccagagactcctccatgggttgcttgtggtttcttgggggaatttgtctgcagctctcctgtccagaccacactgggtgattgctggtcaaggggtccaggaaggctgctgtctctctgaccatctctttccatgctttaaaaagcatcgtttgtttgtttgtttgtttgtttgtttaaaaattaaaaatcaaacaaccgtttggctgtttagtttgccattctttgctgattatttgaataggaagtacagaagctgttatgtggccccagttaagacactgacagctaaaatcatgatatcttgttggtctctctgccagtcctcccatcagcctgaggcaggtgacatttgtcctgctaacaattgaggcagtgtacccttgtggttaaaggaacttaccagtcccatggtcagcaagtgacacagtagatcaagcccagaagcgtggaatcccataggtcctgctcccaaatgggctctcctcccatgcaggtggaggctgcactggctgtgaggcaggctgcaatgcacatcactcttgacacttgataattgcgtcctgttccctgccttcctctgaccttttcttcttcaggctgacaccaagccactcagagagggtgaagctcctggattttcagggttcagctgtacacttcataataagaatggccttctggcagcagctcatagtgatgactctatgggttaagtaggcaattaaaccccaataaatagacatgcttgttaagagactacaagggcaaatacaagttgggagaaaaaatgtaaataacatatgggatagaggtttagtaggtacagtatataaagaactcccaaaattcaacaggaaaacaaaccattcaagtggaaaatgtaaaacacaaaacaaaacaaaacaaaacaaaacaccaccaccaccatcaaaatcaatcaaataaaccaggaagagctgattgtataaccagtaagcacacagaagacacccatcatgggctgaggatgtgtctcagtgggacagaccctgcctagtatgtgtgaggccctgggttgaaaatacagcaaaaaaacaaaacctacaacaataacaaaacccttcacagtaagatacccttaaaatgaaaagttcataacagaaaatgttgtgggaggttgggtcacaggcactggtggggaaggaaaaaaggggcaggcccccaaaggcatggtgacagtctcttagaaatctaaaccaggaaacacaagcatgtgccattgcccttgagggcatttatctcagagaaaagaagttacggtaactcgaaagcctgtgcaggtagagacatagcaattgtattctggaagcattcaggatgacattcaaggggaatggtgaggcaaaacaactgtggtccatggtccacggacttgggagatgagagttgagttccacatctgaggaggccagagctgtcagagcccgtggagctggagttagatggttatgtgttacctgacatgggtcccctgtgtgtgctgttcgcctctgagccatctctccagccccagaaggcccttggtaattttgtctccttttctgtctgtgtttgatgggacttcgtgttatctttccttcgatacacctttaagggctgcatatgcctgtgacagctgaccttgctgtctctccacctcagcagacacttcccacacccctctgctcactgcattggtatgatctgtccaagacacaaatgaaggaaccttggacaacggcctgtgcactttcccaaatacagttggaaatgtataaattgcttactgttaggaagctggaagacatgtgagaggcttctgtttgcagttttaaggtcaggggggactcccagccccacagggactgtgcggcacattggccaaagtattggtttcagagtcaaaagatctttatgtcctgcttcagtaagaggggatgggagggggattattggaaaactcactgaatttttgtgagattggtgttttttattttttaaagttattgtatttttaactgtgtgtgtgtatgtgtgtgtgtgtgtgcactcgcacttgcttgcacacattgcatatgagtgcaatgccttcagaggcaagaagagggtgtcaggtcctcctggagctagagttccaagcagttgggaggcatcagctgtgggtgctgggacctgagctcaggtattccacaaaagcaggaagtgctcttaactgtggagtcatctctctatccctcttggtttgtttccttgatgaaatgagctaaggaagcagtgtgtcccgagagcaggtgagctatactgtggcatggctcagcagcctgtaaggcatcatgtctactgggaatacagctgtgtaaacaacttctctggaacttgaagaaagcacatctgtaattctgcccgaaaacctgaaagggacagcatgcatggtttatgcccgtgagccctgggtgaggtcgagcctgagacagcccccttaggtcttatgacaagccgcgctaacctaggacacctgccccaccatgggaaggaggcatgtgctcctcctgcctgcatgcgatgggtggggtgtctccagtggagcaggacaggaatgcacatcatgtggctcagaaaaaaagccttctggtcttcctgtacttcgggtagtctgtgccaaggagggagggcaggagtgaggagtcactttctggtaacctgccaaaccttccgcagccggtctgcctacagagtgacccgcatgacaagtagaagacagtgagagacagatggaccgtgtctgctcagtgctttacggcttttgtggcctcagagcagtcagagacagggctgccagcttgctagctttccggggaatgccgggtcagaggagaggctgagacagtgaaaagaacacaggtcacttttcactgtgctgagagtgactgctgggagcaggggggtggggggtacagggcaggggtgggggacaccagagtgtgctcttcttatattaatatgtcttagccaactcaggcctcatccattactaaccctgacagcaaagggcttctaggaagattagtgatgcaggaggagttgcaaggtttgcaagaaactgaaggcttgcttgaattgctattagtggaaggcctgtaggtgtgaaacactttaaatgttcctccagcttatgtgtgtatgtatgtgcatgtgcctgtttgtgcgtatgcgtgtatgtgtgttccttcagctagtgtgcgtgtgtgtgcctgtgtgtgtgttctcattttcctttccatctcctagggatggaaacagggccctatggctcctttcctggctggtggctgaattccttcaatggtatctctgtcctccgagtttctgtgctgttagttatttatctgtccccggggctcagagcagaaccagtagtgacacggagggagcagaggccgcagagctggcttcttttgtgctgctgtgtcctccatttgcaccccgatctgaagcgtcgctgtgctgaggggtgtgtgtaggcagtacactttcactgtggttcaggcatgaatttcctcccagaattccccgggctcagttagtccccaggcttctggcagggagcaacaggaagtattttgtgtagaagcctacacccaaatctctcttcacctgcaagtttatttggtttggcctgaaataaatctgggatcccagtttctttttcctaaaacagagagtaagtgctcgtctgttgtcacagggtagacaggtctgtggtcacagggtagaggctgccctgtctcaacctgtttctagtgctcagaatcccaatgagtgtgttgacctgagccaagtgtgtgagtgtctgggacaagggctttgcaaccctggctgcacaggggatttttgagacaagcaggccagctgcgatagaatctctgagagtggagtgcagggagatgttgcttttagggatctcttgattgttcctgtgtacagcagaggctgagaacccctggtctgaggtgttgcggtgttgcaggtaggagcagtgccgaggcttcccctctactgagccttgcttcctgcagacaacagggaacaacttgacactccatctggctggaatctcccatgagcacacttaccggccttcactctgttctgaccccctcccatctctccatggagcagaaagctgataggtaattttgcaagatcaccatacatctcatttcagtggcacaggagagcctcgagtatgaagtccccagaaggtgtttattgcagtcttgtcccctgagaactgtgtgaggtggtttataagtaacgtccttagcaagagctggtcctgagcctcaccaaatgcagtgtaaccataggcaattgtttaagcttgtccacccctgattgacttcagttatgaaatggataacgggctgttgctgcccaacaggattgtctgaggatttacctgcaaatgtgtatgaactgctcaactcagtggtgccaacactagaaacactcagcaagagcgtcatggcaccgccaccttcatcacccttgtcatttttccaatatacatcttgagaatttgtttttagcttgctttctattgctgtgatgaacaccatgagcagaaggcaacctgaggaggaagagggtttgtttggcttacatttctaggttaaaattcatcactagggaagtgagagcagaaactcaggcgggaacttagaacagagagcacggaaagattgtttactggctcgctcagtggctcaggatcagcctgctttcttacacagcccagacccacctgcctagggatggcactacccacaggttgggctctcccatgtctgtcattaatcaagacagcctctcacagacacagcaataaaccaattagattaatgcagacaaatgatgttccttcttccatgatgactctaggttgcatcaagtcgacaagaaaaactaaacagggcagaggaagtaaactcgttaaagataacacatccttatcatctcttgaacactgaatgtttttattttaaattttaactggtcgcattaacttactactaaagttaatatatcctggaataccttgaattacaaatgaatatatccaaggattttataattgggccattgctactaaaacccaatttaaccttcatgaatggacagtctgacacttggttcattgctttgctttcttctcccgaacttcatggctgtaagctcgttgaccattgtcttagccaatgttctactgctgcaaagagacaccatgaccatagcaaggcaagtaattgaggctggctcacagttcagaggtttattccattattagcatggtgggaagcatggtggcttgaaggcagacatggtgctggagaggtaactgagagttctatatctggattgtcagtcaagggagactggggaaagagagagggaaggagggagggagggaaagagagagagggagagggagaggaagggagagagaagacagacagactctggatctggcatgagcattttaaaccccagagcccaccccccagtgatgtacttcctcccactaggccacacctcttaatccctcacaagttgcaccactctgtagtgaccaagtatttagatctatggacctatgggggccatttccattgaaaccactacaatcatgattcctggaaccaagggagtcaactgacaacagcctcctcagcacctcggggacatgcttctctgcagccctcagagggtgttctctgcaccgcccagcagagatgccccactcctacagtctattaactgtctcatcagcttctttctctttctagtcctccttagcacatcgtctcttcttcaacagggattgctgttcttggcagtgctgagtccccagcacctagcaatggccagcatatattatatgcttgctacatgtctaacactatattctagcagactctagggaaagcctcaagttagactgtgaagtctacagtgataaaatgtagccaattacagtatttgggaagcataagtctcttcacaggtgccatgtgacctgctgaatgactatggtgtgggtgggatggcctgtgtctggcttcttccctccttcattagaagtagtacagtatgatgacatatgctccaagccagactcttgccccactgttgagttgggtctatcctgaagccaggctgttgcctttattatgtggacaccgtatactcagctgtgaagggagaagttgtgtgtgtgtgtgtgtgtgtgtgtgtgtgatagtcaaggctctttttgttctttattttttttctacaaaaagctttacttatttttatattatgtgtatgagtatctgcttacatgtatgtacacatatgtgcctggggcctgtgaaggccagaagaattccctgaaactggagttatagatggttgtgggctgccatgtgggtgcttggaaccaatcaaattcctctgcaagaacagcaagtgctcttaactaatgagccatcttttcagcttccctgtccctttaaagagttacttgtagtttatgtatatgaatgtttgcctgcatgtatgtgagcacagcatgcgtgtccccatgtgtcctgactggttttatattaactttgccacaacctcaagtcattttgggaaagagtctcctaattggaacaatgatactagaagatttgcctacacacaagtctgtagtacgtatccctgactgatgattgatgtgggtagtgggctcacctgctcaccgtgggcagtgctactcctgggctagtgctcttgggtgctataagaaggaaggctgagcaaagccatggagcaggactcctccagggcttcttcaccagtttctgcctccaggtttctaccctgacttccctggatgatggactacaagctgtaagatgaaataagccctttccttccctcaagttgctttcggtcacagtgttttataatagcaacagaaattctaactaagacgtaaattgataccagaagtggggtactgatgtgacagacctgatcacgtttttgggaggactaggggacattgagctggcgaagccctgaatattggagcttaatgagctgttgtgggggtttggaaaggttgctgagagcagcgcagacgatgaaggcctgcctcgtgaagtctcagagggaagcaacgattcacaaatttcatgtaataatttgaattaagaaccactaaagtgaaatcttcgcttcattgggacaatctgtgctggtcagctggggttgaagtaaggctgtgcttaagagacaagcatcattgaagcatctgtaaagaattttcttaagttatcacaccaataacttaaggggtccattgttggccaaggttgtaccttgttcggcagctgaacttggtagtggaagaatcacccaggtggtgctggttttcaaggcatgaggctcatggggaacaactgaggcttgccactatgtgataggctggaacccacgaagagaacccaggagaggctgttggtgaaagtgcagcctcagttgcagtagaaggcctaggatggaagggatcttggagaaaggctgaggtttggtactgtgtgtagttcatgaagtggacccaggagagaccattggtcaaagcaagccagtaggtagcactcttccatgacctctgtatcagctctaggttctttccctgagttcctgccctgacttcccttccggagggactgtgatcaggatatctaagctgaaattatccctttcctccccaagttgcttttggtcattgttttatcacagcaataggaattgtcactaggacaccatggaagctgaagagagtatcagttctcctggatctggggttatgggtggttgtgagtcccctgatgtggatgctgggaacagaaccccagtcctctacaagagcaagtgctctttggcattaagctatttttccagctcccccagtctttttttttttgtttttgttctgtttttgtttttttgagacagggtttctctgtgtagccctggctgtcctggaactcactctgtagaacaggctggcctcgaactaaaaaatcctcctgcctctgccttccgagtgctggaattaaaggcgtgcgccaccacaccggctttttttttttttttttttaccactgagacggatttctatctcccctcagaaaggacaaaggatagaatgaccagagagttgttttctgcatttacttcctggacttggcagcccacactaggacaagatcatcttcagcaagttggaggcaggtgttggcggtctggtgcattgtggcctatctggttgtactaaggcacctggtatcagttgagtgtgtcctgtagggtgcagttgaatgaggtgatctggaaagaagagccacactgtgcatccagtgcatctgaagcgaggtcgctgagtctttttatggtagattttaaaaaagaatttcagccctcagtgtctctggttaccctcaggaaatgtaatgccatcatgtgacatcttgatgttttttgacctttgctaggggctaaaggcttttaatggtgaaacccttcttgcttcacagtgtgatatgtttgggtgacattgtggggaatatgataaaaacaaatttaagagactcatgaaaatgaagcagtttttagtgcaccattctgcagaaagagacaccagctgaaagaaaaggatcaaatggccagtgtgctgaatatggaggaaggaagtcctggctcgtcctccacaggcaggacttgccccatcccccaattccatatcctattggcttaggacacagcctgatcttatgactatgtggcaaggctcaggactgtctctttctctgaatttgggctcagtcaattggcagatgacttataactttccagtctcagagtcccccaggtggagggacgcagtgcctcttgcttgtctgtgaatctgatgagctctaagagcatcccatgctaagaaagcgctatttccttttctttttaaaaaagatttatttatttatttttatgtatatgaatacactgtagctgtacagatggttgggagccatcatgtggttgctgggaattgaactcaggacctctgctcgctccagcccagcttgctctggcccaaagatttatttattgttatacgtacgtacactgtagctgtcttcagacacaccagaagagggtgtcagatcacattacagatggttgtgagccatcatatggttgctgggatttgaactcaggaccttgggaacaacattcagtgctcttaaccgctgagctatttcaccagcccacgctatctatttcttacaatatcaaaggcattagaaaaaggatggctcttctgctgaatctctcttttcagagtggctgcttggaggggtgaggaggcagtggaggaagtgggtgttggagtcctccaggcctctcatgaaccactctgatcttgtctcgccctgttgctattaatggcaatggtgatttcttacagatttttaaaacccaagatcttatcttctgtccctcaaggaggcaggacaggcctctcctttcaacatggttttcctgtgcctcacagcagctgccagaagctgtcttggggtgcttggaacagggcttagatttggcctgaattcctagggcccagcttctaagagccaaagctggtattgctgtgagccagaggttctcaaccttcccaatgctgcaaccttgaatacagttcttcatgttgtggtgaccccccctcccccaaacaaagaaatatgctcagtgctacttcataactgtgattttgctatgtaaacatctggtatgcaggcctactgatgtgtgacccctgggaaagggttgttcaaccccctcatgacccacaggttaagaaccagtgctttaagcagtgaccctgtgggctgggattgtagtgatccatccgtactcagccctcctagagcatgaggttcttcttaaaggcaggctctgtagtcctttgcattcatttgccttagggcctggcttgggcccaccaaggtggatgtgtcatcagaacaagctgtcttagccggctgtagcgttcaatccacaaacaaacaaacaacttagttaaagggattttttacaccagacattttggaggaaagaaaagaaaagaaaagaaaacaaaacaaaacaaaaatccttctttcagcaagctgacctgtttgtcccttgcaattcaatttcagctcagaagagcagctgtgtgcccagagggctctgggacgtgagccccagacagatgaacctaatttgtagttgtgcgagtgtgcgctccttctgtggctttattagcccatctttccaagtggagtggatggttctataaaagtcacactgtctttttgaaaagtatgacactaattttatgggatgatctctcaaaagatgacctgccagcggctgaacacggtgctccaggctcccggccttggattcttgccttggcactgcagaggagagagcctcttacttagggctgtgagtgaagcggctcagttttgtgggcctgtggttctaggtccttatcctgagtctaggccagtctaggttgcggtttcttccaacatttaggagcaaagctggtgtgaggagggtggaggagggagctggctctctcacggctgggacgtcacagggtctccaaggccctgattgctgggcttttttaggagaggggttccaagggtcaaaaagataatgtccacgacggtgctttgtacttttcactctggaaaattccaaacctacttgcgcctttgaagcctttttcggtatgatcaagccctgcactgtgatgttttaactggtttaatggcattctatgccatgagaactttaacctactgtcattagccttgctttacaggtaaggagccggaggcccaggacagtcaagcactttgcccaaggccacagaatactttttaaacaattatgtattcatttagtttgacagttttgagacagcagtaccatgtagtccagtttgggcttctattgctaaggagctaaggctggtctcgaactcctgatcttcgtgcctctctgcttttcaagttctaggattacaggcagaggccactacacctgtccttccatcttatttgtaaagaacacatggtaattttaggtgcacgtggggcacagtgacattgcagcacatgtgtataacaatcaggtctgcacggccagctggtctgtatgatggacatgccacttctttgtgttgagaacactcaaaaccttctgcttggctgctttcaaatgctaagttgattgttatcaacgctgctgtcccagaaccctcaagcagtagttctgggagtcagagccagacttctggccccagttgtctccatcactgaagcagcctcctcctcacctaccattcctgcctcccggatcctctaagacacagcaggcccgtttgcttcacccagtctccagtctcctgagtcccccaggcctgacctgaaccgatgtgagacctaagatgggagttttgcctgtgtgtatgctggtgcaccacttatgtgcctggtgcccctgcaggccataaaagctgtcagttcccaggaactggagttatagcgagtcgtgatccaaaatgtgaatgctgtgaattgaacctttgtcctctggaagaacagtcagttctctttatctctccagcccctggtggtagttacctttatgtttagttaacatttatagttaaaggaatatttgcttttgaatgtttttcaaaagatcctaacaggtgtacatagaggattttttttttatgggcctcagttttctcatctgtaaatggggaatgaaatgcagcactgtcacagaatcctggtgagaatcgagggtgatggagtgctgagccaggcacggggagtgcagcctggcgtgtctatttcagcattgtcagaggaacagaacactggtctttgggagttcaagtagtgtgtctgtctgtgacggctgatcttggtggtcagttcaacacaggtgggaagagggaccctgggaccattgtctgtgaggccctttctgaattgctaatcgatgtgggaggaccctcccctgcccactgtgagtggtgccacctggggaaggtggacctggggtgttttaagaaagcaggctaagagctggccccgtggtaaagggccctggctggtctctgcttgcgtttcttctgccttgagctcctccctgaagatggattgcgatctgtgagcttgaaaagcaaacaaggacccttgtccctagacttgtgccaaggccaagtctcggttgtctcatgccagcagcctgtagttcccggtggggcttgtgcacccactgctgcgcaagggcagctgcttgcagtgtatgggtgcaggtgtccccgggtacatggcagccatgctggagcacctgacggccagctgagatcctggagctggctatcagcaaggacgaggagcttaagaagctgctgggcaaagtgaggcttgcgcagggcggtgtcctgctcaacatccagctgctgctgcccccccccccaaagacagagctaccctaaggtgaagggcaagtgaggatgcttgaaagggacttgacagtgtcatgtggaaggtgcttggggctttgcctttgctgcaggcctctttggggcctgccatcttgggcagtggattctcttctccattttttgtgttcctagtctgtagaatgagctggctagcactttaatgttgctgttggggattcgaggatgcgagctaacatgaaatctcactgaatgtgacaggacagaccaactcctagccagcaagcgtctgcatctatatgcctaacaaaggactcgcctgtctttgtggggagcaaattccttctgtctccttggctgtcacaggaagagtgcaaggctttgtggcatccactgtaagccctggatctcctctcctcgatttggcagctgtcacgtattgctggcacagcagagccaagtataaggcacagcttgccttgatttacattttcgggtgttggtgctatttataaacaattaagaaaagatgcggaagcctgtttatggcaagctggcaacgtcagccaaactcagagaaatctgttagtgcagcctgctcgtgtgtgagcacaaagcacttaaataaacacacacgctcgctcacatttaaagtttccgctttaagaagtgacattctggtattggccagatggtttacagagccttgtcctaaaagggcagcagtgtgtctatccgataccaggaacctgagctgtcataaaacagtcactgtgatgtttccccaaccttccgggccacttatggggagtccaagatggagggaaaaaggtgtcaccttaaaagacttcaggaagtgatcttccaacgtccttctatttattaaaggaatattatttttattttagattctgtgtgtgtgtgtgtgtgtgtgtgtgtgtgtgtgtgtgtgtgtgtgcgtgagtgtgcaggggcttgtgaaggtcagaggcatcagattcccctttggagctagagttccaggcagtcaggatgcactggatataggtgctaggaactgaattcagaccctctgcaaggcagttcctgcagccaaccgcagagctctctctccagccccacttcccttgttaacatccattatccaggacaggcagggactttcttccctactgtgtatttctctgtagccttgagccccgattatgtattttggttggtctgtcttcacttgaaaaagagatttctcactatatagccaccgcctggcacagagaatacttaataaccatttgttggatgatttcctgaatggacgggaaggggcttgtcctttcttctgtcccttttgacaggtgctgtcatgtgatcagggactctagcaagttgaggccccaggtcactctgggtagatgactctcctcaggtgcttagctgcaatgtgtggccctagagtagaaatctgaagatatcaccctcagagaggaagctgtgggtcacaggagacatggcatatgggtgggagtcacagcctgcagccatgggtgtaggtctctgtactcacagagtgacgacaatcaaggcccagctttgctgcaggtcacctgggtacagttctgggtttttgtttgtttgtttgtttgtttttgttttgttttttgttttgtttgtttgttttgtttaccactgagccatgtcctcagcccctgaagctgctcagcctcttggcttcccccacacttccctgattgtgcattgagtggtgggccatagatgcagaaaggaaacctgccggctagaaatggccacacgttttgggtctcaagaaagcagttatttttgcagtcctccaagtccactttttatgtacatcttatcaagaaataaaacgtagaaagaattttacagaaaaggataattaatcagtacagagcattagagtgtgtgcttattcatagtctggaatcaaggtacagtaggctcccctctaaagtgcaacttgaatccattagttatcgtggtgtgggcaacggttactggtggccttagacagacagatgcagcccatgctctgtctcaagacagggcataatcattttaaatttgcatgagggagaagcagatggcgtggtgagggactggtcagatgtcaggtcattgatagctttttccttccacgcatcaccctgggagttgggaccaagagcttgctgagacctgattatcatctatcccagccagctgggttctcttcatgcctggctcagaaagattgctcttttttacagctagtgaagtgcattgttgattatcttggaatcatgaaaattttacttattctaccccaaactttagaagtagaactgtccaaagatggtcctctgtgttctttttaaaaacctaggttttcttttattttctttttttaagtgtataagtcagttgagatcttctttatgagtgagtagtttgtaagtctaaaaagtgtgtgtgtgtgtgtgtgtgtgtgtgtgtgtgtgtgtgtaagccagaaggaacatcagatgccctggaactacagttacaggcagttatgagtcacctggtcttggatgctgggaaccaaacttgggcccctttgccagagcagaaggtgctcttaagccctgagccaagtagtttttgacagaatgagagggtggttgagaaggtggtttcccttgcagcatctccaggatgctgggacaagagaggccagagaaggatggtactggcaggattctgagctctggaccttagtgtctctgtttaatgttgagagttcagaatttgtgtctttaaaggtggaacctcttttcaccaaagtgcttggggccagagtacctcagaatgtagtggttttgttttgggttttgaagtgtgtggatgtcactggtcaaacattcctaatccagaactccacagtggagctgcacaaagttagaaagtttaggatccgggaacatttcaggcttcggagttccagcctttatttttttttcagccatgtctagggaaatgacagaacttgaaggaacgttcttgctcacccagtctagccatccagggtctcgtggaggcatgctgcctacctggggtgaatcggctctcacagcccccgcctgagtctttcctggctgacattatcttcttggtcctttcccactccttcccgcacacccatgtggcatcagggtgggtgactccagaaggagctttctacagttctgggactggggtgacagagagaggcattgcctgtgcttgtacaaatgagagctgaaaataatgtctccagccatgacctagccagagtattctggtggaaagtacagacacatgacacccccagtttgaatcaacaggaatttggagaagttggggtgcagaggcctcttagctttatcaagttttactttgcaccctgttgggcacactctacatgcatccttcctagtcagtcagtagcttgtgagcaggcttccagcactcttctcagcagtgggcctcaaactgcattcctctcagaaactattcttggtataaagagaatactttcgctatcaagggggagggcactgctaaggtctgggatggactcccagctatggagcctgactgcagcaaggcttcactcaggcaaagcggttgaccaatgatagcagagctgggagccgagactcctcaggggcgctgctggtggttttggcttttgagccaagctacctggcagagtctttttctctgcccgggcctcatgattctcctggctgctgtgccctgcgcccctgccgtccactcctgtgcttcagtggatccttgcattagctgggacggagaccacagctcctggctttcctgggtttttagatgttcttaggggttgggctctgggccctgttggctgaaggtcttgtttcagaaggcatctgtgtgaggcatgcatacttgtatgaggtgcacactgagtgccggttaggctggtgtggatagggtcaagtcaaggggccagtggcagttggtgacagctgtcttccgcatgtggagactgcctctgcactgcagcccttaccactccctcctccgcagcctggtccctttccctcccatctgcacattccgtctttctttggtgtccttggccattttgacattcagtttcgggccctgaaaaagaatggacagtttagacaggagaagaccataaacgattttctgtggtggtgggctggacgggtgcattctggacacgtgactgagttatcgcctgcttctctcagatcgcaggttttcagggtttagtgataattggaatcactaagaatgttattcttgcaggatttcttcagtgccactttagttgacacagctaagctcccagccgaatagatgcgtggggctgtggctgttgtctggtcgaagggaggtgtgtgagtgtgaagatcattccaaccactgaggatgaaaacatatctgggtttttttttgccatgttcattattaatcatggaggtgatgatgagctctggaacctggctctcccaagcctatgcctgtgccgtttgtttacctttgagattccagcctctcctatggccactaccaatcaatcagctggcgtcttaggtaggttgaaacctgttgaacttcttgtctcaccctccccactactcactccttcctggtactcaggatgctaggcccagttacctgctccttagcttaccttctgctctctgctcttagatcctgtggggttctagacagataagcagaagctgcaacatacttctctgggggtgcagaaggagcagagactcatgagttctcaggccattgataaagatgacgtcttgggctccgggatgaaggcctttgtgatatctgcccgtcttggagaaagacaacttctggtcccatcctgttaccaacaggaacatttcaggttgccatagtgcattttctgtgatgaattgttgacagatgaaggtcactccccactcagacagtagttatcaggcagcacacgggagcctgtgtttagtatagccttcctggattgaccctcagagatctgcaggtccagggaaggcacatatctgcactgtggaaatcatgtgtgggcaagagtgggagcaccaggtgtaaaacttgactcatgcctcctctgtcagggagggccatatcttctcagcatgctccaccctccatcccagcatcaaggtactctgaatgtttcttcaaaagtctccatttatgtggattttattgacatgaaattgagactatgggagggataaactgagcggagagtggggggacaacgaagggggatatatccttaaaacgtggtgagagcatttgtgtgtgtgtccgtccgtccttatattgccaacactgtcaatcctggatcccttatggagttttcttagctcacagtattgtggctaaaggttggtgaccatgtgaccttgaattcctagcaaatggcatcatgagaacatggaggataacttggacgagacaggaagccagggaaagatcagggaggagccagaaatatcttccactgggctctgcttcataaaggtcctatctatcacctcttttctcagccatgcagaagacagagctcacaacacaagaacccctggggccacccttgaaccttacccaagctagagcagataaaggcttcttagcatttcatatatgtatatgtgtaagtgtatatgtatgtgtacacacacacaaacacacatacatatcacatacttaatggggagagcctgacggatgggttcccctctttgtttattctaaaataattcaaacctgtggaaaagtctcaaaggagtctgtttgcctttcattctgggtcccccaaatgtggccctttctctttgtgtgcatttttttaggtgtgtgagtgtgaagccagagtgcagaggtgggaggagaagaggatgtttttaagagtgacctgagggggcaggtatagcgggctaatctagagcagtggtgaggagccaggggaggtgactgcatctggaaggagagcctagggaggtttgtttctgtttgtttctgggttggatgatggtggcgatagtagccagggctgccctgagctccgctttgtcactgtccacatcctgctctgagtaatccagaagtatctcacttgcaaaccctgttttccctaaagatcctaatcccatggagggcttacttctataatccttgagcactgcctgaggctgcccagtttgtcttgcacctgggattagtcattgccaccagcattccacagaggttatgagttctccacagaaggccctgggaaatataagatgggatctggagcgggggtctcaactgagtcaaacatctgggaaggactattgtgtagatgggattgaactgtgcatgtgtgtatttgcatatgtatttatattacacacacacacacacacacacacacacactcacactccgatcctgaatactttatgaagtttccttaccgtcttgacagctgttttctcacctatgaagtggcgtccctctcaatacagttcgttactgttaacaaaagaggcacttgcttggaggaacagctcccttgaaaagcacacgggaggctcttgtgggttccacggaggcagctatagcggtggcttggtgagcactgactgctgtcccgccagggaggggtgaagctgcatgttatcggtctaagttttccaaccattctttgggtcggagaggaacccttgataaacttcttttgtgtagtagattatactgataatgaaagtggcagtggccaggagttattgagagctttatctgtgtcaaagactgtgccaagcgctccacatagggcatagaacattcatagtcaaacctctagccaccctggctttacagagcacactcaaggctaccaaactgctgtcagcagaacttccagggccccgagtctcatgtccccgaggaacctggctcttgcccatcctgcgagtgtggcagctccagcccctgaagcgcagcctgtgtgatacgccttgcctctaatttgcttccattaacaccctggcatatgttactcagcttgaggtgcccaccgcctcgcctcctgttcccacatgctcagggggaaagaaaaccatctgccaggagatccaggaggagagacagacgccagccttgcagcctccactccctggagagccgtggcccttcctccttggagttttaaggctgtctcaggcctgctgttgggagccctgaggctatttcttctagctaacagaagagacttgatgacacagtccctggcctcagtgtcttcagatgaccggatgagaggagcccgggatacagaagcccagctgcgggctctgtggacagctggattgcaggggccagtgaggagaaggctctgcgatttacgagggatggacttcctgtaaaaggcctggtgcaggctctttgagaaagctgctgttctcaccgccatccagacttcccagtgcccccagggctgtattgctttccgagtctgtgctaccttcccagtatttccacggtgtcagaatagtgtgctttgccgtggctttcaggacttccttttggagttttacttatttctctgagcacagagcagacgcagggaagcttggatgttgtgtaggctcgtttgttggtttacaaatgacccaatggttctggggctggtgggattttctattgggtgggtgtggaatggaaacggaggtggcccctctctgatggccccttctctcctgtggcagctctagccttcttaggggccaggctgcccatgcctttgccctggctttcctacagtggaagtgtgactgagcctgcacagagtctagaaggcagctggtttcttcccaacacgatcggatgttaggttcctcatagaaagaggatgctggggcaaattgcgcccatctgccatgtccctacagggatgcagagtatgagttgtcctttatgaacatgcctcagactattatggaatagtgcaaggaggcgcaaagaagtatggactcatcagagatgttagggaaatccatgtgtcatgcatgctacctcgtatgtggaggtcagcacaacttgcaggagttagttctctccctctatgtttgggtcctggggatggaacctaggtcattcaacttggtgacagatgtctttactcacggagccatttcaacaatctccaaagttacagttttcagaacttaattggggcaggctttttatttaataaagtagtgaagagtcacaggatcaggttgggggccagctagctgtctggttgtcccccttggagatggctgagggtctgtggaagttgccagccagggttcctcctgcgtggagcctgctgtctctctccatagtcaggtggcgccggcagtagtgtgggtttagcacaggggctgtggcacaggcaggcaagacacaggggctgtggcacaggctggcaggatgcacgattgttcatttatttctcccttgtggcttttgccgtcattgttcctatgtttagaggtggttccagggccactgtgcccatctgccatgtccctgcaggaagacagagtgtgagtagttctttatgccattgttgagccttgtgccgttgaacatgcttttatccctgggcattagtgtctgcatggttgcgacgatagcatggtgcactgtacacacctcctggttgtccccgagacttggaagccctgtcgctgtgaaagatgctagtcatccggatttgaaaggatcacaaaggaagtaataccctaacatctgacctctgtagcctacaccatgcccaaggctaggcagttactcctccctccgaacgtgctccctgtgggcagtgcttggtgcgctcttccctgacctggccagctgcatttcatcaggatctggggatgaagacagaactggtttggcctgatgactcctgttctttcaatctgtgtgagctgttggtttctctaaacttcactttttctcaccaccaagatgagaaagtccactcacgattgttttatttggttccttgctttcctttgtgtttgcatgtgttctttctcactccctctgcttggaagaaccccatgtctcgagtggcaaatggcacgccctgagtggtggtggtggtggtggtgatgcaggaaggtagagcctgccttcctcctgtgggaagccaaggaagctccccgcccctgctcctaattcgtttatttgctgccaaccagtagtcttttcttaaacgcttatttatgcagctctcatattaccagataaaatagtgtttcctacttaacttgttcaccttaacctgttgcgtttctccagatctctgctactgtggctcacagagccccagtctctgactttagagctcctccctagccctggagtcagaggcccagactctcacatcctgatttgggatagccctgattggctttgtgaccaggtgccactgctggccctgggatttcatctgctttatagatgggcgttccctttatgtagctcttttgagagatttacctgggtttatgtgtgcatactttatttctttttattgctggggattactctgaaccgaacacaatgtaatgtatttacccctggcattgttaatggtcctttagtttgagcttgggctttggcagttctgtgtggctgtctacagtagtgtgtcttatgtaaatctgtgggcatgggtttctgggcccatggtgagggcatctttaaactttaggatgctgtcacactgtcctttgaggattaggggtgggataaggtcccacatcccctcccactgaggcaatgtgtttctattgtttaaaccttagtcagctggtgaatgccatgatggtttggtttgtgcatctgcatgagtgactgcagagtcttcctattcatttggtgacattttatgattctttatggtcaactgccatagctccttggcctgttcattgctgggttgtttgcctctgtatgttcttggtgttgagggtgctggcagaaaaactttgtcagacacatctattctatgtactcccattttaaaaaataatttctttgaagagttctgttttttaaacatatatcggtacttttagtgttcgtggaaatctgaggctaaaattacgtttcctcctaggtgttttatgcttccctctttagtctttgctaagtttatattttatgtgctcagatatgagagtttgtggaggctttgttgtgattgacagggctcattagaggatctctggattccctgacatgctgtggtccatattgcctgttgcctctaggcagtctttcagggactctgcctccggaggttgtcactgatgccctccccatcttgcccagacccactctccgacccttgtgctctttctttgctgatgttggaaagatggggctcaggaccctctggctcgtgaccaggccaggtcagatgggacctgacctcacttagatgtaggactgaggctgccagggatacgtggctggtctgggggatttgatgtgaagttcttggtgcatttaggtgacccataatgtaaaccctttatggtaagcaacttgatcctgaagattgtaacttagattttggaaattcaaagtttatccattgaagcacagttttcctgaaattaataacttttttttttttttcgagacagggtttctctgtgtagccctagctgtcctggaactcactctgtagaccaggctgacctgaaacccagaaatctgcctgcctctgcctcccaagtgctgggattataggcctgtgccaccaccgcctggctaataactttttttatttgcatggaaacaaatagtgtaacaatgaatccaactataaccccattagccagagatgatacaaagcgctcactctgtatctgaaaagccagggaaactggggagttgccaaggtatgtacaagctgctatccccagtaagtatggaactgggagccatgccccttgaagtagaatagcttggcaccctcagcagtggtgcctgcaggtgactgccatccactttctgtttccgttggtttgctttttcatctgaagagtttgcaacactatggagatggccttttttcaaatgtgattcacttaccttaagttattacagtaaaagtgctcttggagagctgacacagagtgttggctagatgacgtttgcgttggtttttgtggtgctggctattaatcctagtgcctggagcatttgagacaagccttctagcactgatccatactctggcccactggctgtttcatagttgtcaagattctggtgtgtgtgtactgtttgcttatttcttcatttgagtaagatgatggcattgtatttattttcttgtcactgtccactctgcccttcgtggtacccagatatttccacaatgagtttctggttatgtaatgttcacattttcttacaatgaatgaaggataaatgtgttcttcccagggctgtggagatgcttcagtgattaaagcacttgccctacagatgtgaggtcctgagttaggatccccagagccgatgaaaaggccaggtagatgaggcagccacctttaattccagcctgggaaggtggagaacgggttccggactaaattgctagtggtattagctaaataggtgagatctgggtttgattgaatgaatcaaatgaataaggtggagatcgatcaaggaggagactggacaccaatctccacgtgcacataaactcacacatgcacacatccccacacgtgtgtgcccacatacatgcaaacatccgcccacgtgaaagtaggggaaaagcagcatagcgcctccctctgcctgtaggttaataatcgtctcttcccctcatctggctttcaccatcccggctctgccttggtgctcattctggaattatcttttcagaatggagagaaatcaagaccactttttctttaagcaacaacaacacccccccaaaataaaaaaccaaaccaaccaaccaaacaaacaaacaaacaacaaaaaaaaaacgtttcccacatctgttcttggtgctatgggtccttgtgttgttcatggctctggaatatgggagcaaggatgtccagcattgaatattacccttctttaaattttgaatacatttcttttgaacatagtgccagacaactagttaatcaaattgagttgaattaaactggactgatgtaggtgggggcggggataccatgcttcccatgtcatgtctgaactctactttctaagtgacctatgagcttcctttcagcgagctcttcatgtgaacctggaactcctgccctgtgatgctgttgatgactcgcactctgacagcaaaaatcacatccagatcctgcctgccttagcatcctacaaaccaatggaagggtgtcctcacttggggcttccttgaatgagtctaacttcaaggatcatcataggttctggaaatgattgtttctggggattcttatacctgtcctcaggaactcctcctaacctgcctctaactcagttagcaaggatgctcagaaccattcccatgctctttcccacctcccccttcccccttccctttggctccagtcccgctcactccagcccataggttttttttttttttttttttttttttttttctcaatgaggatgattgtgagccaccatgtggttgctgggatttgaactcatgacctccaaaagagcagtcagtgctcttaaccactgagccatctcaccagcccccattcccatgctcttaaagactttcttcctggcatggatgaatattcccaagattctcgcagcatcttcctgtagcccagcaaatcgccactggttctgttgacacaggagcttgctaagaagagattcaggttaggctccaatcagtgtctgtgctgaggatcttatgtacagcctctgggtcttcttctgggacttaatgattcagacgtcacaggttaaatagtcatgtctacagtcacccagcctcccagatgatggctgtccagttattaagaccatcagatgctgccctgccaagggaaacttaaagacccagcagcctcaaactttggctgctacttctgggaactcagtgaccaacctttcagctgcctccttggattatctgccgaggccagggggagatgtttggaagaattcgctggaggagcctgaactgtaaccctataagggaaaatatgcatggacttactcgggtggtagctgcttcacttccttacagctggagtgccggatcccttcagtatttgcccaagaatgagctccaagcaaacaaggccctgtcagatgtggtagctgcccaaggggccctggtcttctgcctcacttttcttctgttctaaagatgtcacagaagacgcaattgctattcagggacaacattttttttttaaatctctggaattttctttttaagacacatctcaaggatcctgcctgttaaggaaagcagacattccctagtgagttcattggtttaccacccagagcaggtgcctgctggcattgtgctagatattccttcagagacgctcactgtggttcctgactgcagatcggctcctgcctggtgggagagacagacttcctcttggtacagtgtcaagtaggatggaatgagagtattcgggggaattttttgtggggaggttattagcaattcttgcaaccttggccccagtctgtgttcagtgactggcatttcatccagcgtggggtgctggatgccagggctgacaaaggaggggctccctgtacaaagatttcttcctcagcctgctgccacaggctaggcacctactgttcataatcccatttctgtcacttgttttggagatgataagatcacgagggaccaatgagaaaagagcatggaaaaatgttcatgtgttaggaggccacaagttagtgtgtgtgcagtcctcggaccagggtccagcagggagagtgaactgcggccttgagccacgcttttagtcctggaagggaaacatcctcaactgaagaattagttgtccagatcagattgacccttgaccatgtctatagggcttttccttaattgctaattggggcggggcgggggcaggggggacaacccactgtgggaggtgccattcctaggccagtgaaccttaagaaaggtagttgggtaagccaaagagagcgagcaggtaagcagggttcctccttagtcttcaggtcttgccttggcttcccttggtgatggactgggaggcagaagatgaagtaaaccctgtctttcctccctgagttgcttatggtcatggtgtttatcacaacggcagaaagcaagcaggagcagagctcagctggaagcttagcctggcaggattagactgtggtgctcggctagcccctctgtgctgtggtgagggggtcctttgaatgctgtctcagaggagttgacgcttcttatatggagagcagactgcagtgtcaaatatgagaggagagttggaagggttcctccccagcctgcctgctgtgactcctggttaggctttgatttctgtcagtggctttgcccaggacctctgttaccacatctagaaggtgaggcagtgcctgcctcaggatggaagcagggtggccccagcaagcagggccattcccattcccccatctttccagagccattgcctctcccagggagccaggccggcctcgaggctgcagcggtgcaggtgtttagcgtctgtgttctgagagggcccttctcagggtttgatccggagtcacctcaattactttcccctcccactgtccatacacaggtagcttctctaggtcacagtgggactcttgcttcatccgtgccccctgactgttccagcccagtctcccttcatcgtgagagctgactgttgtccctctaaagtactgtgttccccacgccctggcgtcttatagataacgcagacacaccgagtactttctgtgagctaagcaagccagccgccctcacagtgacgtggttgggtgggcacagtttgccttttctgtaagttgctgtcagttaatgtcctatgtcattcctgcggtgatattccagggctttctgtgtggattgttgttctcaccagctgatgaggctttgccactaggccatgtcactgatgcagagctagcagtctaatggcgtttgttaaacttaggaaacaacagtcaacattacatattaatgcgtattagatagtttatgaaaaatatcttcatttaccaaaacaaggcaagtagaaagagacattgctggctacttttgctggcatgtttgacggcaggaagacaactgtgttctcgtctacattcattcttatctatgtaaggaccaagtgccctcacttggataagtagctaggaagaagggagttttaatggcctctatagaaaaatggtgaccactttctttgcactgtaagcagcattgctgtttctggtgctgtctggctctggcacacaggagatgatgtcaggtcctttggcatttcagggggtctgttgctcacacttgctgtatagtacctgagctgtacggatcgttcactgtggctaggtgacatttgttgtacccaaaagtgatgtttctgagaggcactcttgaccttgttagaaagcatagttttggggactgttgggctcccactgactgactcagactccagaatactcaatggaacctcaaaaagatcattaaccaccccccaaaaaaaacctttgagctctttccttagaagtgatgaatatagttagttttggggtgtagctctatgccatgtccagcacacaggatgctctggcttgtggctgagaaaaaaagaaagcatgaatgaatagttgtagctgtacttgttcattcaagtcaggtgacacagatggctccaggctctgtggctccttccctggactagcatgctgctctctgcagaagggcttccagagctccagcagaggaaagggccagtctgaagtgtcgagacttgataagggcaatggttttgctacctgagtaatgtcagggaggtatcaagggcactcttgaggaagagtggctctcagatgtggggaacaccatgcctttaataacgctaggtgccagtacttgaagcttggtgccagtgcttgaggctaggtgctactacttgaagctttgtgccagtgcttgaggctaggtgccagtacttgaagcttggtgccagtgcttgagcctgggtgccaaggcttggtgtgttcatgcatgcagttttgctcttgtgtttatttgctccatcatcaaagcagtgggaagatagggtctcactgctatgaaactactgtggacctgccaacactgcaaagggtttagactgccctgcagctcacaccatcagttagagttgttgatataaccctgcattccagactcgtacaaactgtcagtgtgtgccatcatttgagcaggaaagacatgagggaggtcaccacctgaactggaatcttggctgtcctgacaccccgttatccttactggggtgtgtatagtacccctgtcatcctggtgttgggtgcagctcaaagagcaggttggggatgagccttggaatctgtgtgctggtggttatttaaaaactgatgttttgggctggtgagatggctcagtgggtaagagcacctgactgctcttccgaaggttccaagttcaaatcccagcaaccacatggtggctcacaaccatctgtaacgagatctgactccctcttttggagtgtctgaagacagctacagtgtacttacatataataaataaataaataaataaataaataaataaataaataaataaatctttaaaaaaaaaagaaatttgttaacaaaaaaaaaaaaagaaaaaagaaaactgatgttttaatctcggatctctttgtggacactgagattcagtgtcacccactgacatggaatgctatctactttgaggcccctccatctgttggctttggctctaactcttctcccgttgagctttgctgcctggaagtaaggatgaaggagccatacatgtgttaggaagatcatgagcgtgcagagggcctggcttagcattctggcttcttgtgttcaaatgtacaatatgtcatcgtgtgatcggactgaacgtgagccactgaagggaagctcacagtcctgttctgtcatctgcaaaccctcagcctgactgacgatcggtctccttcttcctctctcctttctttccagcaatggaagagttaatagttgaactccgcctctttctggagctcctggaccacgagtacctcacatcaactgtcagagagaaaaaggctgtgctcaccaacatcctgctgcgcctgcagtcatccaagggtgagtcccacaggtccttggtccagattcccagggttccaaattctcattaccccacctgtttctaaacttgatttgttctcttcccatgcatcctctgacactatcccatccatgaattctttcttcagtcttctccctccttgctgtctggtctggtctcaggtagacttttcacagttaagcagagaacctggatgccccctcccaccaccccccacccccaccccccatttgcgggattgctgtaaaggatcagagaggataaatatttgcgccattctccagagggctcaggaaaggccactcctggtctcctcctcacccagatctgtggttttgcttaattccctacaggctttgaagtgaaggaccatgctcagaaggcagaggccaacaacctgccggcaccaccccagatgcctctgccggagatccctcagccatggctggtgagttggcatccacccactacccctcactgctaaccggaggtctgggctactcacgttcctgtcagacctgtgatggaaggcaggggtgaaaggcttctctctgcctgacgtgctccctggagtgtgctcctagggtcccgaagctgctgaaaacagaaggagctcaagtttctctgtagagtcctggaaatgcaggttcttggaaatctgttaggacaggtgacggggagtccgcggtcagagtcttgtccaaggagtctgaggactctacttgcttgtgacctctgatattcattgctgtgttcaagggtggatttttttctctctcaagagagaaagaatgtgcacattacagaaatgtacgtttcagttgagttgatgtatttcaagtgggctcaggggtctctttttgctgtctttttcaactggagatgccccgaatgccattgctaacccccttcagctcttcctgtatcttcatagcgtgcagcttgctctaccaggagaactggctttcactcagatgagggtaaaaccatccctcggctactctttcctcatttgctttgtcaggttggggtctgaaccggaagaggcagggttatgccccatctgtctccgcagccctgtgtgttctcgtgctgtggccccctcgtccatggtgcctcttgcagagcactgcaccgttctcagactttactttgttctgttgggacagacattgaaaaggctcagtctgcgattgcgcagagggagatgttagcggcagtaacgagtactaataataaagccataattataacagtgcgttgtagtaaaagggatttcaagcttggtgcttatttatagaactttccacataatgcttttgattgactagagacaacgaagactgtagaatgtgatagccacagatggggggcgtagggggggacagctgttattttatgtaatcctcatggtgtggcttttaaaaaccgttgaacactttatagccgaggttctcagcctgtaggtcaagactcctggggagtgtcaaacgaccctttcacaggggtcatctaagaccgtcagaaaatacagctatattataatttatggtagtaccagattacagttatttgtttgtttgtttgtttgtttgttttggctttgttttttgtttttgtttttgttttggaaacagggtttctctgtataaccctggctgtcctggaactcactttgtagaccaggctggcctcgaactcagaaatctgcctgcctctgcctcccaagtgctgggattaaaggcgtgcgccaccactgcccagccataaatttatttttaatcattggtttcttttcttttctggttgtagaaactgtttattattattattattattattattattattattattattatatcacttgcttttcttagctacatgaaatcatattccaaaagtatttcattcagcaacattagtactttctactggaaaattgattttccaaaatatggactggatggaaatcatccattatttcctggtttaaatggattactctagactagtcttgaacccatggtattttgtggcagaccaacatttatttggtaccttctattccatcatcaacatgctgtatcttgggagtgtctcaggattcagggggaggaatggatacctagaagcgggggtgggggtggaggttgtagggattatgtggctccagcctccagctggtctttcctcctgtgtacatcctgcagggccacctggagggacagaggtgcccttttggatgccagtttcagaataagagtcctcactttgtcccattgcatttctgtggactttccttcctatctagttcacccaatgacaagttagtcaatacttagagaagagcctgcgggctatgagcatataacattgtgcggccaccaatctggtcattttgcagagggactggaggataactggcaacatatgacagttcaacaattggccaagctactctactacattttcatgagggctttttgagggtagtggggagataggtctctctgtatgtagtctaggttgacttggaattaattgtatatgccaggctggactggaatttgtaatcctcctgcctcttcccccccagttctgggatcacagatgtactctgtcatgcctgtctttctcagggtttttagtgaagactgagtttgtcaagtgagctggtgagtctgtaaattcgggtcagtttgcctttggcctggcttttggccattgattttgaaggctgactttatggcgagtttgcttcttgtaaggatggattgggaaggagaccacactgggcagagggacccccaaatgaaggcacaaacccaagagtgagccagatgtacccagaaccacgtgagtggtagatccaaatcctaggatttgggtgggtcatgcccagaggagggggcagtgctgggcaggctgatgggtgggaactgtgagcctgtcatgaaaaaaaaaacatggcatcagtcctagtttgctttcggttgtggtgataaacacaacggctgatttagtgggggaagggtttctctggcttatgtgtcctgctcactgatgggaaaaaaaaaaaaagaacaaaaatcacagcacagcgtctgtgacttataacagctacaattattttccatgtttgcaaactgattctgtgctctggtttttgtctttttgtggcttatagcatcgaataccgccttctgtctgttgctataaatacttgttgctgtgataaaaatgaccatgttgcttttcgggaagaacctggaaggctttggaattttctgctggaaagccattggatgctctgagcttactgggtcattcctgccagggcttagacggtgggagaattaggacagtggagattccagctgtgtttcagagacaagcaattacttgatcaggaattggttcaggggccagtggagtgatattttgactaagaatctgtgtgtgttgatcatgctggggctgaagaaggagcaggaaggcagtctctactctccccagtgatgggctggaatctggagttgagccaaatggaaaccctttcttctctagattattattttatcaggatagtttaaccacagcaacagaagtgaaactcattactgcttaagatcatttaaataagaattatctgtttattccttttggttgttctagtacaccagctttctgaagttatatctcttgtcatttttcaagtaaattaaaattaaagcatttgaagatggctttatgtgtccttccttccttccttccttccttccttccttccttccttccttccttcttccttttcttccttccttccttatttccttccttccttccttccttccttccttccttccttccttcatttcttccttccttccttccttccttttcagacaggctcacaatatagaccaggctggccttaagctcacagaaatccgcctgcctctgcctctccagtgctgggattaaaagtgtgtgctgccaccacacccagcttctttgttttgttttgttttgttttgttttgttttacattgcttactaatggcggccaagggttagctttgtgacatagatgctgctctcagaaaccaagggaatggtcgactcttctcaaattgcccccaagtgaacatgcctgctgccagggtgggctgtgtgaactggagatttgtgcacgccgaccatgcttcctcagctagtgctaatgttcctgagggattgggggttgtgaggtgggggtggggacgtgggaagctctgtgagcaccaggcagtgtgcagcatgcttggccctcatgccgtccccctcaggggggctacagaccaaagcagacataggtgtaacagaaccagttctgtggagagctgggctgtctggacagctcttgggtttgtttctcactgaggcctacagctcttgagctagttgtacttggtttgtagagagagctgagaggtttggactagtgggcacttcactggaagtggattccccacgtgtgcggatgttgactgacttctgcttcagttcttcacgacaaccccggctcagtgcctgtctgtggggtggggtgggctggtggtgtctgttatttggatgagaatgttcccccaagctggttaatgttttcctgacnnnnnnnnnnnnnnnnnnnnaaaaaccagcaaaaaaaaaaaagagttctaaatatggattggcagaagagagtgagagccattgggtctgccttgagtcacacctactcaatgaccaagcattcttttttttttttttttgacatgaagtgtgtttattaggaagaacactccaagcactcacaaatggttttcacaaacacttagcctaggctggaacacaaaaggatatcacaacagagtccattgggttttacttgcttacatcaccaaagaatgttcatggcagttaattttcaggctgtaaaaactacatctatggcaccaacatggaatttaaaaacaagttggatttcaaaccccaaatgccaaaaactgaaagtactatcaaacgggtctccaaagaagtctaggatgctgtgatgcaggcctgtccatatacctccctggaccctcaggtgctacctacaggcctctgctcatttcccataaacatacctcaccatcccaggacaacaaaggaatgccatgtaagaaacaaacaagactggttatctcctaccacaaacaggaatacagaaaacatggggccagattcggcaatacagacaggttagtgatgtttcgagagggctctcccaggcactgagatgcagcttagaaatatgctggagtaagctctgtcttcccatctgtggttaccacctggattaggcttcctgagtttggccgtttgttcccagtgatccagtcatggaaggtttccaccaggaactctaagggtgtccaggagctgaagtctgcctcaggcattgatttcctgttcatcggggtatccagggtaacggggagcacagcaatggcagcagccccggggggcatgccactgttcttccctgccaggctctggcagagctgatggacggctcccttggccatgccatagccgatcatcccaggagtcccatccaaggcagctttggccccagccagggtcaagaggcctccttcctttcaggtgctttgtggccaagtggctggagatagtggatgtccacatactctgcttccacatcatgtcacagtttttaaaaagtgacttggatttggcattgcccccggcccatcctccagccacacagagaattgcatccaccttctggtcacctaggagctttccaacatcagcagtgacctggtcagcctgctctgtgaatgaatctgtcatcttaacaaccacgctggcactggcctcttcgttctccaccacatcgatgctggcaacccaccagttgcgggcccggaaggcctgtacgcagcgcgagcccagagcgcccctgccgccgtacaccagcacccggcgcgcctcgcctgaagccgccatcctgttcctgacagactcgcgcggtactgaacgccgagcccaaacgcacttcgaggctcgcagcttccctgggaggaactccatgaccaagcattctaatctatggacttatagggccattcctattcaaaccaccacagctctgatatttgaagacaatgtctccagttgggggtgctgcttggggaggcttggttggggacatccttgctaaaggaaatgtgtcactgagtgtgggctttgagagcttataacctgactcacagagatccaccttcccctgcctgaggttgtcaccacaccctgctttctcagccattcttaagtgtgcagttggttgctgaatccccgtggcacccttattttgtctgacagatgggattagagaatgcgttgttatgatgtgttagagttaggccttggcagtcagagtcaggcctggagctactgattctgtgtgtggacacatagattctctgtgtgaccttaccatcccctacctctcttgtctttccagcgtctcagcatgccatctccatgtggtctggtggcatctttcctttgcattcaacctgtggaattttaggcatgcacctggatcccatgccttcagtctcctctgcttttctactcggatgctacctcctaatggctctgcttctgcactgtcataggttaaggctgagaaagcataagaaaatgcgtgctgggtcttgctgggtagtcactgttgcatgcagatcagagagtgggcggactggtgaactctgtctaaggactgtctgtcaagactagaattcttggtgttaggatgcaatctatctatctatctatctatctatctatctatctatctatctatctatctactgatctaccaatctatcaatctattgatctatcttcagttttatagcccatgggagaaaattcctggactctaatccccttggccggggaaactcagactttgacatgtttctctgtgctgccaagcatccctgctgctggtgtggggcagatctccccagaactctgattttcttatttcagattggataattgttgtctgttattctataaatacattgatttttttttttgagccaggaaagcaatatggatgcatccctggatgtgtagaattggagtcagaacgtggtttctcagctatagtcagtttgggggcttctccagtgtttcttatgcaaagacttctgtgatgtgtgaggtcatgtcatagacagggggatggtgggggagggagagctccagctctgagaagtgtttgggtgtaatggtgttgtgtaagatgggggtggggaggtatgcctctccttaggaagcaggaggtctggatgtggtgatatggactctgtagccccctccctactcccacagcccttctctgcttaacatcacaatgatgataccgaggggctcatccacctgtaactctagctcagggtccgatgtcctgttctctctgcaggcactgacatttataacacatacaggtgtgcatgtgtgcacatatgcgcatgcgctcacactatcaaaaaacaatttttttttttaaaagtggtagtattaaaaatgtaagctatgcagatataggtaggaaaggcaactttgtgctaacacttttggtaagcagtcagctttagcagagacactcaagaaatctagacagaggttggggccgcagtgttctttcacttagtggtgctgactagggtttttttaaagtcagcagctccaggctgtgctgctgtgtgtggcagcacatctgagcattcttgttttttttaaacattaatttcttcctttttttttgttttttttttgagacagggtttctctgtatagccctggctgtcctggaactcactttgtagacccagctggccttgaactcagaaatccgcctacatctgcctcccgagtgctagcccggctaaaacattaatttctatttattattatttttgtgtgtgagtgtggcagaggtaccacagcatgcatgggggaagtcagaggacaaggtctctcctctggggatccggggatcacactcaggcagtcggacttgcacagtggcctggttagggttttgttgttgttgttaacttgaagatcagcttgtaggcaggcctccttgactgatgatggaagtggatgatctcagcctacaccgtacaccggtgccactcctgggtaggaggacctgagaaggataaagcaggctgagcaagcctgcaagccaccttcctccggggcctttgcagggggggggggggttgtgttagctgctgcccccaggctcccgccccgccttttcttcctggtgaactgtaggctgtggatagaatcagcaacctctcagagttgcttttggccatggtgattatcgcacagcagaaagcagaccaagatgcctcccaggcccttctacctgctgggccagcttgctggccagttcttctgacgcttgtttatattttcccagaaacttttgctgagtttcttgagtttttttttttttttctcctcatctgcccaaaggaccttcctgttgtgcttgtagagatgaaaccctgaggtctgcaggctatgtccttgctggcttgactgtgtctgttcacaaacccctcagtacacactagccttttcccctcttccctattcgcagctccccggagggaggcctgacctggatacagacagagacttagctccagtccaaggcgtgagcagtcagttttccggcactcagaggaagggggaatccctgctttctcatataccttcaagcactcagtgaatcaaatggctccccctgaagcagcctccgattccaggctggatgtttagtgtcacccggtgccaagcacagcatatcaggtctcttcttaggacaggagagccttggctgagccagcatgggccctggggcagctttagaggacatcccctccagtgagtgctggctgcctacaaagctggtcctttatcatgtaggaggatggcgaccaccaggggactaggtacatgcataggagggaatggaagctggtttctgcagggaacaggcctgggcagttgggtaatagcattccgctagctgaactgggattcaagcctctccccagctgcaggaggaggaagcagagtgggtgtgcaatggcccttagtcactcacaaaggacttcttggactcagagttagggaaaatgacggagtcacattctggaggatttgcagaaggataaacacaaaggccatgatgtcagtggagcagtgttcgggcaggatggagcttgtcacttctaccctgtcacttcctggttatttacagaatctagatagtgtgaattcgctatgcacagagggggagagatcattaaagaaggtctttaatagatgccgggatgtctggaaacccaaccatggcaggaacaagtctgattttgagcagcgtgctttagattctgggccttgctctctgcgcctgtatggtatgaggctatccatgctagccttcccgcagggctcccatgatacattgccaggcaaggagcaggggccctggtgcatcagacctcattcccttcatccttttctagtggcagaggaccagcaaggacaatcaccggcagggtcccacagatgtcagagaagaggctggcatggactagttgtcaggaaagttcagtaagaggagacctgagctgcatcttgcaggctggtaggatctggtttggtctgaggctaaggcactgctacctctaatggttgctgcacagcctgtgtttgtagggaattctgatggaatggcttaagagcagaccctgcttccaaagagtggcaggccaggatggctcatggaccctactgctcagcccaacactgagagggaatacacacactttttctgttcttggtgctgcctgtaggggcgcttggccatggagtgtgttggggcgggagggggggggcagttcttagggttttactgttgtgaacagacaccgtgaccaaggcaaatcttataaaaacatttaattggggctggcttacaggttcagaggttaagtccattatcatcaaggtgggagcatggcagtatccattcagacatggcgcaggcagagctgagagttctacgtcttcattcaaagacttctagtggaagactgacttccaggcaactagggtgaggatcttatgctcacacccacagtgacacacctattccaaccaggtcacacctattccaacaaggccacacctccagatggtgccactccctggtccaaggatatacaaaccatcacagggggtcactatgaggatgaagaggaacacatagaccctgtctctgctggagatggggctcaggaggagatgcaagtcagcccagatggactgggggggagaggtttctaatggctcagagtgtgagccaaatagtaggtgagatgcccatgtgtgaaggtgcgactccctaacaggtaccagtaggagctgagtgatctatgaccagccagggtgaggctgagggatggacatgagcagagaacgtggtccaggtcctggtgactttgagtctctagcagccactctaatctagcacggttttcctttcgccttcagcctcctgacagcgggcctccgcctttaccaacgtcctctctcccagagggttactatgaggaagccgtgccgctgagccctgggaaagctccagagtacatcacctcaagtgagtggcagctgcccacatcagggtggttccttcattctcaggaatggtggtgagccaaggcactggtgtggaggaggcagggctaaacatcaccacagaaatgtaggagcaatgtgtctgggatctaaggaaggcatttaatacaggaggggtctggggaaaggctgagacccccagagtcctttcttccagcttctgttgagtcgggttcagaggtacctggagccacagagccaggtgtgggtaaatgatgtgattctctgaggtcgggagagaaactgttctgtagttcattggtgcacgctctaccctgtcccctcctggcctctacagagcacagtcctgcaggttgaggtttctgcagaaatgcctgttgggtgcaggcttctcttctgtgaagagggcaggcttcactgaacagtttctgctgaagtcatgatccaccagctcccggtgccgacctcagaaatccttcttttaaactgagatgcacactgatgcccaggacctcctcttactgcccctgggattcagattcattactgatgctattctgtcccctgagtgtcaggccctttcacctctcagcaggatgtcacgtcaagctgtggaatcctgtgtttctgtgctcagctctgaaactcctctcattgtcaagtactttctcattaaaaagagtgtcgtggaaaaagtgtcactgtaggacacttgttctccagtctgatgatctgaattggttcaccaggacccacatagtggaaagagcgaatcaaccccccaagctgtcctctaacctccacgcatgtaccacgacacacgtgcctccgcaaaatagttgtttaaagcgttgtaagtgtcagtctttgtgacaggctgctagggcagagtagagcacgggctaacagtgctatccactcccctgtgatgctcaccggcttccataccattgccaacaccgagtgtccacatgctctggaagctggtttcccagagtgcattggcttatagcacttttcttagacctgtggcgggctgccagcatcttctccaggggccaggtgacaatttccttctcccagggtctggcatttctggctcttaggtccctgtttgacagcatgagcctctctgatggtatgctccccccatctgcccctccagtcagagcctgccttctgtctttgccttgctgtatggtatccacacagccataggctttggggccctggaaccatgtgtgacttaattccttcatgaaaatgaaggttgaaaagttcctttgaggctgccatgtaaagagggggtgttaggcagatgcagacacagggatagccacgtgctggtgtgtaggaggggagaggagaaagagaggctgctgatctgaagatggcaggagcctggcctgactgacaagttattctactgcaacctcctgtctgcatcctcagcacttcagactggcagctctcacactctcaggttaccactgcctcaagtgctctgtctgttacttctcttcccagccaccccaggcctgaatgtgccattgtccctctgaaggatccttccctgacagtgcactggccatgttcctgcaataggagctttgctaggtgctggctgggagagctaccacatacaacaggatgctctcttcccagggttcccagcttggcgtaaagagctgacctgtgcacacagtgaggagtctgttggagtgtgtacagtgtgtcacaagggcctatgacacagtgtgctgttggcctgctcaggctgctgcctcaaatcactctcagctcagaggctggaatgctgaaattcttgggccatgctagagttatcgtaccagtgctttatcttacagatggcctgtcttagaggtgtgccttctggacatgtcctcaccccctcccttcttcccccctctttcctcttgtccctttctctcaccactcccattggattaggactctaccttatggtcgtattggtaacagatttcatctgaatcgtaatccaaaagctccatcagatgcagtcatgttagcctaaagacctcactcagcatgagagtctcagggaatcttgagcccatggtactggccagagggagccatagcttaatgctagacatgaacacacattatcccaggagagaggagggagatggggcagctcgggtgtgtacagagagcccagaggaagagggagcaggctatgtgtggagaaagtgtaagaactggggtgtccttgagtgagatttgttctgttagagagatgggaccagtcctgcccagatccaaggcaagccagtgggaagaggtggcctctggtggatcccaagtgtactgaagggtctgtgggtggtagtgtcaacaagaagactggggtgggggtggatttaatcaaggccagataaagaggagcagaggactcttcacggacatggttcccgagtgaccacccaaggcagggcacagttaatgctgccattggggtgacatcatcctgttgatgtgaacgaatctagagatttaaaaaaaaatgaatctcaatgttttagtcgttgcatttgaagcattttgatgtgttctcagtgcctgacttgtgcaagttttatccccagtgccagggcggaagccctttctcactgaagcctacggtggctggaaataaggccaggtgaggtgagctggagggtcggcctctcacctctacccttttctcctccacagattatgactctgatgccatgagcagttcctatgagtcatatgatgaagaggaagaggacgggaaggggaagaaaactcggcatcagtggccgtcagaggaggcctctatggacctggtgaaagacgccaagatctgtgccttcctgctgcgcaagaaacgctttggccagtggaccaagctgctctgcgtcatcaaagacaccaagctgctggtgaggagcccagtggggctgtgccgccattggcagtccgaagtacaggaccacaactggtacatgcagacgctaccacaggggaggcaagcgacggcccagcccagctcagcccagcccgctggcacctcttcagggagggctcatggttcccccacacccaagtccttccaccccgcggggcctgtggcttgtgtcagtggaaatgagcagtgttgagacttgccagaaactgcaagatagactttctcatttgtagcgagtcagtaaattcctcccagccaggtcacagcagaggccggagcctgtggaggcgcctaggggagggcagagggaaaggacattcttttggaaagtcaaaagctttccaaaaagaagggtgggtttttttgttttgttttgttttgttttggaggcaaaacaggaaggtggagtacatccagaagcagggcgtagaagattcaggactctggctacaggtgctgtccccttgggggttccaaggagaggagccttggaggcggcattcctgcccccagtccccccagctcccaaggccacttccggtaaaaaccaaggctggtcactgggtcaggagttttactgtctgctttttgccttttgtctttcaaattaacctcaggaagcaattgctcaaaagtgagtccttaaaggagaaaatctgggtttctcctttccccacgtgatggagcagataacactgtaagagagaccatggcccccagtgaattatgggagtcttgctcgcattggctcttagatcactggatgtgcttcttcttcttcttcttcttcttcttcttcttcttcttcttcttcttcttcttcttcttcttcttcttcttcttctttttttttgtttgtccagcctttttaaacgaagtgcatattttttccacatgtgtggcctgaatttcttccaaatatagaatatgccaaaaatgatgccattggggattttaaagcatgaaaaatattaacatagcccttctttataatctgatgcaatcgctgcaagatggtgatatgctatatgcagtgatttaaaatgtactccacactcatgagaaagagccgttttatttccagtgcagacagcgggagggctgatgcagagtcagcagtttggggcccaggttcctggccccacacccgttggtcctcttcctcctctcttgcttttctctgcagtgagagccctctccctgctctatgatggtgagagctttcatagctttcatagagcctacctttaaattgttgaaggaataaatggaaaatgagggaaaacatcatgtaagacaaaatgcaaggtgaaacttggccttttatttgattttggctttgttatgacagaatcttgctagatagctcaggttagcctcaaattcactatgtagcccaggctagtcttgagctctgaatcctttctcttccatctcctgaatgatgagattatgagcaagtactacacacatttggcttaaagtagtagtagtagtaattgttgttttgtttgtttgtttgttgttgtgctgtgtgtatgtatgtatgtatgtgtgtgtatgtatgtatgtgtgtgtgtatgtatgtatatgtatgtatgtatgtatttttatgtatatgtgtgtatgcattatcttccttcataattaacccatgatcaactactcagatgagagaaagcatacttttctttcctggaacaccttgcctggcctccccctgtgggtgtcacgctacctactctattgactccatctctagaccttttatttccatgcccaggcaattccagacctacccagtcacccccagacactctgcccactcactgaagtatctgtctcctagctggtgggtatcactggaagagcctctccactggatggactctgaggccaagtcacctttcttcctggggtctgcctgtacctagtgctgagggagtcaaggggcagagccagcgggcttccagctccagggccctgggctctctatgaatttcgcttgaactgagtcctgcctggtcttccttcctcaggctctttgcagcagccttgggggactcctgtttggaggtggcctgggcttgcctcccaggatctccagacagtactagcattccaggtggttgtgagccaactgctgtgggtgctggggacagggcttaggctcgctacaagggcagtgcgcacttttaagtgctgagccatttctccagcaccaagtgtcgttatcattacctagtctgcccacagtagctctatgcagttgcaacagatctagtaaccctttcatgtatgttatattcacatgaactgtgctccaatagaacacaggacagatcagtgcctgctcagtcgagtcttagacattccatatgcctcagccgacttagcatacacctgtgtgtggcagatgtggaaggagtgtgggtaggcagcagacggtgtcacacctgttcgctggctgctgagccacacccccccaaagcctggctagcactagaggtttggttatgctgggtttcatcattgtttctggtcgcacttcctcaaggcattaattggtctgttgtgttccccgcagtgctataaaagttccaaggaccagcagcctcagatggagctgccgctgcagggctgcagtatcacatacatcccgagagacagcaagaagaagaaacacgagctgaaaatcacccagcaaggcacagaccctctggttctagctgttcagagcaaggaacaggctgagcagtggttgaaggtaggacatctgacatgactctgagacacacttccagactcatttaattgataagttgtctaaaacccagacagatcaatgaatctaggagttttatctttttttaataattgagttacatgttaattttgccctgcccccatacacacatgcatacacagacatgcacgcacacatgacatgactggcatgtggaggtcagcagacaccttgtgaaaactggctctctattcccccacccatggtgtaggcctctgggattaaacctaacttgtcagacttggtagtaaatgcctttacctactgagacatcctttcattgttgttgtttgttttgaagctttggttgtgagttttagccttgaacaatagagctctctctccagtccttgtttatttttgatactgagcactcattgctagaatttcactcacctgacttccagctgcaggcaactgtctgtccccggaagctgtccgtctgccctgtggttgtagttgttattgttcttagtattgctttgatccctcctccatttccagaaacaatatttagatgtgagaccttctcactttgtgctgttgcccttcttcccctttggtctggcttctttctttctcggtcccctccagttccccgtgtcgtcctcgtttctgatttgtttggtccctctgctgctgtgttctaattttggctttgggatccatcttattctgcccaggctgctccccaagatgccccaggtggggtggccttgaaaagcagcagtttatttctgagctctggaggctggaaattgcaagtcagggtgcctggggatttggtctctgatgagatgtcctcactgtcctcctgtgtaaagagggtggtggccacctgcagtctcttttatgcaggcactgatagcagacagtagggctctaccctgtgacctcatcacagctcaagtgttggacctcctactgtgactgtgttggagctgaggggcccatagttttaagccctagaatttctagatgtttcttttttaatctggaattgtctcttttacaggtttaaatttctcataaaatactggtctagcttttacctctgaacaggacaggtatggtgactctgaccctgattttgacctgaacaggaagagcatggtggctctgaccctgagttttgctggagcttggaacttactctcttgtctattgtgtttgttcgacacccatgctggtcatggtatttggaaagaaaatacattgaaataattcttacagcaacaatattgggtatagctcacataaccacaaatacaattctatgatgcttttgggtttccacggctcttggaagtaattctgtaactatagctgctcctcctgccttttggaagaagctgtgcgtggtgtctgctcatcttcccaaggttttagttcacgacgtcctgcagtgagggcagggctggaagaagatgccatctacttgggcatctatgaccatggtgtctgtgacttgcagtttatgggccactccttcactgctgtaacaaaacaacctggccaaagggacttagggaaggaagggcctgtctcagctcactgtttgaaattctccttggtggtgagggtggggcgatgggcatgaggtgcgcctgtagccaggaagcaaagaggtgtgttggttggagctcagtccacttctgcttcatcagccaggccttcagcacatttagagtgagtcccccctcttcagctaagcctctctggaaacatcccacacagatgcccacagttgtgtcccagctgattgtaaaatctggcaaggtgaactgtcatccactgtatctggggaaccgtgaacctcgattccccatggcccccaggagcacacagtcagactccaggcccacaatgatgctttgtgggccgcccagagaaccacacagaggtggcctgttccactctgtcagcagcggctgtggtgtcagcagtggcctgtggcttgcctgaaattgtgacattcaggctggggaggattttttttctgggttcctcccatgtaagcctcaggctccggaatctcttctgggagtttgtgagaaggagagcctcactgtgctgcaggctgatccatatcaatgcaggccctccagagcctttgaggtttacagaggcatgggcgtctgattgactcatgctgcctctgtgtatgtgcatgtgcgtgtgcgtgtgcatgtgtgtgtgtgcctgtatgtgtgagagagatatacacagagacagggagggagggagagaagagaagagagagagagagagagagagagagagagggagagagagagagagagagagagagagaaagagagagaaatgcacacacatatggcggcagcagaggacaatctcagatgctgttcctgttcctcaggtgccatctgcctcacttttctgagacagggcctcctccttgccactgccctagctcacagagatagttaggctggctggccagtgagcctcagggatccatctcactgcctccccagagctggggttacaagcacacgatgttgcacccagctttttttatgtgggtcctcacccctctcaccccagacactcgtgcttcctcatcctgacactgcttgtagtttcatttgatgcccaagaggtcgagtcttaggccattgtgtagctcattgtgatgatctaccgtggtccatctaggcatcaaggtcggttttctggcttgatggaggcttcgcttttgagtgatggacagctggcccttccctctttttatccttcctcctgtaatttgttttttaaaactaatttttaaaacctttttattggttctttgtgaacctcgtatcatgctccccagtccgcctcatcgctccctctaccccctcctgtggtcttagcctgtccgttcactaaaggagagagggggcagttgtgcagtgggcggccttcctggtggctctttctttctctgggttcctctcctggctgcctggactctccttccatgcttggtgttctctgttccttaaggagcgctgggtaggaatggcttgaaccatggtggctcccgctcaccctctggtctgcagcgtgctaaactcccagctcccttctaactgcttcacatctgacatgaagtcactccgaggccttgagcagctggcgaacagaccagagaaacaacacgtttcaagatgctgatggactgaaatgacctcatatcctccctcccccctgtgcgagctacttgcaaacagaggcgcttagctaattacagcatgacgactccactcatgaatggtagttaattgcgaggagtttaattttagtgtatttcttacaagggatgtaaatgataccaggcgagagagatctttttctgaggagtttgaattgattgctctgttttaatgtttgctcttttactcctgcagtagcagagcttgaggaggtctacccatgaaagtcaaaatgattacccagcactcagccctaaggagtgctccccccaaactcagggagcattgtggaggagtgggtgggaagactggataatccagaagtagggtggggggctcacaaggccccactcccccttgagggattatagttaaggtctgcccatgggaagggtgtggtaccgaactcttttttttctgaggatctttaagcagttaatggttgccccaggagggagggacattttcttcagtgatgagccactggtcccatgcctctgcgcctgtgagtcactatgcaagcttctgtaactaaccctgataaaactcactaggtcccaaggtaaaaaacagatgtggggcaagttaggaagagaagggccagctggggaggggaagaggaggcaacagggtgactatggcaaaaattatctacatgtgtgacacgcgctcactaagaaatctattgtgtatcattaacattaatatatgctaatgagtcaatgacaaaaaggtatcagccataggatcctaattgtctcagcctagcagagcctaagatagtctagctccttccacatccaccactggacaagttactttatcagaaccgtgattttaactattgtaattattattattatattgtgtgtgttcatatgtggtggtgggcatgctgaagggcagaggacaacgtaatttctcttcttccactgtgggaccctgggcttgaacccagtttgtcaggtctgtacagtgggtgcttttccctgccgagctgcagaggggctggaggttttaaaaacacgactctgaatcattcgtatttgttgggaacctgaaagactttatttatttatttatttttgctttgtatttttctaaatgctgccctatgctgataggattgagacatgcccttgctaactctccctgctcagggaacttctgttttggtgtctagaaccacgaactcctgattctcttgaagggacaaggagaagcggagggggatgggatgatgggtatgagcctccatccttcatttccttttacatcatagaagtgggtgttttgttgttttaacaggggaggggctggagagatggctcggttaggcgtgtacgctgctctggcagaggacccaggttcagctggaagcacctatatacgtggctcacagctgcctgtaactccagctccattgggaaatgacacctttgacctccacagacctctgcactcacatgcatacacacacacaggcacacacaatacatacaagtaagataaactaagtctttttttaaaattaaatagaaaaaattgaaagcccatttcctctagcacaggccttctgaaaatggacttccaggaagtgtagaaccaccatcttactctgctttctgagaagccaggcctgcccaccgccatggttctcgggtttggtgtcactgtcactggaatgtttaagtggcttccagcggatgatggtgcagtactggtgcagagggggcagccttcttggtctttgtctgtcatctatccaatgccatctatccaaaagacgctgtctttcgttggcttgaagcacttgggccagctcttcacccctgtggccctctggctgcatgctctttgtggcgtgtcctctccactttgggagctctggtccagcgtgccctcatgtgcactttaatcttggtttccattctagaactttctggttgtcctttgtcatcatgtctgtctgaaatcccatcagtctgtccaccaccctccacttcattggctgtttaatatatataacaggcatctctgttacagctgttttagtgtctggtcattcagcactggggtcatctttgtattgcttctgaatttgccccaggagtctgcacaggctttgggatgtgtgggaggaaaccacagagactaccctctgctatttcccaagagccaggtgtagccctgttcccaacagtccctcgttgttaggcaccatagactgtggccatgttgctttgcttcatattactcctgccttcagaatgggtgctgtgttttcacaggagtatggcaggggaccagaaagctggcaagaggcctgaggtctccatggacagtggaccaggtggccagctttctgaagcagcctagggatctctttaggtctagcctgccagactctctgttctgggctcagcctccgctctctcgagactatggtatccctttgaccctggaagctggaaccttcctgatgggcacttgccgtgcaactgaacttccttggcaaagcagacaccttgtgctggatgaagtgctcctcatctcgggaccctgtctcctccctgcctgcctttcagcctccttatcacctccaaaatgatgggagggctgaggggtgagaactggctcctgcaggccctcggacacctaagttttgtttggctactctgtcatctctggctccatttgtggccagccaagagggcagctgtggagagcctcttttctccaggcagggggagcccttttctcccaaggccccttcatctttagggttcccttctctgtggcttctcagcatctccacactcagatgactttgaaaagtgctacgactttgcttttgggttttcggtttctccagcttgttttgtgttgtcagggtggtggtttgatgtgctgttctgtgtggtgacagtgagataccacgtgccctgttcattgtctcggcagaaggtcttggttttgtcagttatgtaataaactttgggctcagctgatttttctacaatatgactttctgctttattattttagttttaaaaattcttttttttttttaaagacagtgtcttaataagtaaccctggtgccccaggaacccagggcattgagttcaggtctcatatatgctagggacactcttctgctgagtgatctcattgtcactgtgagtcgctaaggaagtgcttttccactctctactgggaattgttttataaataaaggcaagtatctcatcaccgaagactactgttatcaaggcttgtttagggtttatgatccagccgtagatatttagaaatagttttaatagaacaattaaaaatccttcagttagaactcacttacccttgcaaagcaggatatacacaaggcagcatttgaccagcatgcaatgctatttgcccttctgccaaaagtacccaccagagccatgaatgtgtcttgtctgcctgttacatccactaccctcagcccttgccagaagcccgtctctatgcgtgcatgcatgtgtctatccacatgaatgttcatgtgtgtacagaagctgcagacatgagcctctctgcagaggtcaaacacaagacacgagctagcattcccagaagcagtgtgatcaggtttccataaaaatgtgcagagactgtgcttctggggtggagggcttaagttaaaagcaaacaaaaatgccacagagtatttggttgtgtggaggagtcgtgagttttcaattccaatgtcattcttttaagtgcactttgaccttctcacactatactttacatagacatatacctcgagtggcagggccttcctttatcattttggaatggaccctgcaggtgcctttgggagatgcagaggtcagtgaacgaagcagcctgatttcttccactagtgagaccacctgggctcactgtcccacagggtgctttgtctgtggtctggacagggaaagacagtctcacaatgccaaggtgacttctctgctcttggcctgtcccaggtgggtgtctgggtctctctgggttgcctcgtgcccatcccagcactgcacaacacatggctctgatccacaagggagctgagttctaggtgagagagaagtgagtcaccagagaagcaagtatggccccctgagtgttgcaagtgtgtgaggtaaactcctgggagcttcggaagaggctgtcatgagcgagctctgatggctaggtgtcatcttctccctccagaaggcctggtctgggaagaaagaggtgtgcatatgcccggtgccattcttctctatgcttttgtgatttgtgtcatcggtgcagaggatttggccacatggcttttacttaatcctgtctcttttctatgtttttattggctcagttaaaaaaaaatatttatagaaaatctcaaggccagtttgtccttgttgtatatttttccgtttcataaagaccttcaaaagatgttgctgctgggcatagtggcacacaccgttaatggcacctctgcatgtgggaagcagaggaagttatgcatctctgtgaggatgagctgtgctcagtcaagagaacacaatgccctccagggggcagtatacccagagccaaacaggctggaggcacacagaggcacacacacacagaggcacacacacacacacacacacacacacacacacacacagtagagaggcagacaggcagacagacacacatacagggccacacagacaaacacacatgcacagagtcacacagacaggcagacacacacacacacacaaacgcactgacatacagacacacagacaaatagacaaagtcaaaagtcaggcagatatacactgacatacagacacacagacagacacatacatatgcagggccacacagacaaacacacatacacagagtcacatagacaggcagacacacacacaaacacactgacatacacacacacacacacacacacacacacacacagagtcaggcagacagacagacacacacagggccacacagacaaacacacatgcacagagtcacatagacaggcagacacacacacaaacacactgacatacatacacacacacacacacacacacacagagtcaggcagacagacagacacacacagggccacacagacaaacacacatgcacagagtcacacagacaggcagacacacatacaaacacactgacatacagacacacagacaaatagacaaagtcaaaagacaggcagatatacactgacatacagacacacagacagacacatacatatgcagggccacacagacaaacacacatacacagagtcacatagacaggcagacacacacacaaacacactgacatacacacacacacacacacacacacacacacacacacacacacacacagagtcaggcagacagacagacacacacagggccacacagacaaacacacatgcacagagtcacatagacaggcagacacacacacaaacacactgacatacatacacacacacacacacacacacacacacacacacacagagtcaggcagacagacagacacacacagggccacacagacaaacacacatgcacagagtcacacagacaggcagacacacatacaaacacactgacatacagacacacagacaaatagacaaagtcaaaagacaggcagatatacactgacatacagacacacagacagacacatacatatgcagggccacacagacaaacacacatacacagagtcacatagacacgcagacacacacacacaaacgcactgacatatggacacacagacagacacatacacacacagggccacacagacatacatgcacagagtcacacagacaggcaggcacacacacaaacacactgacatacacacacacacacacacacacacgcagacacacacacacacacacacacacacacacacacacacacacacacacactggcagacatgtgcacatacacacacagcacctgcctccaccagggctggtaggaataagtgcaaccacacgaccacatgcttcccccaaggccagggaacagcaaagggaaggaagacagctaagcttccccagaccacgcctttgcagccacggtttggagcgcgggctttggtaagaatgaagacctcatcaagttcacggttgtgtgtgtaatggcagccaattttcttagttaaagctacaattacaagctgaggttcccggaggcctggtgcaggagaagtgtgggctggggcgcttcgtggttgcccaccacaggggtgcccaccacggcctttctcagtggcatcgggtgttgctttatggagtttagctaaagtgtgtaagtctttgtaagaggctctgccttgctcaggtggtgagccggggagctggacttgaaccacaggagctcagaactcccctgctccaagtgtgtttctttcccagagaaaggatagtcctgctctttcttatttatttatttatttatttatttatttatttatttatttatttatttatttacagttctaagggtgggaagtccctgatccaggtgctggctgactgaggaagctgtgatggcctgtgctccccctggcagatagttcttagtcgctgtgtccgatacacacagggcatgggagctctctgaggtctgagccattcacagaggcttagctcccctgtccctgttatcttctaacccgccccacccccaattccaaggctgctgctgtggggtttaattttcaacatgaatttggaggaacagaagcatctagaacatgatatttgtgttccttggagaaggaggaggctcaggtcagaacagttcattattctgccaaggtgaaagccaggcagcagagccattagccctggttgtggagcccctccctcctcatgctgtagtcgtcctgctcatctgtctctccttacaatgaccaagttcagtctccccctcagacccaagagggccgtgtgactgggcccctacacctgtcgtccagtttcttcttccctgccctgttctccccagccacacaacactctaggggctccttaaacacttgtcacctgctgcagggcctttgcaccactgtcccctctgcctaaaagcctttctgtcctcagttcacgtggccctcagctaacatagcccgtgtgtcatcctggcacagtgccctggctctgcagtagctaacaatttcctgtgaaaggagtactttttattcttatagctccgtcatctgtcagacatcaccttcctgagaaaaggtttatttttttatttaatttttaattatgtgtatgtgctgttgacccctcgagttctcctgccacaccgtaggcgtctgtctgcccacataggactacacccatcacctggatccccctgcctctggtcaggctcagactgtgtctcacttcctcaggtaatcaaagaagcctacagtggctgtagcgggcccgtggatccggaatgttctccaccacccagcaccagcgcccccgtgaacaaggcagaactggagaaggtgagggacgccagttctcactcagctctttgtctccttcatggtgtctcctcccctgtgcatacagatgaactatatgtatttatggggaattgttgagacatttcagtgcatgtgttcagtttattgtctagccagggtgtccctcatgcctgccacctcagacctcaatcctttcatctggaattgccagtttaataacgttctgtgagagccgtagcacttcttctgcggagtgttgagcactctctcagcccatgcaccctttaactttggagataacatttcgctttccactgtacctcaccaggtctgcatgaccactgtgggaataatgtgatccttatgtccttatagaaattgtcttcagagaggcccagctctgatggagaaggtggtgtggaaaacggagtcaccacgtgtaatggaaaagaacaaggtgagactctaacacgtgccaagaatatctgaagtcacaaatcgggttgctgtgctaggtgtgactgtgtgggaaacctctgtgctttggccgtgcaggtgccactgccctctgtccccaaggacacaaggaaggcctcttcatttgcagcagcctagacccttcctttcttcccagcttcatttaaattattgttaaaccataaaaaaagtacatatgccacagactttataatcctcgaccgtctcaaagtgttctgtagacattaactatacacatacagagctgtgtagccatcacttgcatctgtctctggaactttctgtcttcacaaatcaaaacctagttttcatgaaacctaagtccctcatcccctccttagccctggcaatcagtgttctgctttctgtctctctgcattctacacgctgggggcctcatgcaagtgcagtgctgtgctacttgtccggtggcagctggctcatttcacccggtatgatgtcttcaaggttcatccatattgtactgtgtgtcagcctttccttccttttcaagactgaataacattccattctatgggccacttcttacccattcatctgccagtgagtggtacttgtgttgcttctagccattggctattgatagcagaacagctttgaacatggatgtgcagggttatagtcttgtttttaaacttgactttatagcaaggcagatgatgttcagtaaaacctgccaactttgacttaactgatctatgaactttaatatacccctacagcgagtcaccatcaccacaagagacagcctgcatgtctgtcaccccactgttccttcacattcctctttgtcactgctgccccaagctaccccaggtagccgctgctgtttccagcttgcacttgggatctggggtgcattgcctattgggagtttcctttctgtatctcagtgcaccttgacttgcagtgtgagagccgctgctcagccttccctgtggagataaactctgctggtcacccactggccaatgccaggacacacagtggctggggacattctgactcccgggtaggactttgcatggacatgtgactccatgtctcccaggaacctaaccagaagtggggttgcaaggttgaaccttctcgtaggatcgctgcccctggctggcctgcagtctttccctggtattgcacagatgtgtgatggtgtgcagctgtggcctccccagtgggtgaggtagacattctctggtagaatgtctcctcagatactttgcccatatttctgtggagttgttattgagcttttggaggcctctgcatactcttcctgtgtgccatttataaaatgtgtttcctatggactgtccccatctgtgtggctggacattttactcctgagtgtgtgttgaagtgcaggtaggtggagggagctggagctctgtggacctaagtgcttgtgccctcatctgtgccgctcacgtgtgatgagtgctcccacctaggaatgaatcatgtgctgcgccggcagctgtcccagccctgagaattctggagccagacaatgcgacagttcaccccggaaggtcacactgtctctttcttcactgcggttttctaacacagtccggtctgaatgtaattttagtcctgtcccctgggagctactaccagtcatgtcatatataatgaagacctcggagccagaagctatctttaacttctgctctgaggtgggacaccctgtgctctctgggctccagctttgctgtctggctcctttcttcccttttggctattttttgttgttgttgttgttctttttttgttgtgagatggccttttcatccaggctgatctcaacttcatggattcaagctgtttgttgtccaacctcagccttctaaactaggacctcagaggtgccacacacaccaggtgactgtttcactgctgaggtgggacagacatggttgacagctcagttttcttactattccccaggccccatgatcccctgtgattgcttcattcctatggagtagtgtgcctgttggatggtcatgtaggttttgattttgcccccaggaatctactgttcgctcttttaaaaagaaaagtctttattttgtaggcatgagtgtgttttcaggtgcctgtgtagaggccagataatagctttggatctggaattagaagtgaggtatgtgtcctcagtgttggatctgaactcagattctccagaggagccatacacactgatgagcaggaagctgtctccgcagcccctcccatactgtttaacaagaacagcgctgcgagtttgggaatgcacaggtgacctggctcacacattttccttttgtctgacaccttgcttgcttgtcaaagatgacaagggagcttcctggtccagatgcaccctaagcaccttgtacccttgttcttgaccctgactgctctctgcttcgcagtggaggaatgtgagtggagctctctttagtttggtcctttgtgatagtttgtggtggttacagacaggaagcctgcacccctccatgctatggcctcactggagaaggctgtggtcaaagctatagctctcctctgagacattctttttttttttccatgatgagccccactatagacaccggggagccctatagcagatatagggaaagatgacggaagtcccaggctgtagaaacttcactgccctagccagtgcttgtgtggctttgagacaaagccctcggtgggggtgtctgtgggtggacttgttgaaccagaggtctgatgatgtcacctctccctccccttactacccctagactagacagaaaatcatttcatttccatctccgtaggaaaaagcaggctggctaggtttgtgacattcacacactgatgtatgtcttcatcactagggcattagtcttggccatctgtgccctttgaccccttccactgttctgccgtgtaacctcactgacttgagagttctctattgactcttggatttaatcatgtgctaaatcctgcccctttcccttcaaagggtcctcgatggcttttctgttctatccctacatagaggcctttcttccaaagggtcctcgatggcctttctgtcctatccctacatagaggcctttcttccaaggaaggcttaggctatgattattctctgccttaggagttggaggcaggagctttgctggcaggagctggtgtcagttctggtgagtgtgaatcccactctcacctgctgcctgagcggaagggttaccctggggcagagcctgtggagagtgtctctggtcacctcacttggatgtgggaggcaatgacgttgttcatctgcaggttcctggggatccgctgatggagccaaacactgtctcttctgcccactgtggcttggctggactgaaggagaaataatccaaatctctggccccaggcttctgtctagtggagggggaaggcctgtgtcttcccaccaagaccttggctaggttctcattacttagtaagtagatgtgtgtcttagagcgaggaaaaggcagtgcgcagacattcccatgggtatttccctaagagctcagggaaccttaatctgatttatttaaaataagtcaaaaatatctgtgttgtaaagacacagggagaaggctggggtgcacaccacagaggctcaagatgaaggccacaggcagagctactcactccctgggggcctttcttcctggcttgtgtcctcaagtgttctgtgcacacatagtctacaaaagggtgctatgttttggatcagtcattgacatgaggcctcatttaacctctgtaggcatgaagtttttgcaacctacttttaataagggttcaatctcttctctagcccaccacccagcagagttagtggaagagaaaagttactaggatacgggggaagtggacccattccccattagattctttggggccaagcttgatctgcttgggcagcaattcagtcctgtagcaaacaccaaatacaattcagcagctgcagacccgtcctcaaggcaggcagacaccaggcatgaaccagcagctacagtccagtccttttagcaagcagaccccaggcagctgtagttcagtcctgaagaaactgccaggctcaccaactggcctgaggcgagaccacagaagcagcaagctgctgcaagaacctcaggagcagttcttaggcaagtttctctcaatggcagtcttacaagtaagttgagctcaacaagactatgcaaggcgaaccaatacatgtgtgtcattagtgaagaaaagtgaggcagggcaaaccaaaccaatgcttagtgctcgtctcccactgtctgtggggtcatgtttatactccttcgtcaagggtcccttcatgtgtctgctgtatccaaacatcctattacctgtgtctgattcaggaaaacagtctttcacatgtttgctttagcaacacatccttttacctgtgtgccccagcaaagcatcatttgacataactaactttccaaagaaaccagaagtttccacttcaaagcttcctcattaggactcctgtctccaaataccgtcacccctcgggtcagtattgtggggccagggcaggaacgttgagcatggaatgttaggtttgccccccccccccagttcttcatggcctcctattttagctgcagtatggcaggcagctctttcctcactcaggcactgctccttacctttataccaagggggaggcaaggatttcaccaactgacttcagagggcgggcagggtggaagtagaaacggggactgttttctcctcttcgccaaagaggactgggggcctccttgagagtgagcacgtttgtttaggggaggagttggggaattcttctgaaacttaatccatgctcctaggtgttctgtctctggaaggattccatgggacctgctgggttcacttgttcctggaaaaggagcctggatgcccattgcattctaaaagggtttgtgtgttgtcccaaaggactgaagggttgcactaggtgtgtagtgagcgaggtgatgctgcatgggtcttgatgtagaactgcagcccagggaggctgtgttccagtggaggagacccttgggaaagcctcacacccagctctagcatgtgactgacattcttaagagaccgagatgggctgactagcctttgcccggagttgctctcgagtagaaggatcaggtccctcagctccgagtgggcccttatgcatccattctgacttgtctgagtctcatcctgtgattcagctcaactcatggatgaaaccttgaggggaggagagggctacacatgtctgagtaagagcaaattcaggaaaccagctcacagtcagcttccctctgtggcctggtctagagagatgagaactgccctgtgccagaaccaggagtcattatcactggcatggactctgcaccaagatactgcatatgggagtccaggattttcaggtcttctggtttttgcagaagacaaaagttcttattgtacagcatgtttctaggtttatatgctaacagatcattcctagccatcactgtcctgattaaaatgtgaggtgatggatcgaaaggtaggctctcgtctgagagctctgcacagagaagctcagcgtagtgtccaaaatggacaggatagaccaccaatgaggacccacattcctctccctttcttaaggacctgccccttgtcaaccatgctactgcggcagtggtactagctccccttggttccttgggcccctgcatcttaacacactgatgatctgtgtcagcctgggagttgcttcctctgagacaggcatatctcattctttacatctgagcagtcaactctgccctgggcaggctctgtgtgaccattcacccgttcatccgttctccaagtaactcgtatctccatgtgggttttgccatcctttgttgccgtgagtacgtcatgtatggatggtaatgctcacatgcctgtatgcacatgtgttcatacctgatcctctctgcagtgcgggcttcctgagtatagccatatccttctgctgccccagcatctggatccccagctggctcgtcacaggtgttcatgtgtacgatgagtgacagtttggagaggaggaaatgcctggcgatcagcgctgtgacattcccacttaacaccaatggttaagacacacttttgtgttgacagcaaagaggaagaaaccttccaagtcagaggccaaggggactgtgtccaaggtcactgggaagaaaattaccaagatcatcggtctgggaaagaagaagccatccacagatgagcagacatcatcagcagaggaggatgtgcccacttgtggtaagaccctgccatgtgtcagcagactatccctgggtgtgctctggggctgtctgaagtgtggagagcagtttcagcctttagtaatagaagtatctccaagggcttgtgatgctggtccatggttttttcaaggtaaataccaatgttctctgtctcttccccgagttctcgccagtgtttccagacttggacacaggcaccaaacaggccaaagctctagaactgagtctcctttgggtcacacctagaacttaagttgcagacagagctgtgtggtcatctcatgttcacagtgttgtcttctgtctgtctgtctctgtcccccacccccagtgtgtgtgtatgtatgtgtgtgtgatgctattttgtcagagattgggtaaagcatatggtctatagcagtcaccaagccagtcttgcctgcctggtgtctaggctaggggctaaagagaggaaccaaccagggacacgaaccagaggaatgcgtatgtaacagccagctgtgcccaccatgtggagagcaaagcagtggagggtgctatcatggcacctaagttaggctgtgggcaggctgttgggtacagcgtccacaagaatggtaacaacaccacactgtaacagtcctagtagccacatttaggggaactgagtagctctttcaaggaggaaaacttcataaatgcaaaggaatgttcgcctttcgattttgatttgtttatagtactagagatgctctaggctagtgtcctacctccaggccctttccttccttaaaaatatcaagaatggagcctggtatggggggtacatgcctgtaatcctagtaccaagaatggaacctggtatgagggtacatgcctgtaatcctagtaccaagggggcagaagcatagagggttattgccaataaggccagcctgggctattctgggctagactggactagtctgggctatcctgggctatgtactgagtactaaccagccacagcaacatagtaagaccctataccagaacaaaacaagaccaggaatacgcccttgtagattactattcagagcctgcttcccatcagtgtgaacacacgcttccttcagagtcattctgtttacagtcccctctttcctactgattcccctccttgggttccgagtcaggaaagaataatagcatccataggtaccaggagctacgtgcaccccagatccctggactatttatcatcaagtagttgctgggaacaggacagactcaggtcagctggtaatgaaggtctccatgtcatattcctttctatgaggagagaacttggctggagtgcagacagctggacaaagctgtgaccgagttgggagaggctggggacactgccacactgctcctggccaacctctccatcttcctggagctcttggggacatagtctttcttcctgcctttgtcatcagcccttgagatgacagcagtctggagttaaggagagtttagcttctgctttttttttcaactgatctaggttagagataataagaaattattgtttttgagacacggtctcaccatatacaccaggcaggtcttgaactcacagagatctgcctgctgcatctgtctcctgagcgccgggattcaagactagaggtagaaatgctttaaggaggaatggttgtgtattaattaacatggcaaggcaggtcagaggtcacagtctgggccctcctcttgcagaggagaatggcgtgcctcagagaagtcatgagtctcgggcctcagcagaattggtggcccctgccctcacaagcgggtgactccactcctcaatactctctgactccctgtaagtcatggcacttccttatcagaagagcacagcgttgcaggcctgcccacagatgcccacagcattactgtctccatgctagtcagtttcttgagagcttgggtgatcctgagagcaggggcctgagactttgctggtcacagctctggcttctgccgagacaatggcctctgtccgcacaactctaaaatggacacgcagctctctgccagaccagaggtaagggtacgtgtctctaggggaacagggaacaatggccattttcagcctttcagagcagctgcagggctctcagcagaggaagggagctggactggggcccggggggactgaccctgccaagctgagcccctgcagctgctgggagacagtgctaagctgatggggccagaagggcagagcagctgagcaggcagaaaagggtcccgggaattactgagctgagcttggtgcacacctgtgcactgcagtctggttaagctagacggggtgctgtggtttcctggggtgctcttgcagggctttcgtgggtggggagcagagctgcagaggtagctgggtggccctaggtgccatcttcatcccttgagaggcctttgagggatgcattagtgttggtctgggcagcttgtttgcagccctccgggtaatgtacccaagagacacaccaagactccaaacccaagatgatttttttttcctggccttccatggtctgacaaagtcccagggttcttgttattctataagcaaagccgtgagacctggaaatgtaccctccctccagccctcctcctgtctgtctaccctctctctgccccacacaggtgccttatactagtcacatcatcctaggtacaagcacaaaggcctcctcttgctgtccacctgggagctcagactggtccaagcctcattgcattgctagattatgacactgctctgcagtgtcaccatcactcagcgcagggcccagaagatgctggcaaggccactcattgctttggggattcgggctgcttgtctgggatgtgggttccaacggttccttggtttctgtgaacatgggaggtgaactgggcaggggctaagggtctgtgttaccaccactgtctattctttacctgctgtgctttaaagtcaacgaaacacatctgcacactcagccctgcccaggctcgggtgaaaaaggtagactctgaggcctgtagagttaactttagaattcaaacgagaccttgtttaatcttgcctttctttctgtagaatttggagtggaaagaatctcaaaatattaaactgaaattacccagttttaaagatatattagcacattactataatataagtggggttataaaaatagaaaaagaataaaaaccagtggaaaaatcaaacaacaaatccctcatctaattgttccccagaagcctccaagcccgtccacatccaggtcttaaggtcctggctgcactctgccgccctctggtggcagatgtctgctttagctggaagatctggcagatccccgcctgaccttattcacctctgtgttccctccccaagaaaatgaaaacttgggaatcacttcttgagaaagtgaggtgccatgggggcctgttgacaaacacagctgtgaacatgtctgagtttcctgcttctctctctctctgaaacttaaatcccaagaatgtattaaaatatggtaatgtcccatgaagtcatgctttaacttaagggaggacctgtctcatgcaatcatccttctatggctgaaatgttgggaaagcggcagcatctgatgactgtgggcagactccatccggagtgaggagcgaggagtgggctggtgctgctgtcagttctgtccaggctggcgtctgagactatctgcttgaggctctctacagtgcggtcactggagggtcttgtgccactagatctctaatccttgcttaggcccagtcacagacaactcagccgactcacacacgatgcatcttttccctatctggcagcttcatgaagcccatatgccctagagttcagagctttttttgtttttaaaggcaaggtcatcatgtgtcatacagattcatcttgaactcatgtcctgcatccaacttcccgagtactgaaaatatatgttaccacactggttagttttttgtttgtttgtttgtttctggttttggttgttgttgagacagggtcttattatatagcccaggttggctttgaactcatgatctctctgagcctccctgctgcatgctgggctcacaggcatgtgcctccactccccgtccagagtggctctgtaacagtggctaaagagcccatgcacatgtgatccatgtctccagaatagatcaagttacttcaggccttcctgccatcctgtttgtgggcgtgcgctcagaaaacacttaggctctgttgatacaggtgacgtctactcagagaggtctagtgcctggctctctgcgtgattgattgctgttgatagccttcaaaacagttctagtaagatgttcgtctgactgcgttttaaagcagggctttccttcttccttttaaaacagtaatgaatcagaacagtcccatctatacattaaaagcctttaaaaagaataatatcatttagctgcggtttctcaagcgaaacctgcagctgtactgggaacaatcccccttatctgtctttgattttatgtaggcatcaggtctggctatggcctctggtagggcaccccacatctgaagatgccttccttctccttcctagatggcccttgaagaaaaatgtctagaagctgcctgaacacaagagtccccttttctggtgctcacaggcttctgtcttggtgtctgtgacatcagagattcttcgcctcacgaggcaagagatgcatgttagagtgttaagagtgtgtggactcaggaggcccccagccagagaaggactcacattttgcatatgtgggtactcactgggaatatatcttgaagaaaaactcatcagaggtgtgcaaaccttcatctgagcactgagggtctgagtacgtatgtgtgcaagacctggaagaagctgagcgacacctagccttctccactatcctcctttttacccgctggccaccctttccctgtctaatcctttcttagtctcggagagatggtgtgcgcacagtgggacagttggaggccatagtaggacaactgccacagatgccacagtcagctttcatctgggttagtctctccaggagatgaaactctggcttccccaagcagggatgggacatagagaccaggaggaggccttgggctgtgggtggggagctcataccagccacgttccgtcatttgctggaacatatccagcgctggggagtttaccactccccgggcctcccacttcctggagagttttcatcttctgatacttttatttctgtctcccgtgctctgcttacagcgtttgcagctgggtcgtcttgcatgtgatttctcttccgttatgtgcaggcagctgtcagcccctcctcgccaccccatgtccactgtcactgtctcaaggcggtttcctggttcccgtgtagacaccaaggagatgaaactggtcctgataccgtgcagtgggttctgtccggggaagagcctccaggtcccgttgaaaggcagctgtgtaataatgactcttatctctttatgagcatttaaaacctggatgtgagcgtgtgtttcgtgcactctgtaaaagaccacagacaagggacgtggcttcctcgggagcctgagctgtggcatcctctccttgcaggctacctgaatgtgctctctaacagccgctggcgggagcgctggtgcagagtgaaggacagcaaactcattctccacaaggacagggctgacctgaagacccacctcgtctccatccccctccgtggctgcgaggtgatcccgggcctggattctaagcacccgttgaccttccggctgcttcgaaacggacaggaggtggctgttctagaggtatgggcttccctggggctgctatccagagaggtgtacacagattctgtcaacagcatgattaggtcttctgcagaagaccctagctccctgtagggactgattttgatccagccccttccctcccttggctaattctgttttacgttgtcttcagggtttctcttttggagagtcatggatgatacaggcttccaagagcatcatgcatgacaactttgcttgccacagctaaatgcctagctccaaataacaggccaccttttctcttctttctttctttctttctttctttctttctttctttctttcttccttccttccttccttcctttctttctttctgatttatttatttttatttatttattatatgtaagtacactgtagctgtcttcagacacttttttcttctcactctggccctgcttgctccctatagctgacttctgacaccccagaagagggcatcagatttcattatggatggttgtgagccatcatgtggttgctgggatttgaactcaccaccttaaccaccttaaccgttaaccgttgagcccactttttcaaagtgcctaggcaggcaataccttgtgggggaaaaaaaatctccattaaaatacttcttctaagcataggctactcaggtacataggactgtttccttcgcttgtcctttggaaagctctccacatgttagggcccctgacaccctgtggtagggtctgtgaggagcaagcctgtggctacttatgtcctttattgtctgcttggctgctttataggatagttcaccagtcttccattttggtcttttctacttgacagtaatccagacttatttttccccttttctcctttctccttcttatgattaagatacacacacatgtcatacattcacagacgtgaagaattatgttttccagggttcatgtcagtatgttcgtgccacaaggtcagcagaagtgaggctgtgttaggcttgtatcagcggctgacatacatgccatccaccagacgcagagcccaatcttaaatggctgtggtgtgggtatgggactctgagcagtgtcaaggtgtccaggcacgcagccaacatcttgaatttcagcatgtgggtacttatttccaaaattgttttcatagtaggtttttgtttggcttatttttggtttgtctcggaccttatattatctctataggactcactggcccagatagtctcagggacgaggaggatgactgccccctggtggctgccgtgcaaaaatgcatatctcatccagttctgggatgctgtatctaccctagctctcactgatccgacagcaagcagccaagtctatttttttttctcttgggctgttacctgcctacaaaaacacttaacaaggatggattaaaattttaataaggataattttaaaggtagtatggaaaaaaaactttaaagaagctataaggtctggcacctacagatgtctttaaaacagtaaacacagagctagtcaaaactacagaaaagtgtcacacctgcaaagatgcagtggacttgaagataagctgtcttcaatagtatccagataagagaagcaagcttgccgccacataccacacccgctgcagcacaggctgggctaggacctctgggagtcatggggtagagcgcccacctgcatggtctccaggccaggcagccagcacactttgtaacttgctgtggctccgatgtaattactcttatgaatctcttttctggcactctctcccaggtactctgtgttctctttcccttcccgtcacgcatctctgtctctcttccccgtgacaggcatcatcgtctgaagacatgggcaggtggattggcatcttgctggctgagacggggtcctccacggacccaggagcgctgcactacgactacatcgatgtggagatgtcagcaaatgtcatccagacggcgaaacagaccttctggtaagactcacgcacggcctgcggcaggcctgaactcggtcacattcctcttgttctgtttgacagtaggtgctcagtgaccacgcagaccagaagctcacccagggacttttccttggtggggtgctggtcctgatgaccctgatgttggtcatttcagccctctgggatttctgctagagtggccttggctaacttgtctgaagatggcttcatggaccccaggactcctgcgacatctgcctagctctgcccttgcagccagagactataagggatcatggcagttttatttacaccaatgagtgggtagtcctgattttgtcccgtgggcagctgtggtctcccacccactggtgacaggcgtcttctagaaagcagagaagattctgaatgctgctgaaacaaggcccaagattgcaaaagcggtcagggcagcactttctaaatttaagttgtgacaaataattctactttgggcaaaagcatatttttgagccaggacacttccgggagcccagtaatcatgaggggtttgtagcagcagatcccgtggggtccacagcccatgtggacattcagcatcgccagctgtgctctaaggtgaaagttctctccatggtcacctgagatgtgttctcctttctcaccgctttgacagactgctgtccgggctgtggtggtgaacaggcctctgcacagccctgtgtctccggagtttccctttacacacaatggaagtagggcatgttgactatatttggggtggccttgggctagagaactccagtggccacagtgtgccacagtgagccccacatgacccaggggtgcagagccacgtgtcaggcacaaggaagagttccagtgcacctggtggacattcccaacagcctagtgcttaccttgaaagagaaccaatgggctagggatgtagtttagtcagtatggtagttgcctaagcatgcccaaggccctgagttcagtcccgagcaccagataaactggtgcacatctctaatttgagcatatgggaagtggaggtaggaagagctgaagttcaagttcatctttggctacatggtgagttcaagactatcgtggaatacatgagaccacgtctcaaggaaatagggtaactgatagactttgggccttccagacacacattacctttgaatggacccactgcccctagcaattagcaaattctgagccagtgaagggagggttactcagaaggtggattccacatttgtaccagcaccgtgcactcaatggcttcctactgatgatagagtggcagactcacgcagtgaggccactggtgtgtacagtggagaatcacacagtggaaccagtgtacacagtggtgatggtgacaggtggaggcccatccccagggcagtgtcagcctgtggcctctgcgtcagagagtctaagagactgttacttcttaagacggtcctcggccacctgggaggctgtgggtatgtgccactccctctcagcttcacatctctgtagactgcatttccccacatatgtcacccaggtagcacagcgtgaccactgggtgcagaagcagaagtggaaacccagttaccaatctcagagaaatgttcaccaccagaaaatcagtggcaccttttttatttatgttgggaaggcttctcaaatacacacacacacacacacacacacacacacacacacacacacgtacacacacaagtatgcattaactgtgatgaaatatgatagactcgtgattattgtttttaaatgagtacatttctcacattttctataaattcagtaggtagtgggcaggaactcttcatggaagagctggggccagacacgagtccctgatactaggaagtttgaacagtacatcctgggccagctgtgacatgccagcatgcacccagacacttaggtcactccctgtatctgaccccctttttaaaaaaatactaaaaaaaaatttttatgcaatatatttttattgtatcctttcccctcccccaactcttcccagatcctcccccacctcaacataattttttaactaagaaaataaacccccaaaagacaaaaaacacaaaaccataacaacaacaataacaataacaacaacaaaaagcacacatgaaaaagcctaagatccttttatgttggcaaccactcctggacatagggcgaggcccagactgtggctgatgtacctgctgactctcccctggagaaagtggatgttgccctttctaacaggtattagttgcaaatagcttcttttgggaagatggagattgaaacagagtctatatatctttggctgccctagaactcactatgtagaccaggttggtctcaaactcacagagatccaactgcctctctctcccgagtgctgaaatcagaggaatgcaccactatgcctggcacaaatagcttcttggtttgtggtgggactttgtgtctatttccccctctcagtgctgggatcttgtcactggcaacgtgtgcagatcttgtgcgggctgacacagtctctgcgagttcatatgtgtatccattctgttgtgtctggaatacactctttccttggagtcacctaccacttctggctcctgtaatctttctgcctcctttccctcatagatccctgaaccttgaggggaggggctaggattgagtctccaaagtctcttgttccttacatatgtggttgtagatctgtgctcattatcatctactgtaagaagcggcctctctgacgagggttgagcaatgctctggtctttgagaacagcactatgtcattaggaatcattttactgctatgtttctttatcagaataatagtagtaggtctccccctactgcctatttagtctcaggtttttagccacattagcagtgttaggtatgagtcccatctcttggagtgtgccttagtgtcaggcaaagaatggctggcttcgaccataacatttgtgccactattgcactgttatgtctttgcataatatataatcatatattatactatatagcataattgctattgtgggtcatagggtttgtaacggggttatattaatggttaatttttctcctcctgtagtgtatagtacctcccagcactacagacactagtcagtggcagtaaaaattcttgttgggcaccagttctgtttctctggctttgatgggctaagtcagtggtatcttcagcaatagcgtcttaccattgggttgtggagggaaccgataacattgacaatagcctctaacattggggtggctatgggaccccattggccaatgactcagtaagatgtgacccattcctgcaaatgggggttttacttggtggcataaaatgtgtagttggtgcattgtctctctatggtgtctccatttaaattccttttatagttcagggaccttctatggtagtaggtttccatgtggcttttcaaaaggctttagtgttaataatctctcccatattccctcctttccccctcccttccccctccctgtttaattctttttttctagtgccactttatagctctatatcctgtcccccccccttttggggatagttccttcccccacccccagtccctcgaaagctacttaactcctgtagatattttaaatgagaaagattctgtatggcaaaggactccatcaaagtagcagcctacagaatggggggggggaaactttatcaattaaacatttgacaaaaggcatattagagtatgcatagatctaaaagaaatctgaacgccaggaacacaaataagccagttttaaaaaactgggatgtagaactatctcagggtttctatgataaaacatgtccaaacgcggctttagaaggaaggggtttgtttcagcctggagtctcacctcacagttgaccatggatgtcaaggcaggcactcgagcgggcaactccatcctgtgatgtctccacagcctgatagattaagctgttagctgtacttatgtggaaattactaaaatcctcaaaacaaaactcacagaaagttaactctaactagcaaacattaccacatttaggagaagccctcagtgaaaaagtatttgcctccgcacacggctcagtttttcctttataactgaccagaattttaatttaaaccaaatgtagggtggtcacatcttggagaaaggaatgcaagtcactgtatcgaaacgaacactcttcattaaaaaggcacatgccataaacttagcctaggaattttttttttacctcattaaaatctttttagggatgtcagctagcaataaagttaattttcatgttttagttttctagccaaacattcccgtaaaacttaatagagaggagactgaacaaggaaacggccttcaaaatatggtggcttgccagcgatagatagcccaggatttagttaatttttcgctttttataacttggcgtctgtgtggtgaatctttgccaaatgattataagaattatcagcaattgtgtctgactgaagggaagaggaaaataaggtattgaaaagggacaagaaacagagaaaaaaacatcttgtgggattgtcctgggagatgggcatgctggggtgtaaatggtgctggacaccgaggctgaccaaaggccatgggtcatgtgacagaaggacatcatcccctgaagctctcccaagtgttgcccactgtaggcccagcagagcatggtggtggtaatatgcttttgactgactggagcgggacagggtggggagagccaccttccagccaccatctgcaggtccctgcatttgcatatagcattccctgggatggccttatgttttagagtcagactcatttgtacttacacacttggctgaaagtcactttggaaaaagtgccagaagggagtgggaagcccctgcttattattcttggcttcatgtgagttggcctgtgccccgccctcaaacgttggaatattctggccagtggagaaggcctctgccaacaaggatgtgtgtgtgtcatgattctcaaatccttcaaacatctccaatgacggaatcagaaatatgcccagttagagaccccggctctgctgactgtctttgatcttcctgatatctgtgcataagtgtgagtactggacaggttgccagaacctgacgctgcaaagcaagttgtagttcctgcgatgtggaggagaaagagttctgtgcacacacgtgccacactgagcggtcagcagtagccgtgctcagtgccggcaggtgaaggcacacttggtatcctgccattcttccatgtatcacgtctcattcacaactgttcccagacagtcctcaactgagacattcagtcaatgccttgaatgcgcatgtgaaacacgcaggaactcctaagtggctagtgaatatcttcttcttgaatttcctccttcctgtccatttaacttccctacacttgatttgctaaagactaagaatagaataattaaatcaatgttcataagctaggaagtgtaagatgctgtatctgcagaaagggttgggggagccatgctttccagcttcttccagcagggggcagcaatgcactgtgagagagtgtggccattagggtgtgcagagccacaggagtggccgtgttgccctaagctactttccccagagaaacgattttgggggaaatacatttgttggttaagtttctgtgattttagtttccctagttaggagcaaatgctatcttgcttatttcttcctggggttttacagttgtcccgaaacaagcccagcttcctaagaggccagctcatctctcctcgtgctctggaaattggggtgacagtacacccagaagcttgtgttctagtgaggagaggcaggcaaggagcagggacagaataggctaggttgggacacaaatgaaagtcagcattgcggagggaaggggattcttgacggcaaggaagggcaccctcatcccacctccccggggcacactgttgggaggagccatgctctgagtgggcagagtgaaaagcagaaggggctgaagagctccagcaccttcctgaccccatgcaggcaaggaaggaggaagccggacgagccaggggcagagctggagtctgcttcaggtggcctgccctggacagtgttttgcttcattgttttggtgacgttggaagcttcctctgggtagtgaggtagtgatatgcatcaggctggtgtgctctgagtctctgagaagcaagggcagagaagagaggcaaactgcccctttctgaggtgcagactcttgttctgcccttgtggccaccaggtctgggtcttctcacagcaggtgacaccctcgttctctgtggactccagcagggagccactgctttgaccctgtcctgaagatcaaaagctctgtccccttcagatgtcattcacaaatgcagcttgtcacccatgctcaattacagaacagatgttaacctgaggttctctcaaccccacggacctccctagacctcaggaagtggttcatttgctaggtcattggtgtgttaggaatccaccagtgtggagctcttgggtagaaggggcagtgcgtgagttatggaagaccagggcttcctcttcttccctgggtacagcgccctctccctggatctagcaccttccttgggtacacgccttcttggagtacagaggcttcccctgagcacagtgcgctcccagagtgaacacctttcctgggtacatcttctctctgggtgcacccttctgtgtatagtgccttccctgggcgaatctccttcctgctgtcttcattgcagaagctcttccgccctgtcatctcgtagtggaaagtcccagactgtgatcatagggctgtctcctcggccaccggcacctctatccccaaatccttgtggcttaccaggacggacggccgcttgttatgatgggcggaggtggcttgttaccattagggaattccaaggatgtaggggctctggccaagaacaggaacccaatcatgtatctcgcgtatcccggcagcatgggcttctgaagccctagcctgggtactcacagtgttcgcagcagatccaggaccagctgaaggtacgctgtgtggctgccagagaccacgagtgcttgctgaacagccacaaacatcccagagatggccaggtagtggtgtagaccatgccctcccctgcctttgggaatggccagactgcagacagaacaaacctggcccacacttgtcagaaagaactgctgtgccctccctgtgttgagcattccccgccatgatgaaataggaaaacaatggtggctgtccaattccctccacttgtaggtgctactgtgtgtccccatacatggtatccatagtcagtgctggggcctgtctttgctctgggtgaggattgcccccagtccctttaagatgccgctgcctaagtgttctgcccctgagcctgacatagcctttggttgcatcagtgtacagagaggccttgctggataactgacatgtcttgtttctttctctcagctttatgaacaggcgggcagtgtccactagcccatacctggggagcctctccaacggctacgcccatcccagtgggacagcactacactatgatgacgtcccctgtgtcaacggctcggtgagtgtccttcaagagccaatggtcagttttggttggtgacagattgctggttgagtctgtcctggggtgtctactttctattcaatgagatggggaattaaaccactttaaaccactttccccccaaaccttggtctctgacatgagcatcaggtcttgtgacccctcgtagacagctcatctatcatcaatagttacatctcagtacgcaagaggctggctagaggacagtggatgaaattagaataatagatggagctggaagaatattgcggtttacagtgtggctaagtcagatacagtgcagtgtgagtgaccctgattagtttcacccaacacagctgcagccgccatcacccggaagcagtgccgcacagtggctgccttgctgtgccctcgcttggctcctggctatgcctgtgcagtgagcaggtgtggggcagcgtgcattgggagccttgtgctgagaggagccagtgtgcttcttaggggtgcctccatcataggtgaggttttagacttcgtccttactggtcctgtggacagatcttagggaggggttgtgcctggtgagggttgtgagcaggactctcagcctgcctttgtgtcatggtgggccctagccccagccccacctataccattctggctattgcatcattttcaaggtggggcatggcctccccttactgtgcagataccagcagcactgggtcagttctgtttgtgtaccccaacatgtaggcttccctcaagggtgagctgcccctcccagcctgtggcctcagacacccccacgtatccatgcaccacgcacacacatgcatgcacatacatgcacacgtgtacacacacacacacacacacacacacacaagtatgagatgaacgatgctgcggggaccccatgcccacttgtccctgtcacacggagagtccagacaccatgctggctcaggttcactcagtgcttctccccagactcacccatggttccatgtttatttcatggaaagaaacagctcaacactgaggaatcctccttccacgtgtgctctgggccttgggagttgagacatagtgcctgtgtcctgccctttgctgtcctcagggcttccctgctcaggcttcctcagcctgtttcctgtgtgcaggcctctgcgaccacgtgacctcactttggaggcttcatttccaggttccataaagtctaagctttatgacctcttcttcagtgtgtccaaaattcaattcattctgcgtcccctttctttttcttttctttttttaaagaaagggctctgcacacatgttctagaaacttctgtgggatttctgtcactgtttacaaagtgttccatgtgactccatccttgctattttaggaaaatgagagtcaagtactgatcattgtggacctgtgtgactgtcaccgtgaagcgcctcgttctggcgtctctacgttgctttaggctgctcatttgtccccagcatcacaaaaatagacactgatgtggctgcagaggagacacccccaccctgggagttttaggcctttcctatttttataacaaagagctgtaattatagtctggcaggagggagcgccacaaggcgagcataaagaacaggctgagatgggcagaatctatgaattaatatttctttttatatcgcagggcaatttacaaagacctttaaagcctaaagggatctggcactggctatgtggggtttctttatacttccatgcttgtgctctggaatccctgggtcctgtgacgtggctttgagcggttaactctctgttcaggtcatctgctagcacagtgccactgtcccatgcaaggctggggcaccctgcatcctgggttgctttggcttcttccatcagcacactcttttttatggtcttttttttttttttttggtttttcgagatagggtttctctgtatagccctggctgtcctggaactcactttgtagaccaggctggccttgaactcagagatccacctgcctctgcctcccgagtgctgggattaaaggcgtgcaccaccacgcccggctccatcagcacactctttgggctgtgacattctcttcagatgctcaagtgagggacttagattgtgctgaccttggcggtgactttgctggcccccagggcagcatggaccagcccggggtgctctttattctggtcctgtccctttatcagagcctgaggctctctgagagcagtgtgtggccatgatgttgactttggccagctttgcctctccctagttgtgtgagatgctgttgcctcagtttcccctgattgccaagcggactctgtaataaatcagccagtgtgtgcggagcacaatggctcatgaccatgatctcaaacaccgtcctgtgcagcacggagctccaggccctgccctgatgtcacttcctatgtactagggaactttcaaaccccaggtctctagagctggtaatgccagctcggcactcttccttttgaaaaacaaaatgaaaacatcatgatccaatgactctgggaacaatttaagcacagagaaaacttcctatgactccaaaggcaaagggactcttaacgaagctgcccacagctgaggcgcattcgcgtgcgtgcgcacgacgtcatgaggcgtgttggggggtggggtgctgctaacatctcgctgtgctgatctctgttctccactggccactaacaaacaggctgtgtgtgttgcagtgggacatggatggcggctttcctggctgtgtgagcagaggcccagtggaagaggtgctttatgataacgcgggcctctacgataacttgccatcgccgacaatctttgctcgctcctctcctgctgaccggagggcatctcggccacccactgacaggctgtcctctaaccactacaaatcccccacctcctgcagcccaccctgctccccatctgtcactaacacctcttctgtggggagggcatctctcgggctgcactcccaggtacagactacgttcccaaactccccgacatcagtggccctgcagaggccacgtgctcaccaaagtgtcacatagtcatcagccatagcctaattcacagttagccactgaggaacgtgtgtgaccggctcccagattgtcttccaagtttccccagtacattttgagaattatgtcagagattataaaaagaggccgtgtcacttccagaaaattctggaatgccaggtttctctactatgttctaccttgggtataagttagcaaggactgcccccagggagtggttacttcctgtgtgtaaatatgaccagcaccatgatgacagccagagggtcgtcaggaaaaggatgacgtgtgccctgcacctgtgtgacaggaagggtctgattctgagtggcagataggcctgaggttcaaactcttgtttgcccactctttggcatgcaccaacatttctgaggcgacatcaactccctccatgaatttttaaccatgtatgctcttcatttatatactcttcctggagtcctgggtgcctcatttaagaacactctgaaaacagagagcaagaggccaggctttctacattctgctatactctttgagcatttttgagaatatagcagacaccagctaaagtcctaggcctccgggtagcagtgactcacaatcacacccccagacattgttttgtcacaacagacacagaaggcttgagttatgtagatgccacccccaggagagtctgactcctaatgggagggatgtggacccccggctgagtgactgcttgagcaccattggcctctaccagtttcccaaggatccctgcccagatctagccattgtgtcttacccgtgtatcaatctgttcgctggtggcgtagttgtctttggtgaacttattagtaagcctgccacctgtgcattggggttgcccccttgctggtcaggtatcacgtgatacatggggtggtgctttcactgttgcttaccccagtctctgtttcaaatagaaaacggtcccaggctgaattctagtgcctttgcatgtcacatccttgtgtggccattcttttgggagcctgtcggctgtgagagcacacacatcccgagagcacctggaagccatcttgtgcatggatgttcagtgtcacttagagccctgtgggaggtgccagcgtctttatatttttaagtgagcaagcagaggttcagaaagtttccaagggctagctcagggtctcctaaatgacaagccagaattgcagctagatctttttatgcagctctacactggacctccaacatgagaggcaggcggtgggagggggacggaggagattgacagggcctgggtgtcaagtttccctctatgttgagctcaatgcctatcatgcagtgtcacctgccggatatggagctgtggcttgcagaagttgggtgagcagaggactgctgaatatttttaaagcttatagctggtgaaggcttacattgtatatgtttatgctatctcttttctcttttttatagatttatttatgttatgtatgtgagtacactgtagctgtcttcagacataccagtagagggcatcagatcccattacagatggttgtgagccaccatgtggttgctgggaattgaactcaggacctctggaagagcagtcagtgctcttaaccactgagccatctctccagccctatgctatttctatatatgtgtctcttacatccttcctcagaaccatctgatctggaaggaggttatgaatctcattattatatcattcatttaaggacaagaacctccctgcagaaccacgcctttcccctaggaaaagtcttcttatggaaaagtgacttagctctagaaatacagggtcacaggttctcagagggtattgctgcatgcctgtacatggtcactcagaggtgctttcttatcagcacttaagaccccagtagaaacacagcatccccccccccccattgcagacttcctggtagctctgggtacccagccttcagtgctgggaagcatcctagctctcaaagggaccacaaggaagtccagtgacagtgactagaaagccaattggtttcctttgtcctgggaccatgccagcaggttgtacttaagagtcagagactaaaaagaaataactttgggcaacagggtgcttttgttcgattatttttcattttctctgtgtgtttcaacagttgaagaacaaaaaaccgccagcgtcatctaatggggttcctgtaaaggggaaggctcccagcagtcagcaaaaaaaggtggaaactgcaggtggtgtgaaacggacagcatcaagtgagtttcccctctggctcctctttccgctttggtgcagtttgtagacttgaggctgactgagtcatttctgcagaagatgccggccttggggctgggttgggaggtgggacagtatgcattcctccccctcccccatctttacctgccaggatctctagcccaacctctgtaactgttgcctggcttcctgggatgacattcaaccatgaggcactggtccaggagactctatttgtgtctctagaacaccattgaccaatcgtgtaaactgtgaatacagccccttcgtctgtcagatgtgcaggtagtcaaccgctgtggttgatgcagtggggatggtgatgctgggcgcctcaaccaaagcccccaaatgctctagggcacaggaggtctttctacttctatgcagatcacagtgcatagccaacgccttccactcctgctggtctctggcagctgtgtagtcagtgtagatgctgtgtaccctgttatgcaaatgagggatgagccccaggtagtgcaggaaagccagaggtctcaccacaggccagccactgagctaggacgtgagccaggctttcagactgcagagccagctatacagagcaggcagagagagacacagcctgcctgagagttcagcagccaccctccatcacagcagcgagatctgggtgtgctgatgtcttgagtttgcatttgccctgcccaggtacattgggtgatctaccactcagccagccagcccacgggacttaatcattcagggtactcacttgttgctggggatgcagtgaggagagcatgccagcttggaaaagcaggcatcataaggactgcatggggctctgcaggtcctggagctcctccatcagtctgggccaagcgagtgtccatgccaaatcatgacatgccaccgctacttgggattcctacttgagccttccagtctgcagccatgcagttaacagatcgccttctgtgacagcgtggataagacttcacctgggaacttccgttcctacggagagaaaaggcctcagacctacatgggactagcatccattttagggtctgagtgcacaagggcacagaaaggctgtctttttccatggtcaaagcatggatgagccttgggacttctgtgacatttggctgcttcagccccagggaacctgtgaattctcaagaggagtttgtctacacctgtgctttcaaacctgcatttcaaataagcatgtcaggagcccatcaggctgggtctcctcattgtcaccgacttcccttggccctctctctctgtaatttcattccccaatgtcttgggtgtgctcacactcttgttcttagtgttgttcattcagggaggtgcaggagccagagggatgcgtcggcttaaaatgccttgttaagcaagatctgaatcccacgcgggcgccgtcagcttggagtttctcacggccctctgctcgctttattttatggatgatttatcctggtatctggtgggaccttctgtagggaatgttttattaactttggtgacatctaatggaaacaaaagagaaaaataattgcatccctcgcttctgcagagttcagccgatcgcattacagttgtatagagtttattgcatggggaccaaatgacggggaaatttataagctgccgtctgtaggtttgttgggggacatattggtttagacagtggcgtttgcacagtttagcatggaattttctgggagtgccttggtttctcgggacagggtgataattcttgggctgaggatcaggcaatgtcattctgtggaggtgtttttggtgagggaaggagtgctgactggatgtgggaagaacacacatctccatgaatagggcacattattgaagaagagatggtacaaccagcgcagtgcacacacacacacacacacacacacacaccagtccttgtccctccatggcttctactctgaaacagacagacatgcacataggcagcgacagactggcaggcagggtccagctaccctcagagctggtgggtgtacagtgactatagagatgatagaagcaacctcggggtcagcaggccttggccagtcatgtgagcatctcctgcacctcaccatcttttccagggaggtttttcctaaactcctatctgactgctctgagttcctgctttgacttccccacaataacactgcaacctgaaactataatccagttccagggcatcccacactggctgaagagactgtgggtggggcctgggttcaatactgtgtgaaccgctatgtgctggtgtccaggactctggatttcccacaatgcatttacttatttacgaattcactgttcagtcattaaattttaacagctacttgtacaggactcatttgggtagttcttttaagtgctttataaatattaattgaatttttacagcctcctgtgaacagcctgctcttgtccccatttcacaggaggagaaactgaggaagagatccgttctaggttatggggttccaagactgtcctctaaatagtgggtctccaagcaacttgtgctgcctttctgtcattttgtttgctggagaagctccccctcccccaaaatctcaggccaggggtaggctaagaacagacatggggtgaagagaggtgttgcttatagagaggactacatgaaccctaggaggctttgtttttttctgtgtgttttgcttacatgtatatctgtgcaccatgggtatgcctagtgaccaaggagggcagaagagggtgtgggatgccctggaactggagttacaggtggttgtgagctggcgtgggtgctgggacgtggattctggttctctaggagagcagccagtgctcttagccatggagccatccctccagaccctctagaggttgttttccacagtaacaggttgccgttctagcttcacttcttttgctgtaacaaacactccaacaaaagcaatgtaggcaagacagtgtttctttggctgacagttacaggttagagttacaggttagagttacaggttagagttacaggttagagttacaggttacagatacaggttacagatacaggttacagatacaggttacagttacaggttacagttacaggttacagttacaggttacagttacaggttacagatacaggttacagatacaggttacctgggaaatctgggaaagtcaaggcaggtgcttaaagcagccagactcttctcacccacagtcaagagtggagagaagaaatctatggttacctccctgatgcccagcactcagccagtcctctgccctggcacacattccagggcctggtgatatgtgccacccacagtcagggtgtcaaaatgcagggggcaataatcaagacactccctcaaggacatagcgacacgccaagctgttctaggtaattcctccttacgacactcttcccagatggttctagattgtatcaggttgacagaactatccaggtcactgccttgccaggttccagaatcgccactctgagccttattgacaattatttgaaggctgacgccttatggggaggaacactgaagggactcctcagtattctgtctctgtaaacatgcagatcaaagtattagaggagttgaggcaagtcgagagttcccgctccgagcctgctaggctgttaggactagcctgggacagctcacaggcatcggcacccggactcctctggttgagctaaccctgtgctcccttgctcagatgctgagcagtacaaatatgggaagaaccgggtagaagcagatgccaagcggttacagtccaaagaggaagagctgctgaagaggaaagaggccctacggaacaggctggcacagctgcggaaagagaggaaggacctgagggccgccatcgaagtgaatgcaggtatgggggacttggccctgatggcccacgtgcctgtgcccgctggagttctagattccattcagctcaccctcagctccatgggccaaggctgcctttttagccttgcctcctggggtgttagccttgtagggggagcccagggtagcacagggttgattcagtgatgccaccatagtcagggactgtgccctgaccccagctgcacagtgagattccagcaattccagtctcaggtactgacagccaaggctggtaggttttgttccttgcctgaggtgactcagtggggcttctgtggaggaagcagccaagggagctgaggcgttttctcagagctctgccaaggtcaagcagctctctattctcagacgggcctggggagagcaaggctgtacctgggtttgagaaccagaggaaaggtctatggtagtgatcacaaaagaggggcagtgagcaaggacagctgttggggtagcggtgcctagagacgggaagtgcccaggcacaggctaggccttgctcctaccagacttcctgatccaggatggaagctaacacctccctctggtcctggccagtgcccccactggggcaaggcttttcgtatttaacttctactagctgaggagaaggggggctgtgcagtggatgggggagcccagaggggtcactgtcttccagaaggcttcagtgtgggctgaggctggtgcatatgcccatcatagttaaccagaactgaactctgtctgaattgtggctgttcaggaaagtgagttaggggacagagaacaagaagagaggtgaagatgggtccactaggataatctgtgggagtgggttgggcaaggtgtccataacaggctgcctgagaggggtggccagatctatgacagggagggagcatggtgtgtaatggcagcttttctacctgcctgtgtcgagtcacaggacagagaagcagaaaggcatctgtgggagccaggcttcctgtgtcctctggtttgcccacttccctgactcagttgtcttttctgtccatctctgtgcatttcctgcccatgttggtcatcacaacaaatttcaaagagacaagtttactgccaaatcttggagaactatatgccaaggcctgcagagatatgggcaatgttttgtgaccatggcagcataaataattgtcttaggtttttactgctgggaacagacaccatgaccaaggcaactcttataaaggcaacatttaattgaggctggctaacaggttcagtccactatcatcaaagtgggagcatagcagtgctcaggcaggtatggtgcaggaagagttgagagtttaacatcttcttcaaaaggcaagcaagagaagactgacttccaggctgctaggacaagggccttaaaagcccacccccagctgggcgtggtggcacacacctttaatcccagcactcaggaggcagaggcaggcggatttctgagtttgaggccagcttggtctacaaagtgagttccaggacagccagggctacacagaaaaaccctatctcgaaaaaccaaaaaaagtggatgctcacagtcatgtataatatggaacacagggcccccaatggagaagctagagaaagcacccaaggagctgaaggggtctgcaaccctataggtagaacaacaatatgaactaaccagtacccccagagctcgtgtctctagctgcatatgtagcagaagatggcctagtcagccatcactgggaagagaggccccttggttttgcaaactttatatgccccagtacaggggaatgccacggccaagaagcgggagtgggtgggtaggggagcagggtggagggagggtatagggaactttcaggatagcacttgaaatttgaaatgtatataaagaaaatatctaataaaaaatgtgcaaaaaaaaaaagccacccccacagggacacacttcctctaacaaagttacatcttcaaatagggccattccctgggccaagcgtattcaaaccatcacaatagtccacaagtaactggtagaatttaagtgagtgtcatgaggccccttgggctgtgtaggattatgtttgacccctggccctaatctcatacagtaaccggttaataggaaagggtccgggttctgcagggaacagctggactggagtactgtggggaagcctagcagaactcagctaggttggtccctctgaggtgaccatgtgtcctcggaatttcaggcaggaagacccaggcagctctggaggacaagttgaagaggctggaggaagagtgcaagcagagggaggcggagcgtgtcagcctggagctggagctgaccgaggtcaaggagagcctgaagaaggccttggcgggtggcgtcaccctaggactggccatcgagcccaggtcagggacatccagtccacaggtgagtgtcctgaaggcacagcccacagaagtgctccatgctctctcagacagcatgttcaccactgtgcatggtatcagcctaatgtttccactatgttgagtatttggaggcactgatgtctcatgtgtttgtcagagtatttaaaggccagtactgagacctcctctgcatggtcaggtgacaaaggccaactctcttaccttttggtctggtctgactcgacaccagtttgtcaggcaggaacttgctctcaccctgacagcgctgccggtgtctggaagctgcagactgcaacataataatctgtaccccaaatggggcatgagggagtcacctgtcaagtctgagctctcacttttagtcatggctcctcattgtcacctgactcagccactgagacttgctgttgtccctatctgtcccatggccttcaggagctcaggaatggttgcccatgcctcctgtatctcctgagactcctctctgtgcagtggggttgccttctgcattggtgacagcattacgtataattgtaggcagaccacatcctcggaggagtggcttgttagacaggtccttctgctgctgcagacaccttctgcccttcccctctccagagacatgggtctttattctgtcattacactagtgaccatacccacccagagtcgccatggcctctgaagatgtctaaggaaaggcctgtgctgccaaaacattgagctgggagcactccagtcaggggccctcacaggaactctgggctgatattgctctgaaacaacaccctgcacatcccaagtgtgtttccgacattctgagtcatatgatgataacagggtctccacagcaccgcgctttctcaaaggatcatttgcgatcctatgggggagagcctgcaagccaaatcagacccaaggcagccaaggtgataagttgttttcattttgaggtttccaaaaatttctctccagcatctgccacagtgggagtggtcacagtcccagtgtcatttggggctgctcatcgtcctgggatgccaggctaatgctgcctgctactggcagcttctgctaccaggcctgaccctttcagtggcaggcagctccaggaaacattgacaaacttaggaagcaccacatcgatggacaggtgagagaggaggtgaggataggagtgtgggctggaatctggcctctcagtcttccatccctctgaaagtgcccctgggatcaggcgcaacttgtgctggttcttcctagttttgcccatttccaaatctatttctgttttactaaactatttctccccaagaactgccagtggctgagaacgcccctcacacagggctctcctctcattaacagtctcctgtgtttcggcatcggactctggaaaattctcccatctccagctgtgatacaagcgatgctgaggggcctttgcctgtgaacagtgcagccgtcctgaagaagagccagccgtcctcaggcagctccccttgccgtggccacgtgctgcagaaggccaaggtgagacccctggcagggccaggtaccccactgcacttggcactcagtctcctgccagaggtactgagcaagtactcctccagctgtcccccaacagcctcagaggctggggttcaaagatagccaccaaatctgagccccccaaagctctaggtcacctcagaaatgagcaagattcccactccctgggcttgtcttctttgggcaatacagactgggcaagtgaccccgatatcctttctagcacttacctactgtgattctccaacaaggaaagaaaaagccagaaaaaaaacatttttttttctaggctgtccccagcaccctggctgtcaacccagggtccctttactccctgcagtcaggaagaggagccaccaacaacttttgtcacgatcaaaccctagggattctcaaagcataatttctagatggccagagccagcgcttcttgcccatggtaacggaagcggctgtaatggggtggaatggaatggaagcagcagcaggtggaactgagctggcctggggaggggacttccaggccttgtagtgctgacattgatgtgttgagcgttcagcagtcccagcccctccctggacaaattgcatgtaggggaaggactctgcgatgctcttagggtgtcctgggatcctgctagctattgtgctagcccagccccacagtgtgtgtgcttccccagcaagtgtgctttctggaaggcttcacgttgactgggagaaggctactgagctgacattccagtggcttttctgcacatcccgcaggcttcttagtctatagtcagactctcctatgtagaggaccattttgtctaagccatgctagaaaggagctgcatgagtcccctcccggtatctttaccatcagagaagaggggtgagaagctgagctatgctatgaaagaaaagctcccttggctctggctgttcagctttgtccccttctgatggagaacacgaagcctatgactgtcagttcgagacagacagcttcatgcagttcccatacagcacaggagggcgtctggtcccagctgtcgccagtccacagacaagaggtgtggaggttcttgtcactgcagctgatctctgacacagcctcaggagtggacctgagaagaatgaatggccctagtgtcagaggggccccgtgagtttggggtgggggacatattgactaggctaaacattctcctgacttttctagaatcaaaagttcacgggtaattaatggctaatggtatcgcactggcagaaataagaagcctaatggagcagctggcagaatcaggaacattgggacagggagggagggacgtgccacagctctggactggtggcttgtctctgcagaggaaaatgcctggccaggtccccgtctcatcctccccagacacctcctgagaataggtgctgagagccccatgtctgagggcagtgtgcaaggcccactaccctgatgctgcacccccgccccctgcagtggctgtgtccacttcacccatccagccacccgtcccccactttctggtggtaaaagaagcaaaactaacctgacctattaatagggcatccccatgcgtgtcccacctcgggaacttcattttgctagatgaaacaccaaaacaccaataccacattcttcccttgtcccagatgcatactatgattctgtttgtttctgtgaacttgactgcctcgggcttccatgttaatagactcagaggatatgtagtccttactcacatgatatcccagcagtcagctctcccttcccggttctgcctgctaagtgtcccatgtctggaggggccacacttaacctatttactcctgttgggtatttggattgggtttctctctggctggctactacattctgttctctgtggctgagcccggacattgtgtagctctcaaaggctcatgggccatagcaactcgtggtagccaggatcaaactgtctgcgttcacacatctctcttctccaggagtgggagctgaagaatgggacatagagggagcccagccacgcccagagactgtgtactgccaccagcctcgcgtgtgacacgtgtgcctcccagagtggcctgaacatgaccacagaagtttggacgagtctgacgctgacccttggctggcttgcgtgcacgctttctactgtatgacggtgccctttaggaaagtttactttaaaactttggtgtccaaatttacttgttaagaagcagaaatgaaaggggttgacaagctgttttgaggtgccctctagcagatggggcggttctggggatctcagctcagctccagcccatggaccgtgcacccctgtgagacagggtggcctgagccttccccgtgtgcggtcagagctgcgtacctcaccctgtttgccagagggtcctactctgcagcagcatgagctcctgtgtctctgcacaccccgccccctcccgcctgtcccctgtcaatggaggtgaagccatgagaaatagggctgtgaagattcagttttggttttggacaaaaatcttttgtcaccaggatagagaagttgtcattctttttaccagtgttttttcatgtttgcttttaaagaaaatgcctctcccctcctcctttttttttttttttctttttttttcttcatgtgctatgcttggacattagggacttttcagagaccctgtttcctcccagtttatgatgtactttgagagtcagcacagagctttcagtcgttgggtagcatgtgcccctttctcctggcctgagaccccagcttcctgggttgccgggcaggaactcctcagcccaggaagcacattggccaccatctgcctgtggatttaacagagtggggtctagaacctatagtttaacctgggccatctttgaacagagacgatccttccagagcaccttcctccagttacagttgaagctgtgcatcatggatgcactcccatgctgaggttcggattgtgcgggccctcccactctcctgcgctcacccctgtgcacttggtaggacagttcagctgcttaggatgtgctgtctacagctcatggggctagcctctaccctagggggttgagtgtcaaactggcgttttggacttccctgtaacagtccaaacctttccaccatgggtagatgcaggcagtgacctggaagttaggcatctctgcagacttgtacaggaccagttatacatgggtgagaacctggtgatgctgtaccaagggcacgccttcccatcacagcccagaatgtccttagcacacacataaggagtctcccaggctctccgtagtggtgcctttagggtcttctctgggcagccttcatggccatgattgatgctctgtgcttgagccctgaagcagctaccttggagtcaccaaagagcagcaaggtggccaccagggtatagggacatcacagtgtacatggaagctgcttagctgaaagtctgtcccagactagcccagtgtaagacacttgccagctgtctaatggtgctttgctctagtgccttcctccaaagggcagttaggattcctcataccagcatctgtgtgggctagtttctgccaggaaactgtgtaggaccaggatgagggatgcagcctccacacacgccagcctgttcatggagccccttgggtcatcacagggagctgtgaccattccatgctctgaaagggaagagacgttaatgtgccgtagacttctgctgctttgggtctcagagcagtgcttttggccactctgatagcagcctgctttgccaggaaagctgttccaggctttgattgttaccaaaacaaggagaaaatgtccagtttaacagccaaccctggccagcatagagggacacagtgaagtatcatgtccagcaaataagcctcagatgagtttatcctgatgaagacacagcaggttctaggctcctggtgttcctaatttgtgctgaaaaacccagccttgtcatccattcaactgtggaggaactgtaagttcctcagcgccatataaagtaggtcccggggaaggtaaggctcccaacacagggctccaacatcctgggctcccattaatgttcttagatttggtcagaaagctagttgagagagcatttgtttcaaaataagttatttatttgtatatgttcaataaatagagttttaatttatatatgtacatattaggcacccatgatcctgtcaggattctcagtgttctcattctatgaccctcccaaagccactagcatgaccccagccatcgatgacacaggtttgccttgtgtggagcccggtaagcagagggctgaaccctttttgtgagcaatcaggtcctctggatcatgggagttgctcctcctctctttgtctgaggccacaatgtttctaggggtctactttttgttacaatttggcaagttgtcatcagctttcacaaacccctctactttttttttatttatttatccccccaccccacacacacacaaagggtttctctgtgtagtcccggctgtcctggaactcactctgtagaccaagctagcctcaaactcaaaaatccgcctgcctctgcctcccaagtgctgggattaaaggcgtgcaccaccaccgtcaggcaaacccctctacttttatgcccgtttactaactaaccatttgcttacaaatatcctgctggcctggggacttgctatggtccctatcttgggcatgggggtgggaccctcagtgtcacacaatctcatttaccagtgttcttgcaatgatgagcttgggtcacatggactcttccagaatgcttgctgctcccctgcctcgtgtgtcagtgtccagtcccttccccatgcatgccttggtcctgcctcacccacccttcctcctcatctgtccactaccccaattttggctgtttctgtgtccgcatgtccatgctgatgggacttttagaaaatctgctttggaaagcaatgtcccaggccctgaggccatggaggaaggtttctgctatgtgggggactgcagttcccaggtagaattcaccagcaggcagcagcaggggtgtctctggcctctcctcccaaaggccagggacagcctcccctgtcactgacctccaccctgtgctctggggatacttgagccaagtcatttacatctactctcaccagcacctgcaaggtccattctatgggtgaggcaacatcaaaatgagtgatcttcctctccatttttcttttctaaagtaattttgagtcagaaacatttcaaattcatgacatagtttttatagaagcaattgaatgtctgggtcttcttcccactgacttactactagtcacaccagagagctgggtttctactgtgaaataaactgaaaataacccccctgtgctgtacgcacaccgcccagccccatggccatggtcctggcgtgggaagcccactcctcagttttgaggaataccctttgccagtagggggggacacaccactgtggtctctggaaacctgggtttcccacacgccagattggattagcctttcaaagtggtgtctttagttcataattcatagggaccaaagctgtttttaatatgataattgattttctaacaaaggtttactctacattctaacaccagttttttgttttttttttttacattctagatattccaaatcaattgctcgtggctctaagttgtaaaatgttttcacgttatgaatgtaattatttccttaatgtatttttaaaaaaaaactaaaatcatatttaaaataatcttggaaagacacaggcaaagaaaagagaaagtttgttttttggggtttttttgtttgtttgtttgttttagttaactatgttggtagcccatttgaaatgactgtaaatatatcttgattgtgtagctcaatgtatttaattcagaaagtaaaatttttttttatgtaaagagacttgcaatgaaagatcctagttttcagtccacgtcccccatctcatagtcccttcacccgacctttctgctctacaaactgatttttttctactgttgtttaactgtgtacccattgactggcgcccattggcggaacttgtttgtgtattaataaaactgtgctgtgtggcccagcctcatgtcctcctgacagtggctcatggcacaggagatgtccgtagttgtctgagtcgtcacttctgatcgctcgacaggtgggaggggctgcatctcaccggtgcacagggagggtaacacacaggaaaccctctgtcttagaggaccttggggatttctccgagtggtttgagacctgagtatttaactcagtagacaccatcactgcctcctcacctcccaacttggtgccaagcgctggaaacagaatgaatcccctggatgcctgctctcagggtaccagcagacacagatgcactctggtgggcaacgttgcatggagatttgagaaactgtagatgaggcagcagctttgaagcctagtagagttctgtgtgtgtgggggggttctttgagttaggcagtggcatttaaataaaggctatgactgcttacagcccaacatgagacagggagaccataagaagagggttgaggtggactggggtggacctggggaagttgtgggacgtcctgtcaagtggagaggagcctttatggtttctcagggcttccacgggcacatgccagctgatggctggctggtggatcaagcatcagagcagaggtgggaacctgcccagggaggtcctgcccacactggggactgctaccctgaaggatgcccagaggagagagcatgataggtccagcaggagctgagtctaggacctactactgggcttggcatctggatggagagccattgggtctgagtttctggggagtgtggtaagggatgtatgtgttggtggtgttcaggggcatgggttaacctggaggtccattcgagccactcatggcttaggtactgggtaatgggcgcagcccagccattgatcacaggtgatggaggatcttactgcattggatctggagatgggacccagacttcagggcaactgtgaggtcacagagctattcatcagagaaattcagtttgtgggggcccctggggctctgagaaggaagaacctaccctcacttgtccagggtcatccattgagacctaagcattggccaagtgtcactgagccagtttttaagtgatgtctttggttttggagtcccggtgggctggatgagaatgaggggtctcctcagtgtcatttaaagcagaggatgactgagtgcttggccacagagccccctagggtacttgtgctgtggcttatagtctgtaacccgctgtcacagagcctattaggtgcacagcaggagcctccgcaggaaacactattagatgtctgtgacttgggaagtttgtgacagagacatgggttttataaggctgtttaaaaacacctctctcctcatgggaaggcagtcaagagctcaggtgggaggcacatctgggatagaggctccatgggaggagacaggtatgcattcctcctgagctgaaggtgggagccaggcagtacaggaacatggtgaatgccccaacaaggacccttcgtaagcaccaggcagagcagagcagctgtttcctgcctagggtgcaagcctcccctctaggagtctagctggcccacagtgtggctctcttcaggcccacctgtctctagaaatgccaagtgactgttcttgtgcagactggccagtccagagcctgtgccccctgcttctaagggatgtttgcctcagcggtctgccagatgtgatgctgagtgctacacataagacatactgctggttggatctctgaggagcaaagtgggggtctaataagaccaatatgcccaatccgtttgctgtatctggaatgattgaaaagggagattaagggatcatggaggcacctgaatggctgacagcacagctcagggaaaccactcccaaatctatacgcatgagagaggcttctatcccctttgctacacagcataggcttgccttagaatgtcactgggccaagctcatatcacaccccgtaggggacctacaaagcggtgatgtctaatgcccagcagccttgagatcacagtctgtccctctagtgggcttacagagtgcacaattggttgcaggtatgtccacctgagatacatggctagggtgggacaaggactgctgacacacagggagggcaaagaactcacacagcctggaaaactgcaattcattatcatagcccactgcctgcatcctagaactaaggttggaccactccacccgatgcttgctgctgaccctgcatggtccaggcacactgtaccatgacaacatctctggttgtctcttgtaccagatgcggggacccttggtagttcttgtctacgggtgcgctggccatcttgtctcttatgtctatatttggaggcagtactcctgctttatagctgacaggcggagcagaaggcaccaaaacacaccaaagggcttcctgtgctggccacgtgatctgatcaaaccctctagacctcacgggaagaaggcatggagtctggaggtgctgcagcctttcagtagcctgaggacacacatacaccactctgtcagctcagaacaccatagttagggtggtctccactcggttctgtgatccaaatctgtagaggccctcctccctttgccgactttcctgcttgccccacccccatggccatttttctctcttccccagataatttcctgtcttctgcttcctcagtatccccacctcacttctgactttcctaagaatacagcgtgcccagcacatctggctgcgttgccctgtcctgggaatgggcccagcacatctgcctgtgttgccctgtcctgcagatgggtaccttctgctctgggctccaccacacttgatctccgtggcctcactgtggtgtgactcactcgtaagctggctgctgtcctgtcccagcctacccctctccccaggagcagcacatgggcccattaggcactggtggggctccagcattttatactccacttccacactgtctgttctcttgagcttgaccgtgcctgtctcttactcagcaccctgacaggccccaaactaggcactcagtgacatttttcttcagccagaagtgagtcccagtggttttgtcttcagagcacactctcactgcagccacaaggtcctggctcctttcctagtttcccatcttgacctgagggcctatgggaccatgtccctcacctgatctagttcttgcccagggctctctctcccttctcatctcttacctcccctggtcccaccaatgtaaggaccaactcctcctggtccactttaagattgaggcatatctagagcccagagcccaggaggcagctgcaggaacaggaggcgctgggcgctgtcctccttagctcccagctggtgcctgcttgcctggctctgctctcagtttatccaaggttggaaagtcacaggcagctatgggatggagcagaaacaagggaatcgtgggattcaggaggattgggagtttggggtagggattatgttagatcactgaagtttgtacctctctgaagaactcggctaatgcattcacaggggcagggaaccgtgatgagaaacataaagactaccatttttttttttcactaaatctgtgcaccagccactctagccctttctctaggctgacccacaactctgtaaggtcataaaattaactgcgtcaccttcactactcggagtctctggtgctcttactatgacgtgaggacttgtttcccatgctggtccctgctgtgaccatgccagtcacccgctgtggtcatgggtggtctgagcattcttagatctggctggcaccgtggctaagggtctcgctccaccgtggaatggcttgcacatctgcttcagggccactgccagaactgtcctgtgagctgtgaggtgcgccatgtgctggagttgatgcgcagccaagactgacgctgtcattatggctgatttgtcattgccccggtcattgtcatgctggcaggcacagctcaatactgcctcctgagcccaatactgccaaaatctgggcaagtcattagcagagctgaacgtgtgggccacagtgacaccagctgcaggctgccaatgcggccattagcccagtggcaagccagaaagtcctggcctgggccaactgccataggcatgctgagcctgggatacctgtgatagacgagggaacatcaccaccaagttccactgaacataaccacacgtggctgctgtccctgaggaacctccatgattagtgatcctgatatgaggcagagcaatcatggatgcctctctgtggagatgagcatctcacagctctcacagaaggagcatggtggtacaggtctgcatggtggtataggtactgagtgcctacagatgcccccacacagaatctcccttccctgtgaaccctgtccctcagtaagttaccaggcctcgtctaagacctgggagcacagttagaaatgggttggaagccctgtggcacctgagccctgggcacctaggctagagctgcaagggcccaggcaagtgtactggctggttttgtgtgtcaacctgacccaagctggagttatcaaagagaaaggagcttcacttgaggaaatgcctccatgagatccagcagtaaggcattttctcaattagtgagcaaggttgggaggcccattgtaggtggtgccatccctgggctggtagtcctgggttctataagagaacaggctgagcaagccaggggaagcaagccaataagtagcatctctccatggcctctgcatcagcttctgcttcctgcccagtgtgagttcctctcctgacttcctttggtgatgaacagcaatgtggaagtgtaacctttcctccccaacttgcttcttggtcatgatgtcttgtgcagatacaaaccctgactatgacagcaaggtgtgagagctggaggagctgtgagaggctgagtggcccaggggtgtgcagttgggagttggtcacctgcaatacagcttcatcttgtatccaggaggaagaatggtgacagaaggtgacagggtgggtaagtagcaggttcctactctcagaccggaccaggccagccagtgggtctgaacattgatctccactgatgtatttcatttcctcctgtcatgctcatacagtgactttgtcctctgctggtggctgttaccagtctcgctccatggcccaggtgtttacagacactgctctcttatcctggactaagggccattgtggccagctttccacgattccccttggaggcaggtggtggaactatcttccttacaagcagtgttcataagtgtgccttcacacccctaggtctggcaatagcatcttccggaggcttcacagcatgaggtgtagaaacgatggctctgggaccaagtctaggcacttttccggcatctgacaagccttcaaatggtcttccagacagtcctggctggtcaactcactttaagaaggaagccagcagcccttgagtacagcttgtgttcctactgggcaaacttacctgacctgtcagaacctgggcctccaaggacaggctttgactctagtataatctgttcatgacactgcaagtttctgcctttccgttacctatgtgcttttgataccaagctggaggccaccagtttctggacttagtgactaagcattcaggacggagtgatgcttgaagtgttgattcagcaaaaacaagcagccactctgtccacagatctgtccatgtgttgctgcctcttccgggagctggtcccccctcctcccccacacacattctgagtgcacctcaaaagactgcaggagatgactgggacagtggcacattctgccaagcattgcttctcaggaagcaatgtctcccaggggacatacctatggaacacccgcagcctaccctgggtccatggcacaccttcaggaagctccttatcactgtgtagcccaggggctgcggctgtagtccaggaaggagaggatgtgctggaaagcacccccttttccctcttcagcacctacaccacacacaagcctctctggcctttggcctccttacaagttcagtcctaagctcccacccagcacaaacacagctcctctgcgggaccagcacctgttcctgaacctgttccccagcctgaggttaccttcaaggtcagggctttggtctcacactggccctgctctagcctggcacccagacagaggggcaactcaaggtcagaggtgtcctggaggacattttgaagactttgatctgaaccctaccctgctctcctcgaactcttcagaagagaatgtccgtgacccagagaacatgagaggcagtgtgtgcacatgaacgtgtgccaggcctccacctgtcttatttccgctcaggtacccactgggggacacattgccctggggccacaattttcgaggcatttggggtgtgtatgtgtgttgtggtgtgtgttgtgtagtgtgtttggtgtggtgtgggtggtgctatatgtatagtgttgtatgtgtcttatggtgtgtgtggtgtgcctgttatgcttggtgtggtttatatggtgtggatgtgttgcagtatatgtgtgtgttgtgttgtagcatgtgtgtgttgtattttagtgtgtagtgtttggtatggtatgtgtgtttcagtatggtgtgagtgttgagtgtgtgtgtgtttgtgcttgtgtgtgtattgtgttgtgttgtggtatatgtattctattttggaacaaggtgtttggtgtggttgtttgtgtggtgtgtagtgtttgcaatgatgtaaatggcatatggagtgtggctgtggtgtaatgtgtggtgtggtatgagctaaggcaaagaaggatcaacccactgaagacaagggttcccctaggtctccgtgcctctctctgagcccagactctccaagtctgttttcttctcttctctcctccttgctacttgctttggtttctgccccatcatgcactgggcacttactgatgttttcacgttccagttgctatggcataaacagtctggggaaaaagagccttcggtattctccagactatgtgcaaactgttcactaggaattcgtcttgctttcttatagattataaatttaaggaaaggggtcaaacacttcaaaacttttaaggcagcttatgcagacaagatgagattaataattcattaagggcacggctagtaaggggcacatctgtgaggacagtcagtctgaatatggtcattaataaggaagccaggaatacaggtgcccacgtccgtgttggtaaaatctccagaggacacagcctggtgagggcgacaaagaagatctggaagatggttcaatatgtctacaggtgggtcagaagcagcagaggcccccttacactaggaactcttcattccacgggcctaaagaaaagaacacctgatagttttctgcacagagacctggtctaaatataaactggaggataaagccgtggcctttaatgggagatatcaaccagcggtcggaggtccccagggctgtaagcaggttctgccatggactgagaattagatggaccagttgcttactgagttaaactggccagcctgttaccagggcctgtgcttaggtatttccgtttctgtcatgtgttatcaaaaactgaagcaccttcagaggcagcagaagggagcaggtgtgacaggtgctagaaagtcgaagagaacaagaaaggcttaggttctgggactccgcagtcaggctgcagagctcagagcatctgggctggttctaggccctgtgagtgcagcatctaagtccacacctgcagtatcccccagtgctttattaccccagataccatgctctgagccggtccctggcctggtcactgcagcaggggatctgtcgaggttggaggatattgtcacttcagatgtccactaagtgttgtaggcctgtctatcctgatgattcttgggactgtgaccactcttcctcccacttagataacctttgtgccaccagaggtggctttaggctctccttgctgaggatctaacctctctttggagatgtgatagggaaggtggacatcaatagccagtttctgctggggaatgagcagaatagatggcaaaatagcctcccagagtcagaacataggcaatgttcatagtgtctcggatttctgcaaatgaccggtgtttgatagatgggtaagtccaagaatgggctggagactccctgccttccttttgcatttgctctgtctccacttctgtgaatatgactgagttggtgatcactggaaatgtcttcaccgtgggtgtactggcttgttttatgtcaacttgacacagctggagttatcactgagaaaggagcttcagttgagaaaatgcctccctgagattcagctgtgggcattttctcaattagtgatcaagggtgggagggccccctgtaggtggtaccatccctgagctggtagtctagggttctataaaaaagcaagctgagcaagccagtaagtaacatccctccatggcctctgcatcagctcctgcttcctgacctgtgtgagttccagtcctgacttcctttggtgatgaacagagatatggaagtgtaagctgaataaaccctttcctccccaacttgctccttggttatgatgtctgtgcaggaatagaaaacctgactaagacaatgggtgacaggacgagtgaacagctgcttgttgggtgtggtaggtggggcttctgggcctctagcagcctgggtggtttatgggaaatcaagtgtcttgggaactggtgacatcagatgtcttggataccagtgaagctacagggacttgagcccaagtccctgttgtgagggacaggatgagcctgttgaaaactaaaggaataaactaggagatggcacagactgaatcgtgggttggtgtggactgcagagtccagactcttcctgggacagactagactgcactagctgctccctggtggcggaccaggtggcagactagggtacagagagggccaccttgaccccaaacttccctctcttctaactaactgcagatgggacaaattgcttctaagatttgcccacagttactacttagttgccttctcaaaatactgggcagaattagattcttagatcctcaaacaagaaaacctgattttattttgtacaataggcatgaccccaaatatcccctgaggtacttcccttgcaggagatggtgggagaatttggacctatttatattcacagaacctttgtgtttgtggaacctgaaggtaaacagagggtcgtacaggtctccaagcagttggtgaccccaagtctagccggggacttaagttagagactggtaacagcaaacatttttgtcagcttgatcctccttcttgggtatgggtactcactgccactaatccacagctcatacaatttaaagaccctaaagtttagagtctaaattaaagcgtgtcaacctctgctcccagtggataaaattcacctgggtagctctataccggttataaggaagactggtgctttgagtccaaccagctgttactggattcaacagcgagtctctatctaagaacaaatgacttttgtatttacattgaatggctgtgcactgtttaagctcattgcaatctgcctctggagatggaatctgggttcccactgcacacaagcttgttttacttcaatgtcctttaaaaccccctttcctgagtcgggatggccctccaactctgtgccagggatagagaaccacaaaaagccaaagagagaaggcattgtgcctattatttgtctcacaatataaaactctagctctatctgccccttacattcattcagagcactctaagtattgtgtgaagactgtcttgtgttttctataggctttacctgggaacttaacacgctccatagtttaatagtatatacacgggtaacatgaatgt

SEQ ID NO: 1631 - DNA, 4129 bp, Mus musculus
gggctgcgctcctctcggccgtccagtgctcacgagccactgaatcctgagcaatggaagagttaatagttgaactccgcctctttctggagctcctggaccacgagtacctcacatcaactgtcagagagaaaaaggctgtgctcaccaacatcctgctgcgcctgcagtcatccaagggctttgaagtgaaggaccatgctcagaaggcagaggccaacaacctgccggcaccaccccagatgcctctgccggagatccctcagccatggctgcctcctgacagcgggcctccgcctttaccaacgtcctctctcccagagggttactatgaggaagccgtgccgctgagccctgggaaagctccagagtacatcacctcaaattatgactctgatgccatgagcagttcctatgagtcatatgatgaagaggaagaggacgggaaggggaagaaaactcggcatcagtggccgtcagaggaggcctctatggacctggtgaaagacgccaagatctgtgccttcctgctgcgcaagaaacgctttggccagtggaccaagctgctctgcgtcatcaaagacaccaagctgctgtgctataaaagttccaaggaccagcagcctcagatggagctgccgctgcagggctgcagtatcacatacatcccgagagacagcaagaagaagaaacacgagctgaaaatcacccagcaaggcacagaccctctggttctagctgttcagagcaaggaacaggctgagcagtggttgaaggtaatcaaagaagcctacagtggctgtagcgggcccgtggatccggaatgttctccaccacccagcaccagcgcccccgtgaacaaggcagaactggagaagaaattgtcttcagagaggcccagctctgatggagaaggtggtgtggaaaacggagtcaccacgtgtaatggaaaagaacaagcaaagaggaagaaaccttccaagtcagaggccaaggggactgtgtccaaggtcactgggaagaaaattaccaagatcatcggtctgggaaagaagaagccatccacagatgagcagacatcatcagcagaggaggatgtgcccacttgtggctacctgaatgtgctctctaacagccgctggcgggagcgctggtgcagagtgaaggacagcaaactcattctccacaaggacagggctgacctgaagacccacctcgtctccatccccctccgtggctgcgaggtgatcccgggcctggattctaagcacccgttgaccttccggctgcttcgaaacggacaggaggtggctgttctagaggcatcatcgtctgaagacatgggcaggtggattggcatcttgctggctgagacggggtcctccacggacccaggagcgctgcactacgactacatcgatgtggagatgtcagcaaatgtcatccagacggcgaaacagaccttctgctttatgaacaggcgggcagtgtccactagcccatacctggggagcctctccaacggctacgcccatcccagtgggacagcactacactatgatgacgtcccctgtgtcaacggctcggtgagtgtccttcaagagccaatggtcagttttgatgctgagcagtacaaatatgggaagaaccgggtagaagcagatgccaagcggttacagtccaaagaggaagagctgctgaagaggaaagaggccctacggaacaggctggcacagctgcggaaagagaggaaggacctgagggccgccatcgaagtgaatgcaggcaggaagacccaggcagctctggaggacaagttgaagaggctggaggaagagtgcaagcagagggaggcggagcgtgtcagcctggagctggagctgaccgaggtcaaggagagcctgaagaaggccttggcgggtggcgtcaccctaggactggccatcgagcccaggtcagggacatccagtccacagtctcctgtgtttcggcatcggactctggaaaattctcccatctccagctgtgatacaagcgatgctgaggggcctttgcctgtgaacagtgcagccgtcctgaagaagagccagccgtcctcaggcagctccccttgccgtggccacgtgctgcagaaggccaaggcacccatgatcctgtcaggattctcagtgttctcattctatgaccctcccaaagccactagcatgaccccagccatcgatgacacaggtttgccttgtgtggagcccggtaagcagagggctgaaccctttttgtgagcaatcaggtcctctggatcatgggagttgctcctcctctctttgtctgaggccacaatgtttctaggggtctactttttgttacaatttggcaagttgtcatcagctttcacaaacccctctactttttttttatttatttatccccccaccccacacacacacaaagggtttctctgtgtagtcccggctgtcctggaactcactctgtagaccaagctagcctcaaactcaaaaatccgcctgcctctgcctcccaagtgctgggattaaaggcgtgcaccaccaccgtcaggcaaacccctctacttttatgcccgtttactaactaaccatttgcttacaaatatcctgctggcctggggacttgctatggtccctatcttgggcatgggggtgggaccctcagtgtcacacaatctcatttaccagtgttcttgcaatgatgagcttgggtcacatggactcttccagaatgcttgctgctcccctgcctcgtgtgtcagtgtccagtcccttccccatgcatgccttggtcctgcctcacccacccttcctcctcatctgtccactaccccaattttggctgtttctgtgtccgcatgtccatgctgatgggacttttagaaaatctgctttggaaagcaatgtcccaggccctgaggccatggaggaaggtttctgctatgtgggggactgcagttcccaggtagaattcaccagcaggcagcagcaggggtgtctctggcctctcctcccaaaggccagggacagcctcccctgtcactgacctccaccctgtgctctggggatacttgagccaagtcatttacatctactctcaccagcacctgcaaggtccattctatgggtgaggcaacatcaaaatgagtgatcttcctctccatttttcttttctaaagtaattttgagtcagaaacatttcaaattcatgacatagtttttatagaagcaattgaatgtctgggtcttcttcccactgacttactactagtcacaccagagagctgggtttctactgtgaaataaactgaaaataacccccctgtgctgtacgcacaccgcccagccccatggccatggtcctggcgtgggaagcccactcctcagttttgaggaataccctttgccagtagggggggacacaccactgtggtctctggaaacctgggtttcccacacgccagattggattagcctttcaaagtggtgtctttagttcataattcatagggaccaaagctgtttttaatatgataattgattttctaacaaaggtttactctacattctaacaccagttttttgttttttttttttacattctagatattccaaatcaattgctcgtggctctaagttgtaaaatgttttcacgttatgaatgtaattatttccttaatgtatttttaaaaaaaaactaaaatcatatttaaaataatcttggaaagacacaggcaaagaaaagagaaagtttgttttttggggtttttttgtttgtttgtttgttttagttaactatgttggtagcccatttgaaatgactgtaaatatatcttgattgtgtagctcaatgtatttaattcagaaagtaaaatttttttttatgtaaagagacttgcaatgaaagatcctagttttcagtccacgtcccccatctcatagtcccttcacccgacctttctgctctacaaactgatttttttctactgttgtttaactgtgtacccattgactggcgcccattggcggaacttgtttgtgtattaataaaactgtgctgtgtggcccagcctcatgtcctcctgacagtggctcatggcacagga

SEQ ID NO: 1632 - protein, 738 aa, Mus musculus
AMEELIVELRLFLELLDHEYLTSTVREKKAVLTNILLRLQSSKGFEVKDHAQKAEANNLPAPPQMPLPEIPQPWLPPDSGPPPLPTSSLPEGYYEEAVPLSPGKAPEYITSNYDSDAMSSSYESYDEEEEDGKGKKTRHQWPSEEASMDLVKDAKICAFLLRKKRFGQWTKLLCVIKDTKLLCYKSSKDQQPQMELPLQGCSITYIPRDSKKKKHELKITQQGTDPLVLAVQSKEQAEQWLKVIKEAYSGCSGPVDPECSPPPSTSAPVNKAELEKKLSSPSSDGEGGVENGVTTCNGKEQAKRKKPSKSEAKGTVSKVTGKKITKIIGLGKKKPSTDEQTSSAEEDVPTCGYLNVLSNSRWRERWCRVKDSKLILHKDRADLKTHLVSIPLRGCEVIPGLDSKHPLTFRLLRNGQEVAVLEASSSEDMGRWIGILLAETGSSTDPGALHYDYIDVEMSANVIQTAKQTFCFMNRRAVSTSPYLGSLSNGYAHPSGTALHYDDVPCVNGSVSVLQEPMVSFDAEQYKYGKNRVEADAKRLQSKEEELLKRKEALRNRLAQLRKERKDLRAAIEVNAGRKTQAALEDKLKRLEEECKQREAERVSLELELTEVKESLKKAGGVTLGLAIEPRSGTSSPQSPVFRHRTLENSPISSCDTSDAEGPLPVNSAAVLKKSQPSSGSSPCRGHVLQKAKAPMILSGFSVFSFYDPPKATSMTPAIDDTGLPCVEPGKQRAEPFL

SEQ ID NO: 1633 - DNA, 199724 bp, Homo sapiens
  misc_feature (1)...(199724): n = A, C, G or T/U
aagggagagagtgacgagaggtgctgtttaacacacggtggtcagtgaaagtgacaaccaagtcaaacctggggaggggaagtccctccttccatgataacagggaagggagttggaaaggatggctgggaggctggtgagtttgcagcatagaaatactcagcatacaatcattttaacccccaactgtttccaatcaaatgagaaacattcatggagtgtactatggagccaggcacctcgtgggtgccagccaggaagataaggatgagtctctgccctggatgagttccctgttgcatgggagagacagatctagaaacagactgtgatcgtatggggtgttaagtatgataagatagggcagctgtgagatggtggagaggcagagatgccctcctgaggagctgggacagctttggggaagaggtgacatttgaactgggtcttgaagaatgggtaggagtttgcttgccagaaaaaagcaaaagcttggctgggtgtggtggctcatgcctgtaatcccagcactttgggaggccgaggcagggagatcacttgaggtcggaagttcaagactagcctggccaacatggtgaaacccctgtctctactaaaaatacaacagttagccaggcatggtggcaggtgcctgtagtcccagctacttgggaggctggagcaagggaaatgggaatcacttgaatctgggagggggagcttgcagtgagcccttatcgccactgcaccccaacctgagtgacacagcgagattccgtctcaaaaaaaaccccaaaaaaccaaaaccaaaaacttacgtctatgaggtgactactatgtgataggcaatttacctatacaatgtcatttaattctaagaaaactccggcatggcaggtattatacatattttactgatgtagctgctgaggctcagagaagcaaagagacgctcaaggtcatagaggtgttacagctaggttccaaaacacgattgtttttactctcaaacttatgccaagacaccacaccaccataataacctgatagaccagagtttgccacgaagtagtgcaaaatttgtgagctgcttggggccagccaggaagtggctcttttcatattacgtcatgtgcacaaaggggactgaagacagtgtgtgtgagtgatagtagagattgtagattttgcagatggattgacaagggttttttctttctatttcaacatgacaagactgttgttattccattacctttggcttccattatttcttttctttctttcttttttttttttttttttcagatggagtcttgctctgtcacccaggctggaatgcaatggcacgatcttggctcactgcaacctctgcctcccgggttcaagcgattcttgtgcctcagcctcccgaatagctgggattacaggcatgcaccaccacgcccggctaatttttgtatttttagtagagagggggtttcgccatgttggccaggctggtcttgaactcctgacctctggtgatctgcctgccctggcctcccaaagtgttaggattacaggtatgagccactgtgcccagccggcttccattatttctactgagaaatcccttgtatttcctttggttatcacctagaatgatgtgatgtttgtttcctatggctgcttttaagattttttttttttttttgacatggagtctcactctgttgcccagactgggagtgcagtggcgtgatctcagctcactgcaacctctgtctcccagcttcaagcgattctcctgcctcagccttctgagtagctgggattacaggcatatgccatgacaccagggtaatttttgtatttttagtagagacggggtttcatcatgttggtcaggctggtctcgaactcctgacctcgtgatccacctgcctcagcctcctaaaatgctggaattgcaggcatgagccatccagcctggctgattttttttattttttattttttattttcatttttactttttgagacagggtctggctctgtagcccaggctggaacgcattcacgcagtgtcagctcactgcaacctctgcctcctggggctcaagccatcctcccatctcagcctttcgcgtagctgggaccacaggcacttgccacagtgcctggctgatttttgtaattttttgtagagatgggatttcaccgtgttgccaagggtggtcttgaactcctgagctcaaacgatctgctcgccttggcctcccaaagtgctgggattacaggcgtgagccaccatgtcaagccaagattttttttttacacactggttttcagcagctgtggcaggcagcccctgcgatgatccccactccccggtatttttgcccttgcgtggtcttcttcccttgagtgtgggctggacctactgacttacttctaaggaacagaagacagcaaaagtgatggaatgtcactttcagtactgggttataagaagacaatggtttccatctcaggcgctttctcttgctgccccacctgcttgtgctgaggggaggtgggctgccttcttgtgttaccctatgtagggttcatgcagtaaggaactgatagagtttggatgtgtgttcccactcttatctcatattgaaatacaatccctagtgttggatgtggagttctggtgaaggtgattggcttatggggggagtggatttctcatgaatggtttagcactaactccctgggtactgtcgtgatatggagtgagttctcgtgaaatccggtcatttaaaagggtgcagtgcctctcccctcatccttctgctcctgctttcatcctgtgatgtgactgctccccctttacctaccaccataattggaagccgcctaagctctccccaaaagcagatgctgctttgcttcctgtacagactgcagagctaggagccaattaaacctcttctcttggaagtgaccccgcatcagttatttcttcctagcaatgcgagattggagtaatccagcaatggaagaaggccagcagctggtgagaaaatatggcctgcgtacagccacgcgaatgagcttggaaacattcctctgagtccagacttttcatgggaccgcatccccagctcatggattgattgcagccttgggagaaatcttaagccacaggcacccggttaagcttctgatccacagaaactatgagataataaatgtgagttgttttaagcctttaggtggggtggggcaataaaagttcgcaaggctgctatccatctatgagctggggatgcggccccatgaaaaggctggccccagaggaatgttaacaagctcatgagggaggctgcaggcaggttatagactgaccgcagaacgcgccacatgtcccacgttggcctcctctaatctcggaatgccaggaagaaaacgtagagcggcgccatcgccaagtggagacggacaattcgagtccttgctcagcacggnnnnnnnnnnnnnnnnnnnntcttataggaagtgttatagaaaggactcctgtgaaattcaccagactgaggagattgacttttatggctcagaggatgcagtaggcaaagttcctaatggccagtgaagttcctctttcagagaacacaaatccaaagtgaattctgcaaaatctaccactgtacttattccttcattgagaaaatggggtgctttatggataaatgcatggaaaagtcagacttcgaccaaagtcaaagggcaatagaaaccctttgcattctttctaatgacttcaacctgtggagtttggaaagttacagattcctctggagggtaacatatgtacaggcttttttccctatttctttataataaaaattgatgaagaggaatacgtaaagtgtggtttccctttaggcagagttcagtggaagtagcattatacatagaagaactttcagctaaacttagagagaaacagagacttttaggccaatcattttcctaaatgtcactgattttgtgggagtaagtaatagcatccagccttgcgagctctgattgcactggcaaactgacagcacatcctaaactgggcccagaatctccaccaggtgcccaggtgccaaaggcgagctttgctccctcaaaaaggactgcaacaaaggtgtcatggaaatgaagctttctttggcatataaatagtttgtgattattttttttcctcaacagatgtgttaatggaaaagcctgggaagaagtctccagttggtcactcattccagcaactagtccttcatagtatcaaactaggtcaggagtttccatgaactgggttggtccaactcttggatcaataaaccctgatttgtttttccagagaacaaaaactctctttacatcagaagggctacggtggaaaagaagggtttgacttattttctgaggtcccaagagatcagaaaatttcagtttcagctgggcatggtagctcacacctataatcccaacactttgggaggctgaggcaggaggattgcttgagctcaggagtttgaggccagcctgggcaacatggcaagaccctatctctacaaaaaaataaaaacaaaaaaaaattaaccgggcttggtggcaggcacctgtagtcccagctactcaggaggctaaggtaggaatattgcttgagcctgggagatcaaggctgcagcgatccatattcataccactgcactccagcctgagcaacacagtgagaccttgtctcaaaaaaaaaaaaaaaaaagacagaaaaagaaaatgtcagtttcataagcggaaaaatttcctgctaatcagagctgtcatactgtgcctggactggttcattgggtggttagcttcttgctagtagacataggcctggatgtctcagcaggaatgttgtgagaagtttccaagtatgtgttcaagaatcaggccgagtttattcatttactaattcaacaaatattaattctacatgcttcagttacagaatcctgtaagtgtagaatttatgaccagaggcttcgataaaaagggatttgttttttctacctaacagagaatctgggggtaggtgattgctggtgttgtttcactgggtcaatagtgcaaggttcagtatctctctgattctcttgcctgtagtgtaggagatggctgcacaatggccactatagctgcagatatcacacccatgttcatgatcataatccctgctgctgagaaaaagacagcgtctgctgtgtcttttccttttccaagagagcaaaaacttccctcaaaatcaggggtgtgctggtattttgggggagaggagggagagggaaagtcctgatttttaacagttgccaatttctttataagttcccctactatgtctgatttcaagctaccaccatgacattgctgactacggcgttggagagagaagtcagcagcacaccatgatttaggatttccacctactgacgcgggagatgcaaatctttaagaacatagtaagagtaaaacaatcaggaaataatgcattttgatgatttattatctttgttttatatttatatttacatttaattatataaaattaatatataattttataaaattaatatatataattatataaatatctaacataggctgggcacagtggcttacacctgtaatcccagcactttgggaggccgaggtgggcagatcacctgaggtcgggcgcttgagaccagcctgaccaacatggagaaaccccatctctactaaaaatacaaaattagccaggtgtggtggtgcaagcctgtaatcccagctactgaagagactgaggcaggaaaatcacttgaacctgggaggtggaggttgtggtgagcccagatcacgtcattgcactccagcctgggcaacaagagtgaaacttcatcttgaaataaataaataaataaataaataaataaaaatacatatttatgtataaatatataattatatacataaatgtatatattaatatatatttattatatatttattaatatataaaatatgtttatttatttctgagacagggtctggctctgtcacccaggttggagtgcagtggcactatcatagctcattggagccttgaacagatggctcaagcgatcctcccacctcagcctcctgagtggctaggattgcacgcacacaccaccacgcctagctaattttaaaattttttgtagagacagcgtcttccttttttgcctaggctggtcttgaactcctgggctcaagtgatcttcctgcctcagccttccaatgtgttgggattacatacgtgggccactgcacccggtctaatgcattttttaatttgcaagtttatattatttaatatttttaagtactgaatgtgttgaacaccaactcgcagaattcccgaacaatggacggtcagctctcatgttctggttcaaacagccccagcacaccacggctagaaacctgtcagccaacttccacttatatctccctgggcaggacaatgttgcttggccaatccccactaagaggaactctggaaaggcaagaaactattctgttctctataatggaacgtgaccagggagaaggcagctggcagggccagttgggccctccaaccagcagcatccaccatcgaccaactgccctagaacttcactgtgctgggcatttggggcactgttatgagtaagagttttcatttttcttctcatggggccttcatgcaagagacaatttttttttttttttggagacaaagttttgttcttgttactcaggctggagtgcaatggtgcaatcttggctcactgcaacctctgcctcctaggttcaagtaattctcctgcctcggcctctcgagtagctgggattacaggcatgcaccaccatgcctagctaatttttgtatttttagtagagatggggtttcaacatgttggccaggctggtctggaactcctgagccaccatgcccagccaagaggcagattttaaatcaataagtatagttgtgatgaatgccagaaagaagaaagtgtgtgatggggaggggacctacgttattgtcttatattttaacactttcataggcaataactaaaaacttagaagcttaaaacaacacacacatttaacccagttttggcaagcgaggagttgagcacattttagcaggtcctctgcttggggtctcacgctaaggagctgggctacatcctcatctgaggctcaaccagggcagaatccatttccaggtccactgaggttattggcagaattcatttccttggacccgcttggcaagggcccagctttttgcttccttgcttacggggcccctccaaaggtcctttctcagcatggcatctccctcctgcagggcctgcaggtggaacctctctctctagtgtgcaaaggtgatgcactgtgacagtgacatccattgcttttgccagaggctctgtgggttagaagccagtcacaggttctgctcatacccaaggtcaggaagattatgcaagggcataggtcatcggtcactgggggggttagtcactttagggtgtggctgccaccactgaacttggtgagactttaagggttggtaggagctggccaggtacaggggtgagggtgtgttaggcagcggtgacggcatggagggggatgcagaggcctgcaccctggaatgtcctttcactccctgaggttgtgttctcctgatccctgagtacatcccagaacacagtggggccctagctggggagaggtagggaagcatgtgatgttcatcgggggaccttgttaggcaaatcagattaggggccaggctttcagtggtgggtgcgagtgtgcaagtgagtgagtgtgcaggtgtgtgtgggaagggagatggggatagggtcagccccagccatcatcaagacctcacctgtgcatccacccatcccagcagcatccctgagtgagtgccttcagggcgcaggtcctgttttgcacatggaagtgaatcagagtgggacactgccttgccttagagaggtcacacttctttttttttttttaacttgtgatagagtctcgctctgttgcccaggctggagtgcagcggcgtgactttggctcactgcaacctccgcctcctaggttcaagcaattttcctgcctcagcctcctgggtagctgggattataggcacgcgttaccatgcctggctaattgttgtattttagtttcaccatattggccaggctggtcccagactcctggcctcaagtgatctgccccccttggcctcccaaagtgctgggattacaggcgtgagtcactgcactgggcaagaggtcacacttcatgccaagtgggaggcagccactcagacagcaccccagctggcgctgggagtgaggggtgctcagcgtcctaggaaggcagagggctgcgtgagaggtttggggaggaaggactggaggaggatttgagattttcacctgagcagctaggtggatggaggggctgtttactgagaatcacaagaatgtggatgagcaggttggggcactgataaagcactctgttttggcccgcagaaaatttgagatgcctccctggtgtccagctaggcctttgggagaggtcagggctgggcatctgacttggatggatgtctctggcaggcagcagagcatgtggatggtttgtgaagcccagaagggcatgagatttcctgtagcagtgcccactgtgaatggaagggcatttggcctgagcccagacatgtacaagttgggcagagaagggggtgggtccctgggacccacagaggagcagctatggaggtacagaaaaaccaagtgtgtgggggtcacatgatgcaggaagctcaaataagatgaggaaagaggttttaaagatgatcagggttggggacagtagttcatgcctgtaatcccaacactttgagaggctgagatgagacgatagcttgaggccaggagtttgagaccagcctgggcaacatagggagaccccatttctagaaataaataaatacattggtacttggcatttcaggtggggaacagcaaacacgtgaaagctctgaggcaggaaagcgaagtgattagtgcttgcttgctcctggttcctttatcaggccttaaagagatgcagagacatctcaggtactccttggccgagctccttcagggagggcctaagttcgcttctacttcacatctttaaaaaaaaattttttttttggagacagagtctcactctgtcgcccaggctggagtgcacgcagtggcacgatctcggctcactgcaacctccacctcctgggttcaagcgattctcctgcctcagcctccccagtagctgggactacaggtacgcgccaccacaatcggcaaagtttttgtatttttagtagagacggggtttcatcttgttggccaggctggtttcgaactcctgacctcaagtgatccacctgcctcggcctcccaaagtgctgggattacaggtgtgagccaccgtgcccggccctacttcactcctaacgcccgccatacgtgcttccaaatgtttgctgaatgactacaagatgaacgagtgaatgggattacgtttcttcgagcggcaggcaatcctattccttggacctcagtttccctttctgtaaagcaagcctttctctcgctctctgccctaaaagcctgagctctgggtttgagatgagcgcgtcctgtagagccgactccaggtagacgttgagctgggtattctaggaggcgatgatcgggccggctctttgaggcgggtcctcccgcgggaccccgcaagcccagtcccagcaccgccccgcccaacctccctttgttccctcaggccccgcccactccgcgcagctcgcttcccattggccggggggcgggccctgggcgcccggctccgctgggggcgggacggcgggcggcgggcggggccgtgtgcgcctgcgtggtgtctgtcccggccgcagccccacgccggctgcagctccgcgagccgagccggatctcgagcggggtacacgggctgaggcggcggcggcggccccgccccggggctccattgttaaggcggctgcggctctgtcggctgttcagctgcgctccagtcggcccaggcgccgcggcgaggagcgagcgctgcgaggtggcggcctgaggtgagacggcgcgactggcggcagggtctccggacccggcgggggtctctgccccgggcgtggaagctccgagcggggctccgcagggtccggggtccgtgcgcctgggctttgtctcggcctcgggtggtaccgggggctccgcgcctgctgcgacgccgcgtgggcccgcgcgggggtcccggtcgtcctgcgggtgggggccggtccccactgctccccagctccccgcgtctgcccggaggggactgcgtggacccgggcgctggctcctgcccggtgcccccgcggcgtggctggtccccgtgtgcgtcagagggggccctgcgaagacccactcgtggggcggggtccgggtcaccaagagtgggaggctccgccgccctcccccgtagcgagactgcttcgtccgacttaccgaggggactgcgcggaccctcggacgagggggtccgtgactctggatgggggctctttcttggccccgcatgacggcttcctgagtgttttgtcacctataggttgttgcgtggacccacgcgcgtgggtcccggccgccctgcgagtggggctctgcgccgccccgtggctcgtctgggtcgaccccgcctgggacgcgagtgtaatgggggtccgtgcgcggggggcgcggttggtgggggcgcactgccccgccccgtgatttatcctctcacctgcccggcgggtggaagcgagaggcgcgggcccggagctgtcgcgcagcggccgcaccgtcctctcccctggccggcgggccccggggggcgcggggctgtcaccgcgcgtcccaccgccgcgcttcctgctctggccccgggctgggctctgattggagggagcagggccctactgcccggagcttcttgatttcttccgttagtaatgggaagaaaaaaaaaatctggaaagccagattgaactttgtagctctcagcgcctggagagtggaagaaactctcccaagaatttggcgggctggaaaatgcgtttcaagcaggagcatccacacccacggaatgaggccaaggcagttacagttagaggtcagatttatgaggggagagcgagggtgaggtccgtgggtggggagactccgacctcagcttgatgggaagacctgatgctgcccctcagacgctgtatttctcagccaccaaagaaagtggaatcactccttagtgaatgctttcatcaaacttttgaaaaacctgttatgtcccaggaagcaaaatcgaactggacagttttccccttttaggagagttaaagatcccggagacaaacagcagaaggctcaaggagtccaaatacccaacctgaagttctttctgaacaagagatggtgtttaagtaacaggcatacaagacaaaactgagctaattaccgcagctgtggctcctagccctctagcgtgtcatgcgggcccttttgctttctctgccctccgctgccccagacccccactctacgccgcacctccagtcatcagctcatgccgacccattgctatggactctgttgaggtggctcccttctctctgaagctttgcttgttctcctgaagtcctggtctttaagagcttatgatctgccaggacagattggctttgggtaatacatggttaactgtagcacagcttgaaaaatgctctgatagaggtgggcaggcgcagtttgtgcatgcgggtaaatgcgagctcctttttcaataccatgaatccaagtattcatgctattttaaatctgcaattctttgactctccagagggtttttagattaatctttttctattacttcctaatgtttgttgcatagtgcagagtacttgattaaaacttagcaggtcggccgggcgcggtggctcacgcctgtaatcccagaactttgggaggtcgaggcaggcggatcatttgaggtcaggagttcgagaccagcctggccaacatggtgaaaccccgtctctactaaaaatacaaaaattagccgggcatggtggtgggtgcctgtaatcgcagctactcatgaggctgaggcaggagaatagcttgaacccaggaggcggaggttgcagtgagttgaaataactccactgcactccagcctgggcgatagagtaagacttcgtctcaaaataaaaacagaaacaatgtactgggtctacgtccggctctggaattttcctggaaggccttctcttctgggcttcatttttctcacctttgaggatcgtaaactacataatttctaagaatcttttcagccctacacctttaattctttcaagcaaatatagtagagaaaaattctcttaccagcaatggtgtaaataacggaagcctttgaaaatgtggattctaaagtggaagtttcttttcttcttcccctttttttccttttaaacaagttgagttacatgtgtatatactttatctcagagttaaggacaagtatctatgatgaaaccttaagcaactttttggcaatatctttcatattcttcataattgttttatgtgcaacatcttcactatatccaattggtttgtttttttctcattaatggagttgttgagctcagatctttttttcaggagcattttgttgatcttttaagtgtcatgtgaagtatgtttcaacctaacattttattttggagagtaaaatgggagtaaatggaattttgagagtgccttgagtagatgtacttggctttgtgtaatggtttgaagcctagtttaaaattaccacttgtggccaggtgtggtggctcacgcctgtaatcccaacactttgggaggccgaggcaggcagatcacgaggttagaagatggagaccatcctggctaacacggtgaaaccctatctccactaaaaatacaaaaagttagccgggtgtggtggcacatgcctgttgtcccagctactcgggaagctgaggcaggagaattacttgaacctgggaggcagagattgcagtgagccgatattgtaccactgcactccagcctgggtgacagagtgagactccatctcaaaaaaaaaaaaaaaaattaccgcttgtaaaaaattgcatcacatgttgaatgacctatagaggagctatagttctaaggaatatggtaattaattctttcaaacagtaaggccaggtgctgtggtttacacctgtaatgccagcactttgggagactgaggtaggaggatcacttgagcccaagattagagactgcagtgagctataatcatgctactgcactccagtctgggtgacggagtgaaaccctttctgtaaaaaataaaaaggtaaataaatagtttaaaaataaaatattaagctcctttccaatttatctgtttggtaaggtgggaattggatgtgcctgagtttgttaaagccacgtgtctctgtagaaaggagacacaattttctctgctattcctagttatttggatgattatagggattaaaaatagccatttggtcaagtcgtgagctactgaattacaatttttgcttcactcagtaggattttgcctgtattttgatttgcattcttaatttaggaaaagttctttgttatatgctccatgtactttgttcttttggggaatgtgatcttaggagagggcttcaaaacgcgaccagattttctttatggttttctagattttattaatgttttaataaaacttaactagttaattctgcttctgtgtcgaggtgtttttcatttacagcaggcttgatttttatgtggattaaatgaaagggaggggatgcatgggtatggagaacacagaggatatatttttgagctctgcatttcagagttcttttctctagccctggccggggtcccaaacagggaacttaattcgctctatcactgaagtatacccttgctttgatgccattggtattgtatcctagagatttgctgtggctgctaggagtgtttcatagtaaggactgatgcgacttctcttttgtcagcttatgagtctgtaagccatcttgttccctttagtattatctgcctggaactggaaggtcagagatgaagttttcttagattataagtctcaagtctttgctgtctaccttcctctctctcccatgtcacctgctgttttattttctgtttttcattttaatgtttttattgtataggtgtctattatttcaggctacctcaaaacagttttggatattgacaggatataagtatgaataaaatgtgaaagataactttagttctttttagcagaggactggaattcgatatgtggccctactaaagcttttgttaagtccaagtacttttctgaacttcagttcccttacctgtaaaatggagttaattgctagtaacacctgttctgcctaactcaggagattgttttgaggatcaaatgaaatcatgaatgtaatggaattttgtaaattttaaataaaatattgtattacctaagatttaaaaaaaaacccattaagaatggaatgaatctgagttttcctttgaaatcccaaatgtttaatgtacagagaagtcttaatgtgtctgttggggagcttgattagggttttttctatctttaattggccagtattgttttatattttagcatttttggggaacatcaaatttgtgtttcagttatcattaatattttgcaaaggtattgaatgtgcatgatttagtctttaacaatctcttcaattatttacattcccgtgtaaaaaatgaagtaatgaatgtccacgtaaatagcattcccatgctttagcgaagcgtaatttcttgacattgcagtttctaagtgccctgtcttgaggctgggaaaactaaagggcagtcagaggtcaaggtcagcaaagcatcacattttgacatttgaaatccagcagcagcatcacagtgaaccccagtccagcacccaggaagtttctctgcacctgcctctcctccagccacctcagaagctgtgtgtgcggtgtcgggcctgctttcctctctctcctctgccttttctttctcgtcaccaacttctcctgagtgcccctgatatcccagacagtggtagtgggagtacaaaggctaataaacccggccctggtcctcgaagaatttatgttttctgtgcacatactaagttatactgtcatatatagtgttgacaaacacggatacagatttcctgtgaagtgcaggggcaccgttctagaagcagagatgcagaagtgggactcgtgactcacacgtggagagctggagttcgtggtccagtgggaaaaaccgacctggacatcatttcagtgcagcagagtgagtgctgggttgggctccctcggggcatctggagccgggttagtctggtgtttagtcttctgtgtggtacttagagcttatcagtaagacaagcattgggaggtttctaagtgaaaggaaaggcaatcacttacctgaaacctaaaatttgtaggtgttctgggccatttataattcactgtatctgttctgtcagaacaagtctatcatctgttgttttggatggagtgtggccagccctgcctttggatgtaaggaaatcaggaaacgcttgtcagatgtcaacaccgtgccagacactccgctagggatttccacgtaaatcactatattcatttctgttgctgctttaacacatttccacaaatttagtggcttaaaataattgaaattgtatcatctcacagttctgtggggtagaagtctgacgtgggtgtcactgggcaaaaatcaccatgtgggctgggctgcattcctcactggagaattgtttccaagcacttttggccaaatatagttccttgtggttgcaggactgaggtgtccccttgctggccatctgttgggggctgtcctcagctcctgaggcctctatctggtctttgcatgtggtcccatcagctcaggactagctaggccagggacctggtcaggccctccaattcccctgggcgcatttctcttcttcactcagagaaagttctataccctttttttaaatattttttttgagacggagtctcgcactgttgcccaggctggagtgcagtggtgtgatcacagctcactgcaacgtctgcctctggggttcaagtgattctcctgcctcagcctcctgagtagctgggattacaggtgcttgccactgtgcccgactaatttttgtatttttagtagagatggggtttcaccatgttggccaggatggtctcgatctcttgacctcgtgatcggcccaacttggcctcccaaagtgctgtgattacaggcgtgagccaccgtgctcggccagttctgtgctcttaaaggctcatgggattagattggacctccctggttagcccaggatactcttcctaaggcctgtggcaaagccctttggccatgccgtgtgacgtagtcacaggtctcgggggttagaatctcccaccgcggttaccaatccacttactacagcagcctgggaggtggttttcaatgcctctggttaacagataccaatttttttttgcaaatcgtcaggaacgtgaagatccccccccttttttttttttttttttttttgagagggagtctcactctgttgcccaggctggagtgcagtggcgcgatctcggctcaccacaacttccacctcccaggttcaagggattctcctgcctcagcctcctgagtagctgggactacaggcacatgccaccaagcctggctaatttttgtattttttgtagagacagggtttcactgtgttggcgaggctggtcacaaactcctgaccttatgatctgccggccttggccttccaaaatgctggaattacaggcgtgagccactgccatgaagatccttcttaaatggaaaatctgttcctctgacttgatgtgaggctgttggtgaggtttatagcagtggagacaggtccttcagaaatggagctaaactttgtgttttggagtattttgatggcctgccctgattacataagttttgctaagaagtcattagagtaattcctctattggaagaaacacccatatggggaatttgggaccttgccttttcaagttttacacaaagaactcttcatggggtgaaaagtacatgattccaggtccatttctagaatggaaacagctgaatcaacccaacagcgattcacattcctgagttttagagaatctgattgtttcaaggctgaagcaaaaagcccaataaacaatgtttgtacctttattaatagttaggaattaggtgcatcctgtggtcaagaaaacaactgatggtggtcaccaagtagtttaaaaccaagcaggacctcgttttatcatgtgggtgtttttgatttttttttatgaagttttttttcctgtgcaataaatgacaagctctgacttgaaatacatttcctttaagaaaccagaatctagggccaggcgtggtggctcacacctgtaatccaagactttgggaggcctaggagggtggatcacgaggtcaggagatcgagaccatcctggttatggtgaaaccccatctctactaaaaaatacaaaaaattagccgggcatggtggcgggtgcctgtagtcccagctactcaggaggctgaggcaggagaatggcgtggaccctggaggtggagcttgcagtgagccaagatcgcgccactgcactccagcctgggcgacaaagtgagactccgtctcaaaaaaaagaaaaagaaaccagaatctataatcctaaggtttttaacctggctttcagaaatttatgaactcctcaaaatcctgtgcaaaaattttgtgtatatgcatccatgtgtgtttatggggagatgatttatagctctccatacattttcaaagtggttgcattccagaaaattttagaacacaccacttggtcctggtgtggtggctcacacccgtaatcccagcacttagggaggctgaggcagtaggatccactgaggtcagcagttcaagaccatcctaggcaacatagcgagacctccacctctaccaaaaaaaaaaaaaaatgctgggcgtggtggtgcacacctgtgattctagctactcaggaggttgatcacctgatcccaataatttgaggctgcagtaagctacaattgcaccacagcactccagcctgagcaacagagcaagaccctctctctgaaaaacaaaaacaaaaaaccatatcacttaatatactattcttgttggtcaagtatcagattttgtttaaaaattaaatactcatttttagcaaaggtgtacaggcatacagttctaagagtcagaaattaacaaggcttagaacaaaacccagcaattccctaccttacccttttccaccctgatccctgttccttggaggttactgcgtttatgttttagctcattcttctagattgtgtgaaagacagggagatgtcctgtggaagacaaggactcaggtggcttaccctccccgctcctcctgttgcccacgtttttctcccctatcctctcagtataattattgtgatagtgaggccaggcacggtagctcatgacttatcccagatttttgggaggccgaggcaggcagatcacttgaggccaggagttggaggccagcctggccaacacagtgaaacctcgtctctactaaaaaatacaaaaattagtcggttgtagtgttgcacacctgtagtctcagctactcaggagggtgaggcacaagaattgcttgaacctgggaggtggaggttgcagtgagctgagattgcaccactgcactccagcctgggcaacagaggtagactctgtctcaaaaaaaattattgtgatagtgggatacatagtacaatagtgtatatatttagtattcatcctggtttttggcccagagcttctaaaacccttgtaatttcctgataggaacatcattggttataatatttggtcttaggtttcaattcctgacacaagagcttctaagacttttggaatctctggagtgataggagtgtcttttgtatgataatgagatgacaggtggctttgggcccctagacaggttcaggattagggctggttgccagaaagaccgaggtatgattaaagagttggacataccagccctacccctacctccggggaggggagacgagatgggctggagattgagctagccaccggtggccaatgagagattgagctagccaccggtggccaatgacttaatcatgtctatgttatgaaaactccataaaaccctctaaatattgggtttggagagcttctggtttggcgaactcatttggtgctggggaggtggcactcccaggggcatgggagccccgacctccctgccccgtggtgtgccctgtgcgtctcttgcatttggctgttcccgtgttctattctttgtaataaaccataagagtaagtaagtgccaagcactttgtgtgtcacctctcttactttttcagcaacactgtgtggcagataatgtcctcattttgccggtgacaaaatgagattgatgcattgagtaacttgctcaaggtcacataataagaattcaagctctgactccgaagcctgtgcttttaaccagcatgctgcatacatggcctctttatttgttaggatttttggtgtgtctaggtcctgacaccaagttgaccgttgtggcctgaagctattataacggtcctgctgagaacagagccggcacctccggattggcagggcaggggctgttcctgctgtgagttgcaggccactccctgtagcccttggctgatcttcctcatccactccctccctcattcagtagttcctgagtgccgcctctgtgtggtgaagaaggcagcattccagcccaggtggggcctgcaggtacacacaggaagaggcagctgtgcactgagctgactgtaggctgggacagtgtggctccagaggtgcagatagaataccgtgggagtgcagagggagcacatgcttctggaagggaggaaggggggcaggcatcacagaggaggtgtatttgagttggactttgagggaggagttggatttccacagtggaaccgagcagctgaggctttttcagcagctgaagattacagccagccagccccaaatgttcagcttttcctgaattctctttgttttttaggacagtgcagtaaattttcaacagaggaaaagcagtcacctccatgtcattaatgttctgcaaattctgtgtgtagtttttgatgcttggcagatgggggcagcctgggccataaaagaagagcctgtgtgtccacctgtttggacatcagtcagctgtggcacagggcagtgatcactgcctgctcctgaggaactcagttgtacttttatgtggagaggacaaagaaagctgttgtacagggggcaggagacatttcatctgcaaagcaaggcacaaaatacttagtctgtgccctgcatgagaaatgtagcagaactgtgtgctgattcccacccctgcctcctctcctgagagcaaaccatccttggtaccacggtggaaggcatttccgaagcctctgcgatcggagtgatctgttacttgcccattgagccttaggggcagcaaccaggtgctgtggctgaaacacaggccttggccacacctggctgggcatgctggctctgccactgactgtgaattacagaaccttggagaagtcattgtctttctctgtgcccctcatgtaagatggggaacaccgcggccattgcaggagggcagacaggtgggacgagtatgaagtgctttgtatgtgtgtggcatatggtgaatgaaatggcactgattgacattattgatagtaataacaggtttaattcaggaataaaactggtaaagtaggccaggcgtggtggctcacgcctgtaatcccagcactttgggaggccaaggtgggcgaatcatgaggtcaggagtttgagaccagcctggccaatatggtgaaaccccatctttactaaaaacacaaaaattagctgggtgtggtggtgcgtgcctgtagtcccagctacttgggaggctgaagcaggagaatcgcttgaacccgggaggcggaggttgcagtgagccgagatggcgtcactgcactccagcctgggcgacagagagagagactgtctcaaaaaaaaccaaaaaaacaaaacctagtaaagtattttacccagcctgggtacgtgtggtagagctgaatgaaagagcttagaaaaagatgacttgagaactagctcagcggaggaatcaggtgggatttgttgttgttgagtaagtgaaatttgcacctgctttctcccaggcctcattgagttgtgtaaaatagagagctcaggtggctgtgctggagtggggttggggcagtttacatttagccaaaggcaccggttgaagaatgcattgctattacgtgaggaacactgggctttgaagcagaactgggtccatgttcttgcctagtaactctaactaccatctagtttgtaaagggactgaaaattcttatcatgattggggtatctgcattggtttgtatagtatagatcatacgaaagagcatttaggccggagggaggcttttcatctctatgacttgactttcacagaacaattccatcatgatttgaagatttttgagccaaaattacattgttctgctatgtgtttggggcaactttatacatacacattggcttaaatatttcagatgatacaagaatatatgtgtggggtaaaaagctgaaatttttatccccccttctctagaagtaaccattctgcatagttaagtctgtattccagctattttgtatattataaatacactgtgaatatatgagtgtatatatacatatatgttacacaaacaaatttttagagatggaatattgctgtgttgcccacactggtctcaaactcctgggctcaagtgatcctcctgcctcggcctcccaaagttttggaattacaggcgtgagccaccgcgcctggcctgtgtgagtgtatttactaattgctaagttactgtgttcaatacgtgtccgttgaactcctccatgtgccgggcattgttctgaatgccttatatgcactaattcacttaatttttagagcagctctattattgtgatccttttacagcgaagaaactgaaccacagagaggctggggacgttgtccaacatcacacagccagtgctgttggaattgaggtttgaacccggacagctggcttcggagctcttagctgttatcatagatggcacacccaaaccttagggctgcctcccaagccttgcgtctgatatgggctcacctgagctctgctagagctgtgtatgtgaggtttctttcccctttaagaacacaagtcttggaattgtcccaaaccctggtaggacctcttgaggaccaaaaacagggattcttcaagcctgccccaaggccacatctctgatttagctacttggaaggtagacgtggaagggagtcattttgccaggacaaaaggtcaggatgcctgagctgactcagcactttgggaggccgaggcaggtggatcacctgaggtcgggagtttgagaccagcctggccaacaagttgaaaccccttctctactaaaaatgcaaaaattagctgggcatggtggcgggggcctgtaatcccaggtacttgggaggctgaggcgggagaatcgcttgaaccaggaggcggaggttgcagtgagctaatagtgcgctgctgcactccagcttgggcgacacagggagactccgtatcaaaaaataaaaagaaagaaggggaaggggaatggctgggctgactcattctagggaagaggccctacagcagccataggaccttggccacttgggtggaaaaggaggaagagcttcacccatggcagtgtcctggactgcagaaactacactctaaatagtccacgtcctggaacctggcctccccatttgcttctctcctccttgggtagagggtgtggggaactttctaccctggaggctgagcagtgcgtcttctaaccacggtaggcatttgtccgtccctgggaacacaaacagcattctcataaccagccctaatactcctgaacagctttttgtaggatggggtggggcagggcagaggttcattttgactcataggtaccttttccacttttactgctgataactgcgttacggattaaagttttgtttttgatgctgaagagggcttaagagagttagatattatggcacatgtaagtctgctaaaatagaactgtggggtagtgtaggagaatctcctcttaattatggatcatatattgtgagcattagaagccatgtgtacctaagttgaaaaatcaaaacatatcttgtatttgggtgaccccggtaagtcaggataccactgcgccttgtgtgaacacaggatgctaaggtgtagggatcaacagcctttttctcgacattttgcgcttctccctcggggtaaagtggggcggcagtaggaactcacagctgttgggcagctaatatttgtcagctattttacatgtgggattccatttaatgcaatcttggaggtaaaattattttattaaagatgaagatagaggcttagagaagttaagaaaattgttcaagttcacatcattgctttctttctttctttctttttttttttgagacagagtttcgctcttattgcctaggctggagtgcatgggcacgatctccactcaccataacctctgcttcccaggttcaagcgattctcctgcctcagcctgccaagtagctgggattacaggcatgcgccaccatgcctggctaattttgtatttttagtagggacggagttttccttgttggtcaggctggtcttgaactcccaacctcaggtaatccgcctgactcggccacccaaagtgctgggattacaggcgtgagccaccacgcctagctaattttgtatttttagtaagaatggggtttttccttgttggtcaggctggtcttgaactcccaacctcaggtaatccacctgactcggcctcccaaagtgctgggattacaggtgtgagccaccatgcccagccaaggccacgtaattgctaaagtggaaagatgaagtactggatgaactcagaagtttgacttcaaggcccttgatctttccataacatgtggttccttccctggttggtggggagtgactgaagaactcaaggaagccgcgttttgtggaaagaggacctgaggggtatatggtctctccaggcttggaatctgccacgctgggcttctgaattctatagcttggtcatacagagagaagcccctcatttaagacttattctttgggggaaataaaggaaggccgaccctatgaggacaggcagagttgactttctcagagctgctgtggcaagggagtcggtgtcgtcacttgcatgtggcagagactcacatgcaagtgagtggcagatgaggagtggggaagcttcaggatggaaaagaacggctcccggtggaggctgttgtgggggctggaggtggctctgcagaagtggggtgtcctatgtgattggttaggggcgtatttggctttctctgaatgatcctaactgggaaacgggccaaaattagggtggctgttggttttgagtcaagtcctggccacgtgggacagagttgtcatttagctttctgggttgtcgagagagaagagtctggcttcctgtctgatgtgctagcctggctggcctcctggctgtttactgtagatagggggttggtgtcctgggcgggcagctgcaggttgtggtctgagttctgtctttatacacatggtcaggcatggtctgtttggatattcagtccctcatttttcttgtcagtaaaaatatcaaatgacaaattggatacactgggaattttttagatgtctgtgtcccctggaagcagttttcacgttcacatttaatcagagtgaatagaaacaactgggccatttatcttgaagatttaaaataggaaatcttcaacaatagtacctaggcgccattgcctgtctgtccatcgttagggaatctgttttgatccaccgctggctcatcgtccaccagtatgtggttgatccagttctctatacatcttgtcttttgtgcatctcattgtttgttagtgttagcttttccacttcatcagtgtagtttatttgtgtaacctttgttggtaggaagttatttgtggaatttgtgaatggaagggaccttggaggtttgctaggtcagcccagtgattttaaagataaacggaactacagggaaacgttccagcttttttggtggcaaaaccaggaatagaaagcagtattctttctgccacaatgtcattgaaagacaactaaatgtgggcctaaaatgcagcatcactaactttcatttatctctgcttctgactcttgctatcagacattttaaattgaccttaatgtgttagcagaaatataaaaagtactgacttgtttgcatataaggtaccttttctcctgctcatttggttgtttgtttaacaggattgaaaagacattgttataaactgaatgtttatgtctcccccagattctcgtactggagccctcacccccagtgtgatggtattaggggatgggacctttgggaggtgattagggttagatgaggtcatgagcgtgggccctggtctgacaggatcagtggccttagaagaagagaaaccaggccgggtgcggtggctcacacctgtaatcccagcactttgggaggccgagatgggcagatcacaaggtcaggagattgagaccatcctgaaaccctgtttctactaaaaatacaaaaattagttgggcgtggtggcatgtgcctgtaatcccagctacttgggaggctgaggcaggagaattgcttgaactagggagtcggaggttgcagtgagccaagatcgtgccactgtactccagcctggtgacagagcgagactccatctcaaataaaaaagaagaggagaaagcagagagctcctactgccctggtgtgaggaaaagaagaaaggtggctgtctgcaagccaggaagaggtccttgtcctggaactgagttggccgacaccttgatcttggacttccagcctccagagctgtgggaaataaactaacgtttaagccacacagcctatggtatttgcctatggtattatggccatctgagctgactgatacagagatggttccagaatactatagcctgtatttaagttggtgatgccatgaaaataaatgtggtagtccattcctttatataaagatagtgctgtgagcccagggcctttgcttatgtcttaattgagtcttgtcttcttataatagcttcctaatttctcttttccctctctcatttaccttatatatctggattaaatcatatatggtatgattttctgctttatgtctatacaaattcttagtgattttttgttcattttattttatttttgagacatgtccttgctctgttgctcaggctggaatgcaggagtgccatcatagctcactgtaaccctaaattcctgggctcaagtgatcctcctgccccagcctcctgagtagctcctgagtagctgggactacaggtgtgctaccatgcctagctaatttttaaatttttttgtaaggacagggtcttgctgtgttgtccagagtggtttcaaactcctggcctcaagcagtcctctcacctcagcctctgaaagcgctgggattacaggcatgagccgccgcacccggcccagtgatttttcattgttaagatcaaggacaggttccccggcttggcattcaaggctcatgatctgggcatgatatgcaagtttgggtttcagtgtttccattcctgtcatcaaccttgcactccagcttgttgcctaagccctgttctgaagcccagcctgagagctgcacttagaatttatactttctcgtctcttcatcttcttcgcctatgttcttatctccatctgggacatcatctccacacttctacctccttaaatcttctccatccttcaagacttgaaatactcacttcctttacatgatccctgctctgacatccaagctagaattaatttttcttcctttgaactctgatagtacttaatgttttttgtcctttaattacacagcagtcctgtgtgttaggtattattattcccccattttttcatagttacattgaaaatatgtactatagtcgtatattttgaatatgtaatatgagcgatggagcaacattcaaaaggtcctggagagtgaaaggaagtcctactcccatcattgccctgtgaccactgttgccagttttttttcttttttttccaagatggagtctcactctgtcgccaggctggcgtgatcttggctcactgcaacctccgcttcctgggttcaagcgattctgctgcctcagcctcccgagtagctgggaccacaggcatgcaccaccatgcccagataatttttgtatttttagtagagacggggtttcaccatgttggccaggatggtctcgatctgttggcctcgtgatcgcctgcctcagcctcccaaagtgctgggattacaggcgtgagccaccgcgcccggcctatgtgtcttctttttaaaaacacagatgttggcataagataaacactgttctccaccagttccccattgctaagtatttaggttgttcccaaccgtttggattaatcaatgctgagttgtatgtaattcttgcatatttgcgtgaatatgtgcataggatgcattgctagaaatggaattgtaggatccaaggttctgcgcattttaaatgttgatgggtattgctggattcccttccgttaggattgtaccattatctcactgtcaatgtgtaagggcgcctatttctatttccttgccaacagtttcttctcagatgttttgtttgtcagtctaatagataggttaaaaaaaaagtggccaggtgcggtggctcatgcctgtaatcctagcgctttgagaggcggagacaggcggatcacctgaggtcaggagtttgagaccagcctggccaacgtggtgaaacccctgtctctgctaaaaataaaaaaattagccaggcgtggtggcgggcgcctgtaatcccagctacccaggaggctgaggcaggagaatcactagaacctgggaggcagaggctgcagtgagccgagagtgcaccactgcactctagcctgggcaacagagcaagactccatctcaaaaaaaaaaaaaaaaaaaagttttgctctcattttatagggtaggaaactgaagctgagagagattagataggtcatctacctggtctcataggatgtgtggttcactcaggacctgaatttagtcttctaatttgaaaatgcattttctttggaggcaaactggtattaaaaaaacccatatttatttatttatttatggatatataggtatacctacaaaaatatatataatatatagtttatatatttagcttttgacaagttaatactgtaattatgtactatttagtccctctcctagcctataaaccttttctgtagaagatatttttcaggtttagggaatttttttcttgagagtctgggacagacctgtaaacagtttagattatgaaacaatatacatttctgttttttagtctcaaacatatcgaaattgtctttcgacttttcagacctttcaaaatagagattcgaaggaagaagcccaggctatttgtcttttagggattgcagtttctttggtaagagaaaggttggtagctttgttagtaaccctttgaccttgtgaatgtcttttgtgtttagttaattatattttccgtataactttgaagattggggaagcaagtgtagtttagcagttagctctcttccttgataattatctttccttctttcatttattatagttacagcattaaaaactgcccataaggccactagtttttgtcgtcaccagagaaagatgaccccaaatacggacctttgcattagaagttacaaattttatccaaaaagttagcgcacaataatttggatattgttaaactttccagatagagtatatgggttgaatatgaattgtgtgtgtatataaatatatttatgatctaggaattaacaccattcaattcaaaatggccaaattcaaatactgttggtgggaatgtaaattagttcaactgttgtggaagacagtgtggcgattcctcaaagatctagaaccagaaataccatttgactcagcaatcccattaccgggtatatatccaaaggaatacaagtcattatgttacaaagatacatgtatgcgtatgttcattgcagcactgttcacagtagcaaagacagggaatcaacccaaacgcccatcaatgatagactaaagaaaatgtggtacatacacaccatggaatactattcacccatcaaaaggaacaagatcatgtcctttgcagggacatggatggagctggaagccattatcctcagcaaactaaggcagaaacggaaaaccaaacaccatgtgttcttacttataagtgggagctgaacaatgagaacacatggacacagggaggggaacaacacactctggggcctgttgggggtggggcgaggggagggagagtgttaggaaaaacagctaatgcatgctggctgggctcaatacctaggtgatgggttgataggtgcagcaaaccaccatggcacacatttacctatgtaacaaacctgcacatcctgcacgtgtaccccagaacttaaaaattaaaaaaaaataaaagactaaacaaaaaatccgcaggtttcattcagtgaaacagaaaatcccaaagctctttcgcacatggcttgtttattgttcttagggctggatattcgtatgttctgataagaactcaatcggctcagaaatgtcatttcttagattctactaaacgtttgtgtaggacctgtttaatgaaaacacaggttccattcagccatataaaatgacacatcacacaccacaaaaatagcccccttgttccaaaaacacagacattttacatttctacctgaagtgtacagacgctgactgaagctctgtgttgcagtgatgcgtgctgctaggattgtggctctgttttgcatttgctagccaggcttcggctttccagtcaggtattttttgttttgttgatgttgttgccgccgttgggccgggataatctgtgtgaatttccctccactgctcagtcagattccctttccgggggccgggctgagtgtctcatctgcagccctgtttttctagtgatctgggcctagtgtctcatctggcagccctgtttcttggtgacctgggccgagtgtctcttccggcagccctgtttcctggtgacctgggccgagtgtctcatccgcagccctgtttcctggtgacctgggccgagtgtctcttccaacagccctgtttcctggtgacctgggccgagtgtctcatccggcagccctgtttcctggtgacctgggccgagtgtctcttccggcagccctgtttcctggtgacctgggccgagcgtctcagccctgtttgcgggtgacctgggccgagtgtctcttccaacagccctgtttcctggtgacctgggccgagtgtctcttctggcagccctgtttcttggtgacctgggctgagtgtctcatccacagccctgtttcctggtgacctgggccgagtgtcttatccgcagccctgtttgcgggtgacctgggccgagtgtctcatccggcagccctgtttcctggtgacctgggccgagtgtctcttccggcagccctgtttgcgggtgatctgggccgagtgtctcatctggcagccctgtttcttggtgacctgggccgagtgtctcttccggcagccctgtttgcgggtgacctgggccgaatgtctcatccggcagccctgtttgtgggtgacctgggccgagtgtctcttccggcagccctgtttgcgggtgacctgggccgagtgtctcatccggcagccctgtttcctggtgacctgggctgagtgtctcttccggcagccctgtttgcgggtgacctgggctgagtgtctcatccacagccctgtttcctggtgacctgggccgaatgtctcatctggcagccctgtttcctggtgacctgggccgagtgtctcatccggcagcagccctgtttcctggtgacctgggccgagtgtctcttctggcagccctgtttcctggtgatctgggccgagtggctccatgagaagttgcacccatcttctccagtagtgcatcttttcacagcaagcaaaacatttccaccatgtttctagggggctgtgcactagttcttttctgggcatcaggagacctggctttgttctggttcaagcaacagctggtgagttaccaaagacaagtcccatctatcccgtggtcctttgctttataagtagaatgacagtcggagtgggcatcactgccctggtctctttgcggtgctgagtgttgtggggatgatgactaagtgtcaggttgcgtttccacctctaggggattgcagtgcagtgaaagacgcaggaggaaagctaatagccccgggcaggtacacagaaccagaggagtttggaagggtggttccaaactccttggtgggattgatgtgatcacaatagacattttatctctaagttttgggccattggaccaagagaagagagagctggtgttgagttgtagtgagaggtacgtggttcatgtgcatgctgagcctggcctggattctgaggctcattccattttaccttctgtttcggccttcttcatgcatctgcttgtttctccagaaaaattgcaataaattcctttcaaaaactttacaaaagcaatagatgctcattaaaaatagttcaaatgatatggaagacagaaagtgagtgtgtttcttttgtgtttggatgaatgtgtctttggggtagtcactaataacactgggtgtatttccttccagatcttttccagtgtacctacaaatatatatgtacactttgtaaaaaacaaaatagtactgataaacattgagtccccctacccccactcagcagtctacatggatatcctttcatgacgatacagtgagacctgattgactccttttgttcgctggagtgctaggtaatgatagctaaagataactcaccttcagtgggcatttaccatgtgacagggtctgtgcgccaggcgggctacatgaaatgagtcttaaggctttttacaacagtgctatgggtgaacacagtaattgttaacattttgcaaatgatagaattgcagtagagagaagcaaagctgcttgctcaaactcatggcactattcctgagagagagagagagaacacttttaaaacagttgttataatcaggtgatttacgatcatttcaagaaatagtgcattcagtgaatacattcagtgtctggtacagtccgggagctgttcctgaaaatgcactgggctagaggtaaagggagtggtccactggccctgggcccctagtgcaaggagggaggtcccagggagagagggcatgaagaggaggtctctggacaaaccttgcaacatccctttctgctgagtctggtccgaggtctggttcttgacatgtacacttttcagagatgcttggttttgatttttatcatggctcacctgagcagccatggtttcaaactgcctggaggtgtggtctggaaggccagtgctatgcccacccttcccactcctgcaggagggggaggggagtcatcctgggactagagggcttcacgtataatcagctatcatagtaagtggacttgatgctggtttcgctgggtcaggaaatttcccatttggaaggaaaattgatacttgtttttgggttttgctgaggagccacagggtttagagcaggggctggaagctttttgagacgcaagtgagtgcaatcagacatcctccatgaaacttggaaataaagacggtgtcccagagaggtccctgcctttgggatataaatatttctgtaacagaatggcactggatgtctgctgtattgttttctctgctattttggcaagttttatttgggtatgtgtctcctgtacagaaggcacgacatcagtttttgccaccaagtatttacagcagttggtacctcctttgtgggtcacttttgtgccgtggtttctttggggaaattgcaggtctcctacccaaagcacattgcccatttcaaggtgctcctggtatctgaacacctaaggcagtgccttccaggtgggtgaagccagccgaggaagtgcctctccccagcaggtggggactggtgattgcgtaagtgaggaggccggggatgagccctggactagaacttgtgactggctgcttttctttcccgtcctctccctcctatttttccaccacccccacttttaaaaaaattcttattaaaaattaagtaattattttggtttcctttatccgctattccttgctaattgtatgtagagtgagcctgggaaagtgagaaagaaagttgtacttagtttcaaatgatcataccagctactctccattgaggggcttgccgcagggcggctttgtgaagtggttttgtgggggttctcctttcagtcctcagccttaaccagcagaagcaggtggtacttattcctggttaatgttgaggaagttgagctcaaagtggttaagggaccttcccaaagtcacattagaaagtagcagcatagaactaaacacagattgtctctgaatcaggcaggtcgtctggttccaaaatgggctcttaacttttggaggtcaaaaagctgaacagacacagatatttctttttccttcttcttcttctttttttttttagatggggttttgctctgttgcctgggctggtctaggctcaagcagtcctgctttctcagcgttctgagtacctgggcttacaggttggagtcaccacacccaaccgaacagacgtttcttgaaagaagatgtacaaatggccaaaaaatatgtggaaaaaaatgctcagtatcataatcagagaaatgcaaatcaaaaccacagtgagaagacaaaaaataacaagtgctggcgaggatatggagaaaagggaactcttacgcaccgtaggggggaatgtaaactagagcagctggctgggcgcgggggcgcacactgacatcccagcactttgggaggccgaggcgggcagatcaccggatgtcaggagtttgaaaccagcctggccaacatagtgaaaccctgtctctactaaaaatacaaaaattagctgggtcggtggatcacgcctgtaatcccagcacttttgggaggctgaagtgggcggatcatttgaggtcaggagttcaagaccagcctggccaacgtggtaaaaccgcatctctactaaaaaatacaaaaatttgctgggtgtggtggtgggcgcccataatcccagctacttgggaggctgaggtatgagaacctctggaacctgggaggtggaggctacagtgagcgagctgagatcgcgccactgtactccagcctgggcaacagtgagactgtctcagagaaaaagaataagagtaagctagtgcagccactatggaaaacagtatggaggttcctgagaaaactacaaataaaaccacagtgtgatccagcagccccactactgtgtagatacccagagaaaaggaaatcagtgtcggaggggcatctgtacctctgtgttacctgcagcgctgttcaccgtagccaagatatggaatcagcctcggtgtccagcagcacatgatggatagagaaaatgtggtctttatacacagtggagtactattcagccgtaacacaggatgaagtcctgttattctcagcaacgtgggtggaactggaggacattatgtgaaataagccagggacagaaagttaaacaccgcatgttctcttatgtggataacaagaatatatatagtttcaggctgggcacggtggctcatgcctgtaatcccagcactgtgggaggccgaggtgggtggatcacctgaggtcaggagttagagaccagcctggccaacgtggcgaaaccccgtctctactaaaaatacaaaaattagctgggcgtggtggtgggtgcctgtaaccccagctaccagggaagctgaggcaggagaatcgcttgaacctgggaagcagaggttgcggtgagctgagatcgcgccactgcactccagcctgggcgacagagtgtgactttgtctcaaaaaaaaaaaaaagaatatatagttccagatacttgaaggaagggtattgaacgttaccaacacaaagaaatgataaatgtttgagatggtggatatgctaattactctgatcacatacattacatgtattataacatcactgtatgtaccccttacatatgtacagtatacaattatgtgtcaattagaaaaagctgaacttagattggaatggctatgaagcagctagctttttcatatttttgatatagaccctaggcatttattttaactaaacttggcttcaggaaatgtgtagtatttgaattttagctttgcattttataatatagagaagtaaaactttaggcttgctttagatacagtcacaggggtttgcagtgatgacttttttatgtaataagtgggaaatataccttaattaataggcatacatgctcattttcttcctcttacacatttttagttgttgtccaggcattgtgatacttatgtaaacagtatgtgatatcttaggtaggaatcagaattttaaggtaaggatacttagagttatatgtttttcaaactttcaagctggacattttacatgtccattatataattgtaattaaagtttcacaaagacaatacccatctttaatatgggtgatgcgctagcattttttttttttttttttttggagacagggtcttactgtctcccaggctggagtgtagtggtgcgatcatggctcactgcagcctcagcctcataggctcaagagatcctcccacctcagcctcccaagtagctgggaccacaggtgtgcaacaccatgcctagctaatgtttaaaattttttgcagagacagggcctccctgtgttgctcaggctggtctggaattcctgggttcaagtgattctcctgcttcatcttcccacagtgctgtgattacaggcatgcgccactgtgcctggccccatataagtgggatgatgacttgagcctaggagttgcagaccagcctggataacatggcacaagatcctatctctacaaaaactaaaaaaattaactgggcatggtgccacctgcctgtggtcccagctactccaggaggctgaggcaggaggataacttgagcccaagagtcaaggctgcagtgagctatgatcttgtcattgcattccagcctgggtgacagagtgagaccttgtctcttaaaaaaaattgctgtctacctgattattcatagaaaaaaaacctgaactctgatctaaacctcatacctcatacaaaaattaactcaaaatgggtcatggactaaaatgtaaaatgcaaaataaagatgaaaagaggagctacagactgggagaaactaattgcaagccacatgtctgataaaggacttacatctgtaatacataaagaactatcaaaatttagcagtaaaaccaaaccatctactttgaaaatgagtaaaagacatgaagagacatttcagataacatataagcaagtgaaaagatgttcaacatcattagccgtcagaaaaatgcacgctaaagccacatcactatacacctatcagaatggctaaaataaaaagtaataacaaaaccaaatgctggtgaggatgcagggaaacggaatcactcacacttggctggcaggaatggaagatggcacagccattctggaaaacagtttgacagtttcttaaaaaactaaatgtgcaattgccataggacgcagcactcacattcatgggcagttatcccagagaaatgaagacttaaccttcacacaaaagccatatgtatctgttcatagcagcattatttataaaacgccagaaactggaaacagcccggacaccactcagcaggtgaatggttaaacaaactggtgcacccaggtcccggataccactttgcaatagttaatgacgtccttgttcatcggtctttcaaactagaaaccaccatcatgcataatacccttttttccatcctgggtctgtgtggacttcattttgcatttctttcaaatgcattttctctctgtcctttctggttgcgcctcatgctgcatttgaactgttgtaagagccacctaataactctgccttatcatggaatcctttctatatttcattccccgtgttgccattggaacaatctttccaaaacatgaacaaactaacttaaaagaaatatcccaggtagccttccaaataagtgtaagctttctcttagaagatttacttcttgtctatggagaaccccaggactctagagagatggatttgctgtctgcattttaatatcaggcagaaatccctggagggacccgtgtggaatagtgacacaagtactggttctagaatcagaggcccttatatcctggttctaatactagctggatattcttgggaaagttttggtttcataaactcagaaactccatttcttaaaaaatggagatgaggaagcatactcaagggatcacgcaaggctgctgggaggagcggatgaggggcatggtgaaaatgctgtgcaatccgtaaagcatgtcatttgtgtgagaagtggagctgtgtgaatagcggctctggaatcattgtatgaaaatgatagaaagcacattcatagttctgcctgatgatatcactgggcgcctgtgttgtacatgcctgcaacatgggcgaggcccgggtcagtacagctcacagtttggttttcatgcacttagaaaggcccaagaggacccttcccccctccggctgtaggaaggaggcggctggctcctgcctatatttggtgggattgtctctggctccttagggacaggaatgcagggagtgggggaagaaagccgtcctggctcgctagtcagccttcccccagggaggagtggaggggtcatttcgtggtaacttgccaagtctttctcaacccatctgctcatagaaatgaccagcatgacaagtaaaagacccgttggagacagatgggctgtgtgtcccgtgcgtttatggctttgtggcctcagagctgccaggactcgatagctttctggggaatgctgggtcagccaaggggctgaaaaaagtgagaggaagaagatccacccctcggtgctctggtctgggagtgattactgaggagagtggcatggagggcccagtcgtggggtgcctctcaagcacgccctcaccgcagtgggaatacgtgtctcaacctccctaggcctccgtgattttcgtctatcacatactcacctccagcagagatgtctatggtgacgagatgagacagcatcatagcacatgtggccacttagtaggctcgcagtgagtggacgctggagtcagtggaacaggagactgggtgctgcctgtggatgcactcacgtgctcgtggcacgggtgaacgggggagagagggatgctctgcagttcttcttttggtctgttactcccgctgttgtgagcagaatccgtgagtgtagtctgttgccccacttgacttggtaggctgattgctcaattttctgcttccacttttgatttcttaagaatgggaaaaggaatacttcagttacttttctggttgatggcataaattccttgatatcaccttaatgtttttttatttctatgtattttgaattctggaggttgcctaacatctcttgtttttatgcctcaccctctctgtaactgttggccacaccaagaccagagagaagtgaccaggccggttggtagcagggctaggactggaattccccagtcttttgactcccagcaggctctgttttctgtattgcactgcttttccctgtttcgactcctgttaggacagtggatgtgaaatgtagctgggcgcttttgggggtgtgctaggagtgtggcagatgcctcagactggcatttttccctgattctgaattttcatggctcagagtcagtccctaggccactgaccgggaagatacaagaagttgttttgtatggcagcctataccagggtatttttttcacccggcaatttatttggtttggactggaataaatctctgagattggcttctttgccaatattattagggagtggagcctgatttgttttagcccgattcgtagtgcttagcatctcaatgaatgtgtgttgaactgagccaaagtgtgagagcgtcttggacagtggtttgcaaccctagctgcatctggggggctgtgaaaaaagcatgcatgctgactccagaccagttgaaatagaatctgcaggaatggagcctgggcagctatagttctgttaaaaacccccagatggttctgatatacagtaaaaattgagatccactgatccacggtgaattggagtcctgaatcatacacatgccttatgctttcactagcttagaatggctcttgcgctttggaaccatgaaaaaaatgttatgcaaacaaatgtggaaattgcctaaatgccacatcctgttactacctgccgtgaagtatatttgccggttattcactctattccgatctctacccattccaccttttcttcatgaaacaataatttgacagttggttatgcagaaccagagtaagtctagtttgattggcaggaaacgattttgggtatgaagtactctttaggtatttattgaactcttgtttgtaccactgctgtgctggacagtttataaataatacttctttaagcaagggctatggagtcaggctgcctgggttttgctaactagctgtgtaatttggggcaagtttttaaacttatataaacctgactttcatctatgaaatgggatgacaaggggtcatcatctaacaggattgtgcaaatatgtgtgcaaagtgcttagtttggtgcctaacacatagtaactgctcagtaaagttattatgacaccaccatcatcatatttaaatgtaaatattaagagctaatgaatttgtaaaaggtagtatacccttacccctcgaaccaaagactactttagttttaagtgattgggttaatttatcacttaaatattggcctcttgaataccttgaatttcaattgaatgtagccagaggattttataattggaccgttgcctctagaagttggagctttgtttgtttggtttcacttcctacactaagcacgtggctatgtgcacctttatggtgacttctggtactggggcatcaaagcttcattagcttctttggaggagatgatcttatgctatacgaagcactcagacttcgttaactatgcatcatccagacaagaacaggtgcttcctatggcagcctgtccttttcttagctctctcatcaatctagcctgttccttctattcctctttatactagaatttctctttgaacaaggaatgttgttttgccactgctaggtccccagcaattagtgatgaattaggcacctagtatgtgcctcctaaatattaatagatgataatctagcagaacacaagataaatccacaagttgagatttaagctgtgtggtatcaaagctgcattggtaaacttattaaatcaattaaatcaattttgttaatacaagtttaaaatatcttagtaactgacttaattcagtaatcatttactgagtgtcttctaggctagacattggggacagaaaagtgataatatatgatccctgcctcatgcacaggaagcctagtgtgatgccaagggctgccatggaatatggcgagtattaagataaaggggcaccctgtgtgcccttggagcatagagcagggcttgtgttctgggaacttgggctccatgttaaaacacaatttaaattaatttttttttttttgagacagagtcttgctctgtcgcccaggctggagtacagtggtgtgatctcggcttactgcaacgtgctccccccaggttcaagcgattctcgtgcctcagcctcctgagtagctgggataacaggtgtgtgccaccacgcccggctaatttttgcatttttagtaaagacggggtttcaccgcattggccgggctggtcttgaacgtctgacatcaggtgatcctcccgcctcagccttccagagttctgggattataggcgtgtatgtattcatgcttttaaatatctgtgggtagcacttaactttaaatgggtgctaattaaactattgaatggctttagtatggattaaatggctttgctcaggcctcatttttaatttccttcattagaggaaaaaaaacaatgcagattgaatatcccttatctaaactgcttggaaccagaagtgtttcagatttttttacatttttggatttttgaatatgtattatacttgctggttgagtatcctgaattcaaaaatccaaaatctgagctgctccaatgaagatttcattgggcgtcacgtcagcgctcaaaaagttatagatttcggagtttctggttagggagactggtcctgtatgggtgctgggttgttgcaggagttctggaccagaggttaggtgactaggctttggttttcactttgttactaaacaggctattttcttccataatctcagctttagatccctcggttgtcaaagaaggggttgggccatctgatgtttaaggcctctgttagttctgactttgagatatctggtttcaattcatcttccttaggcatggacaaagaacatgggaattttgaaattgttagtcaacatttacagggacgttgcagcctagttttgggtaaaggtcatctttagtgagcccagggagaagcagtggtttagctgtcagctgaggggtaagtggtcctataaattttcctctgttttagcaaaagcattgttaaggtcacagcattagtggaattagctggaaagaggaggggaactcactgttacaagttgtattgaatgtcttttaagtcgctaaatgctttttatgaatatgtttttcaggatttcaacgttgtagcatttctctgtgttgcatagcacaggaaatttaatatcatcatgtgacatttgaattttttttttttttttttgaggtggagttttgcttttgtcacccaggctggagtgcagtggcgcgacctcagctcactgcaacctccgcctcccgagttcaagcggttcttcctcctcagcctcccgaatagctgggattacaggtgcccgccagcattcttagtagagatggggcttcgccatattggccaggctgttcttgaacttccgacctcaggtgatccacccgccttggcttcccaaagtgctgggattacaggcgtgagccaccgcgcctggccttgaatgttctttctgtgggaatctacaaaagccagcttttgagtctagtggcagaaaacctcttcgttgtttagctgtgctgtgagtttggagggcttcaagcccatctgaaaaagctgtagtattttatgtcagttggctgtcttggagaacttaatgagcactgggccggagtgatactgtcagagttcatgagctgtctgaggctctcgaagcctagatactgcggttgcccaaatacattggctggactcactatttttctccggaataggggggtggaaaatgctgtagtcttaactctgctcttaattttgcagtgctgttattaatgataagaatgatttcatacgtttgttttttgcttcgtaattcacagagaattttaaaatccattatctgattttattccctcagcagttctgtgaaaaaggcagggcagctttcatatcttctgttgccccctgattctcttgtggctcacagaagctaagagccttcagcgaggtcatagggtgaatgagtcgcagagctgggagtagaggctcgggcttctagtaaccctgtttctttctcgataggtcactctcatggcgctttgctcaggtaactctgcatgctgggtttggtcttttgtaaatccctgccctgtttggagagaggttcttgggaggtttctattcattttggagcattgaggtatcttgtcctctctccctcctcccacatgcatgggcatttcagcaggcccccaggctggcccttgtgcgtgggggtgtctcctgcctccacgttgcatgcgtgtccccctgcggaaggtgctcttcccggcatggagcccccttatgcctgcctccacactgcaggctgtttggtaaatgttactgactcagcatcgttgttctagaaatgggacggggtatggatgccaagttcttttctgtgtgaaggttgtgattgtatcatcttgccttccctgtgtgtgcttcttgaggagggtgtcactgtgctgcggtcatctgtgttccctagggtgcttcccttggagtcctggctgcagcagacatgcagtcagtgctcatggcctaaatgagagaaaggccaacagagccattaaatctggaaaatgacaagtgagggaaaggaatttttatttaaggcatgtgaaaaagaaatctttttagaaaagttgacctgtttctcaactggagttgaatttcagctcagaaaagcagctgtgcgcccagagggctttgggatttcagtttgtgacagatgaatttaatttgttgttgtatgaatgtattatccttttgtggttttattagacctttctcccaaatggaatagatttttctataaaagtcacacttcctttttgagaagtataacactaattttatgggatggtctcccaaaagattacctgctaggaaccaaacacgctgcctcagaatcatggcccctggtttctgcctgtgcagctgcaggggagagaggcacgcttgatttcagcttgagctgaaatcaagacacatgtatgcatcttgctctttctttccttctgtttagtctctgagctggcatgccttcaacttctaggagcttggtgggtgtagacacattacggtatggaggagggatatggtgttgcaacagccaggagactcgctgcagtctctgttctctccctgctcactgctctgattttgtataagtcacatttgtagggctgggcacagtggcctaaacctgtaatcccagccctttgggaggccgagctgggaggatcgcttgagcccagagttcgggaccagtctgggcaacatagcaaaaccccatccctacaaaacataaaaattaaaaattagccaggtgtggtggctcatgcctgtaatcccagcttgagaggctgaggtgcgagaatctcttgagcccaggaagtcaaggctgcagtgaaccatcatcgcgccactgcactccagcctggtcagagcaagaccccgtcctaaaacaaaacaaacaaacaaacaaacaaacaaaccatttgtaatagtggcagtagttaacttttgaaagtttggagaaaagttactaaataacctgtgaccatggacaacttacttaatctttctatgcctcagttaactcatctatgaaaaatgagagaatatggtactgatcttacaggatttcagcgagaactagacgagataaaactcagagcctggcacctcgtgagtgcacactaaatgttattatttcaacattttagaggaaaaagaacgctaatgggtcattatggctaaacatagtctatcactggcgttactcatggtattggaaggaacttgaattccatatagatagtgtgatggagaaagtattttgggcattggcagtattaattcaaagaacaaaggacctgtctgtcatgtgtggagagccgtttccgcttgtttctttaaacgctatgggaaaagcagtcggccccgtgcactctgctggacagcttcagtctccacgtattggtttggccaattgtcattcgctgtcatcatggcagcagcagttgaagggacagcttgtcttgatttgcatttttgggtgtttgtgctatttatagacaattaagaaaagacatggaagcctgtttatggcaagctggcaaattcagcaaaacatggaaaaatctgttagcacagtttgcacgtgtgcaggcacagaacagccaaataaacacacacattttcctgtattttaaaaactctctggaaaaaaaaaaaaaagacattaaaccattgcccagatggcttacagagctttttccttgaagtacatgagtatggctgtcagacatctgaaacccgaagccatcttaaaacatcaccatcattttgatgctgcccgcccgcctcctttttttccatttgtgagggacaaggatccaggaaggaaagtatcagcttacaaaggcttttgttacaattaatctttcatgttctttcttttggtatcttattctctgcttatattttatttttattttttatttttttgagacagagtcttgctgtgtcgcccaggctggagtgcagtggcactttctcggctcactgcaacctctacctcccaggttcaagtgattcttgtgcctcagcttcctgagtaactgggattacaggtgtgcaccaccatgcccagctaatttttgtatttttagtagagacggggtttccccgtgttggtcggctgatcttgaactcctgaactcaggtgatctgcatgcctaagcctcccaaagtgctgagattacaggtgtgagccaccgcgcctggtcgctgtttccactttgtaacgctagcgtcaccccagtgtagggtggctaggggtattcttctttccagtttcctggtgtattttcttctacagcattgattgctctttaacatactttttgcttgtctgtctctacctacaaaaatatatgttccctgttatatgaccagtgcctggcacctagatagttagtcaatatttgttgaatgaatgaatgaatcaattggctgaaagaaccttattcttctttcttctgtcacttcatgacagatgcttttggaaaatgctctgtgaatagggatcataagcaggagagattacacacattgttgtgggatagcccatcatcctcagatacttgcctggagggaggtggcgcagatacttgccgggaaggaggtggagtacttgagtagaaatgatacaagataacctcttcaggaaatcagccaagtatcatagcttttcacataggtgtgtaatgtttgtgtatgtgtgtatgaagagctgttgtggcctagaatcaggggcctttagatcccttgtacagatagaaaagtaaaggctgaggcccaggagcgctccaggccactgcggtagagtccctgtctgcccctcccagtgcctggtcacttctcactgcactccctgccttactgctaaagccatcttccccgactctgaatgtgtaaccacaatggagaatatgtactccagggtcacagtttgtggagaaaaagcccagcagatgaaaattatgtttacaaggtttgtacctagaaagagtggccatttctatgatgtctttaaatgtccctgtttctcatacattttataaacacgacaatagaaggagattcggaaacagcaactttagaacaaggggaaaaaaatcaaacctagagcattccagtttctgttttcttctcagtctagggctgaggcactttagcttcctgtctaagggaccactcaaatctgattagcagccattgtgggctgataattacccatcattttaggaagacagatgcagcaccaactctgttctctaatagcaggcttattaattttaaatttgcatggcaggagaagcagatggcgaggtgggataagcgttcagatgcttggtcattgatagctttttacttccacgcatcacatggggatttgggacccgggaagcccgctgagaactgattattatctgtcccctaaccagctgggttctttttcatcctgagctcagaaagattgctcctattgcagtcagagaagacgggttgttgactggttagaaatcatggcaggttatttgctccacccgcagttcgaaagcagagctatcaaaagttgtcttctctattgtgtttcaaatatgggtgtttaaaaaattatataagcaaattaagcatttctttaatggtagttgtgtgtgttgttgatgcaaatgaggggtgcattccactataaaatctctgggactttataggaagatgtgagccttagaacagaagttggttttctagatgatcacgtagatatgatgctgaacaccagacaaagatgctgattgaagtgattttaaaaaattgtgtctgagttcagattttacatcaatatttagaaaaacagcaaaggaacttggaggaatgttctcatgcatccagttcagccccctgtccacatcttcataaaatccgagtgtgtgtacagggaggcgcattcctttccgttctcatcacaggtccttccctggctctgcacctgccctcttccctaccttccctatcttttccctcctgtgcggttctctcacaaagtgaatggcctcagccacagcttctctgcagctgcatcagactgtggcgacaggagtggggctgctgcaggggctgctgtccccacggagaccggtcttgcttgccgctgcagcctggtgatcatttagcaccggaagtatgtaattccgcacagtgagagccaacatgctggtgatggaggcgtctttatcatggtgctctgcatattttaatcttcggtggaaagtatggaaaagtatgtgatacctgtgatttgatgtcagaaggacgttgtgaacttgatgtggagtgaggatgttaaggtgcaataggcacccttggcttcattaaatgagacttccccatctccctgctaggcacgcacaggcatatggccacatcttatgtgttatccttatttagagtatgccttgtggtcatgcttaaagttacatgattatattcttcctcatagggtaggtccctaactgcattcaacacagaaatgtactcttgctgttatacatagaaagtgctttcatataccaagtgggagagcagtcctaaaatctgcgctggaatcgcagaaggaaggcattggaaagcaacagattccctagcccaaagctgttttttgatgaacatagaaacaggaccaagagaagtgaatttgcctgaggccctgacggtgtctcagggtagcatttgaacctagcagtttcttgacctatttctttaaatgattagtcgtgcttcctctgattcctatataaacgtattcctcactcattcttttgtttcagtgaattattgcaatgctaccacgtaacagtatttgagtcaaaatgttgcagtgtttatccgtttccaaggtttttagttgtacagtttttcaaagttgtgcttatagtttcttgttggttacaaggtaccctttcagaagccaattgtgtggtgtatttaagttgattgttagaggtagtttggttataacctacttggagtcgctggcgtgggcctgggggacaatgacagctgcctgcttcatgggcagagatgaagtaattgcttcctgggaagcaccatcctcctggccacactgtccagccgacttagtttgtgttggtttcctcacatctgcacgtttctggcttcatttgagtctcatttattttagcatacaacttcaggctgtggggaagaatggccattttagcacagagatgcgcacaaaggaacaattggctaaatgtgagcaaagacattcttgggggggtttcatttcttttattctgtaacaggcagtcttggaagcattctggatgtgtggcctcctctgtcacagttccttcttgcaggatcgcagatttttggagattttagtgataactgttatcattgagaatggcattcttgcaggctctaataagtcaggatttatttggtgttaatttgttaaagacaactgtatttctagccaaatacatgttggatgttctccttgcagagttgctgggggtatttgccatggcttagtcttagggaagcacatgcctttgaatgctgttgaagctgtgagtaaccaaaacgcacctgagtacttttgccatatgaggtgttagtcactgatacacttctcattcagacctgatggattcttgaccccttccttttttatttatttatttatttatttatttatttttaaagagcacaacccctcaggtggccagtatgaatctttggtgttttcagttggttgaagcctatttgccatctctggttcaaacatattcgaagcctgctgatgcttccctttgttattcttctgctatctaacctcggctcctgtagggttcaagactgtcagagctgggagccaccttcacaattaacagggttttcagaatctcctttatctagccctggggatggaagagatgttatcagaggtggaggcttattaggtttacatgccattgataatgaatgaggaggttttcttttatataagcggagcttcttataatgtgctttagtagggtaaagaagtttttgaggtctgcctttctcgagggaagataatttgtgatcctgcccttgttttcaacaaaaatataatttgcataccagtgcatgttgtattattgagcactgactgacaaacggttcttaactcgtcattcacccagccactgtttcttgaatggcatatgtgtgacagctgtagtaggaacttgctaggctccaggactaacccttatgaaacgggggtcctgggggaagcaaatgcgtataactgtaaaagtttgtgaggatatcagtgggggtgcctataggtgcaaaacttagttcattcattgccctatctaggaggttatgtgtcttagcagcatgttccataccaatgcatccgtctattaaaatattcatcatattattttgaaattctctgcttaggtatgtatttttcccactaagtttagaactcgttaaggacaggctgtggggtatgtattacttatatatatatacacacacacatatatttatatatatacatttgtgtatatacaataccattgtatatacacaaatgtgtatatatacacattatatatacatttatatgtttttatatatacacacatatatatttctccctctctatatacacacaccacacacacatatatatacacatacatatatatgaaatagacacacacacacacacacacacacacacactcacttctactgcccagcacagaaagacaaaactaggcaagggttcttttagtgttcgtgaaaaaatagatgtgcttagttgagagcgtccttaagttgccaggggaaagacaggatgggttcacaaagggagagagtgttttttttttttttttcttctttttctttgtttaactcttgaatttgaaataatccagacttatggagaagttgcaaaaatagtacagagaattcccgtatgctcttccctcagattgcccaaacatttcaccccatttgcactttctctttctgtggatataattttttttttctgaaatgtttgagagtggaaggtagaatgcagggtagggtgaaaggcggaaggagagaggtgggttgggaggctttttttttccccttctgagatggagtttcactcttgtcacccaggctggagtccaatggcatgattttggctcactgcaacctctgccttctgggttcaagcgattctcctgcctcagcctcccgaatagctgggattacaggtgcctaccaccatgctcggctaattttttgtatttttattagaggggtttcaccatgttggccaggctggtctcgaactcctgacctctggtggtccacccgccttggcctaccaaagtgctgggattacaggcgtgagccactgtccccggtgattgggaggcttttccagtaacccagagcactatgatgaaggctggacctggttgggaaggatgaggaaggtgaggagtggttaggtctggcacatactttgaaaggagagtttaagtggtttggatgattaaggatgatgtcaaggattttggcctgagtaactagaagactagagatgctgttattgggatggggaagactatgggaggagtgggttatagcagggggaatcaaaagtgcgttttgggcatgctaaatttgaggtccaaaaagagatgccacgaagtgttgcctgggtgcggtggctcatgcctgtaattccagcacttattccagcactttgggaggccgaggcaggcggatcacctgaggtcaggagttcgagaccagcctggccaacatggtgaagccccatctctactaaaaatacaaaaactagtcagatgtggcagtgcacgctggtggtcccagctactctggaggctgaggcaggagaattgcttgaacctgggaggctgaggtgcattgagccaagatcacgccattgccctccagcctgggtgacagagtgagactccatgtcaaaaaaaccacaaaaacaaacaaacaaaaaaaacaagcgctggggagaaaaagcagaatgcaagagactccaaagaagatgagtagttcccaagataggattagcggattctgtgatcaaggagaagaagcatctgaatgcacacagggctagcaagaggctgtagctgtagttgtgtgttcagctcatttatatggaattgagcctacagttcttacatgttttcctaccatttgttcgtaaacagcaggtcctcagtttgcataactgaatttactctgatgtcctgtttttcaaaattcatcatcaacagcttccttggaggtgtgttttcattatttttcatcacctctttgaccctctgtaagatgagattgagctcagcctccccaaagaaggcagttggaaatggtttggagttgagggtagagggccaaactgaagataaacatcatgggattggaggaaatcaccttgggagtggatagaattaggagaagaaaagagtctctagaccaaacatcttcagaggttgggaagagaaggggagccagcagagaccagccacgtaggtgacaaaaccaaaggaactgtttccagaggaatgggccatagatacaccgtttcacaccgtgtcacatgctgccaggcatcatgtgctgccgggcggttgggggctggggtggggaatggggactgagcattgggtgtgggggaagtgaggactgagccctgggtgtggggggagtgaggactgagccctgggtgtgggggggaatgaggactgagcattgggtgtggggaagtgaggactgagccctgggtgtggggggaatgaggactgagccctgggtgtgtggggagtgaggactgagccctgggtgtggggggagtgaggactgagccctgggtgtgtggggagtgaggactgagccctgggtgtggggggagtgaggactgagccctgggtgtgtggggagtgaggactgagccctgggtgtggggggagtgaggactgagccttgatagctggacttggcaacagggatgtcatcaagtgacttgagaagagctgttttacagaccatggggttgggaagggagtaggcagaggtgggaggaaggaagtcgagagtgatcagacccctcgttggaggtgcttgctttattttaggaggttcgtcatgtcggtgttcagtattatttagtttgtcttgtaacttctaagtcctcattctggggagcagattgacattccttagctggaaaaccaaaggtttatgtaaaaagcctcttttaatggtgggttatactgtgttttaggcattacaaagaaaatttgctccatagaaattggaccatttggattagttctataaaaaatactttctgagccaggcatggtggctgtaatcccagtttgggaggccgaggcgggcggatcacctgaagtcgggagtttgagaccagcctgaccaacatggagaaacccagtctctactaaaagtacaaaaattagccgggtgtggtggcacatgcctgtaacaccagctgctcaggaggctgaggcaggagaatcgcttcaacgtgggaggcacagaggttgtggtgagccaagatcgcgccactgcactccagcctgggcataagagtgaaactcccgtcttaaaaaaaaaaaaaaaaaaaaaaaactttctgaagaacacacacttccatgtagaagtggtaaagtgtgaatgtggtctttttgcttttttgaagcaaagatcactgagctgctaattcctaaaaccgctgatatttttggatggcagctattgttcactgagcagagctcgctctgtcattcattaggtttctgtccttgagtcctgagagttagttttctcacctgtaaaatgatagtatctactctggagacattattattttaaaaaactcgagtgacttgtttggaaagttgattggcattgcatgaaacatgtaagggaggccagatttggtttctttggggtggggaatagctacagattttgagcacttactatgtgttatgctggggagtagacaaagttacagattatctttggttaatcctcataaccgctctttaaagtggagattatcctttaagagcttttttttaaaaaaatctttaacagataataattatactgataatgaccgtagtaatttattggagacttcttacgagctaaggactgtgctaaatttaaattcttcacataatgacatttaaagaactgaccgacaagcctctgatgatcctcgtttttagaggtgaggtagcacagcactgtactcaaggccatgcctggcaagtgctggagcagagttccagcctcaaccctccaccaccgaagtctgtgttcattcgctgtgtccagatcgttctatcatcacatcctcctggagtctggatttcatccattccctgtggcagccccagccctgcgaagcgggtgtgtgagaccaacgatgttcttaatttgcttccattagcacactgacatatgttacccagagcctggtgccacctgcccctccgtctgtacccacatgcatagcggcggagccatctgcctggggagccaggggcagagagacagcaggccttccagcatccccctccctggagatcagcccatggcccttccttcccctcgtggttggagcttcaatcctaggcctcctgtcaggagccctcgaggcttttcctctttggcagcagaacctagggcccccatctttccagagatgacggcagccagataacgcaagagcctcatttcagacctacctcttcatcggtgggtcacatgatgcgaagggctggtgaagagaagggtggtgaagtgggtgtatagaaggagccaacacagttatggtggttggtggggcagacacagatggaccaggccccctctgtctccctgattctgcattctgaaaggagcatggtcacccttcacaaagcgggctggcctctcatagctaacagagtcccggggttgccgccgtcaccaggcttgtcttgacatgtacgtctcttctgcctcagaattcacgctcctctgtgctaaatgcttcttctgtgttagcgtcatatcctttgtcttcaggttttcctttttcgagttttgtcccctaaagacccagaacagaggtaagcaagctttttctgtaacagagcagagagtacatattgtaggctttagactcttgttgcgacactcatccctgctgttggagtgtgaacacggctgtaggtgatacataaatgaatggacgtgtctgtgttccgataaaacattattgacaaaaataggctttgggccaggtgtgggctgcagtctcccctgctgtggatggttgaggacatgggtgaacctgtgcacagatttaacccccactgttcccaagtcatttcagatatttttgaacttgacagtgtgaacgtcagccagaggccaagtgcagcgtttgggggcattgttcttactgtgctgtctcccttcttgaggtctttgctggtgatttgaactcagcctctgttgaagcctccagggctcgctgaggctgtgggtagaggcgagggaggcggcagcgtttgcattatttccttaaggagcattattgctggttcccttctacactggaaacaccctcgccctggtgtaccaaagtcagtgtggcttagggcctggcttctcaaagtgcgacccatggccagcagcgttgacaccacctgggagcatgttagaatgcagatatcaggcccgtcccagaagagtgagtcagaatctgcctttaacaagaacccccggtggtgagttgtgtccccaggaaaggttgagaagcacaggtttagggtgttccaagctggaggacagaaagtactttttgaaaatcctttaacccttaaccttttttttttttttttttttgagacagagtcccactctgtcgcccaggctgaagtgcagtggcgtgatctcggctcactgcaaggtccgcctcccaggttcacgccattctcctgcctcagcctcccaagtagctgggactacaggcgcccgccaccacgcctggctaattttttgtattttttagtagagacggggtttcaccatgttagccaggatggtctggatctcctaacgtcgtgatccgcccgcctcggcctcccaaagtgttgggattacaggcgtgagccaccgcacccagccaatccttagcttttttacgttaaaagtgtaatgtaactttagagcgtgaaggcagttttatgtctttttagacatcttacaagagtcatgattcaacatgattttcctgatggaaaggggatgttgctagccactgatctggaatagtgtaaaaagccatagaccagttagaagagaccaggagaaacggggtggtttctgcccccccggcaccggggctggtaaaaatcccttgatttcagtctttgtgtcttcttcattttctcatatatgttatgagatatactgagaggtaagagttcaagttcttatggttgaaatgctccagtttatctttttctggttgtgtgttttgatgttctcttgatggtctttttctccgtctgccctctgccatctcaaggagggtattttcatccgcctttttcctataggatcccccaccccgctgctcccccaccacatcccacgtttgactcatgggctgcaatttcatcccagctggctgaggtcagggtgcagtctcaaatgcgtcatggaatagtttggggtgttaccaatgatggtggtttgttcggtgggaaaggctgagtcttgggggttcgtgttctaggcaccctggaagctgctgtctccactctacccaccagatcccgtgttaatcagggtcagctttttatttaaatcatggctgagagatgcatataatcaagttcaagtgcaaaaagatggaggtgaatggggaatgtctgttctcttagttgctggacatgtggcatctcacagctggcagcatgcaggtccaatgattcccacctccccgtttctgtgggctgcccctcccccagtgtctccttggggaatgcagaggtctgtgaactgctctctcagtctggaacctcccactgctcctctgcagagcctgctgtccctgtggtcaggagcccatctgtcactctggacatctgcagagccttagatgttctgatggggcagttggcagctggccgggtcatctttcattccatgtcgagaggcctgtgtagttcttaagtgatgcttctgtacttagaaatggtgccggagcctcttttgtcccctactgaaatttgcccatccctgcagtgatttaggagaaatttgctcctgaccttcctagcctgtgggctcttcacctctctaaacttcatttacttcacccataaagtgaacatagtttgcttttttcttttttttctttttttgagtcggaattttgttcttgctgcccaggctggagtgcaatggcaccttcttggcttactgcaacctccgcttcccgggttcaagccattctcctgcctcagcatcctgagtagctgggattacaagtgcctaccaccacacccagctaatttattttgtatttttagtagagatggggtttcaccatgttggccacgctggtcttgtgaactcctgaccccaggtgatccacccgccttggcatcccaaagtgctgggattataggtgtaagccaccacgcccggcctttttttttttttttttttttttaatgagaccatatttataagttcaaccttccttttctttcccctttgttttttattccttcctttggattagaagactcactcatgaatatcaagatgtaacacagctttatgataatgaagagaatacaattcattagagcctgtgattaggaattctgctgtcttccttatgaaaaacagaattagctcttaatatgctcagccagtctgatgctattattacctaagtttaatgctgttgtgtagcaaaatctcttaaagttctatttacctagatctagtattatcagttagaatatatagtgtttcctgttgaattttacgtgaccttgaccagttaggttttctctctggtccttggttctctacctcggatgtgcttcttcagcccacagaatcctagtccgtgaagacggagaacattctccaccctgaattcactcacagcccctgctgtcagtcctctcccaggacacagacccgggcaaccgctcatctgcttcctggccctgcagattcctttgccagttctagaatttcaccaaaacagagtcagatagcatgccttttgggcttgtgttagcttcttttgcatggcttttcttgagattaatctgagttatgtgtgtgagtagtttatttatttttttttttggtaatttatttttcttgctgaaaaagattccattgtgtgaacatattgcaatctgtttatccacatgcttattagtggctgcttaggctgtgctcagttttgggctgttatgaagaaagctgccattgtttttatgtagacacatgcagtaatgtctcttaggtaaatagccaggagtggcattactggatctcatggtacgtgtacatttaaatttacaaaaaactgccaaactctgccttcccaccgggaaagtgggaggattctagttgctctcctgttttgctaaggcttgatatgatgagtcatttgaattttaatcattctggtggatgtatcagggcatctcattgtgattttaatttgcattaacctgatgactcatgatattagcatatttttatgtgcttattggccattcctgaaatgtctgtaaccactttgcccattttttattaggttgtttgtcttcatgtgtttttggtattcagtgtgttgttacaagtgctgtgtcatgaaatgtgtattgcagatattttcttctgattttcttaaagattaaaaagttcaatttatttttttcttatatattagtacttctgctgtaagaaatctcagcctatctccagagtcataaatatttttgcctatgttttcattgagacgtcttatagttttatcttttatgtttaggtctgatctatttaaggtaattcttgtatttggtacgacgtaaggagtagagtttagttttccccatactgacatccagttgttcagcagcatttgttccaaggactgttttttttccccattgcattatcttggcatctttgtcaaaagtcagttgaccgtttatgtgtgggtgaatttctggactttgttcaccaatctatcctaacaccaataccacactgtattgataattgtagctttattgtaagccttgaagctaggtaatagaagtgttccaacattgttctttttttctccacctcgtttggccaatttgtgttctagttctttgttctttttgtttttgtctattttagaattggcttcttttttttttttttttttttaacaaaaattgctcctgggatcttgattgagattgtgttgcatctatagatggatttggggcagagttattattttagcagtagggattcttctaaatatagtatctctctttttatttatggtcctcccaccagacatagactggtgttttcttaacagcatctcatagttgtcagtttatagattgtttacatactttgttaaatttatcctaatatatttaacatattttaatactattggaagtggtactaggttgcttttttccttttctttcatttttcaattgttctttttttttaaaaaaaaaaaaaacgcttcattgaggtacagttgatgtacaataaacctcacatgtttaaagaatagtttgatgagttttaatcgtaaagtgagataaagaatatgaaaaactttagtttttatatgtatgcctttttttttttcttttttttttttttttgggatggagttgcccaggctggagtgcagtggtgcgatcttggctcactgcaacctccgcctcctgggttcaaatgattctcctgcctcagcctcctctcccgagtagctggggctacaggcacgtgccaccacgcctggctaattttttgtaattttagtagagatggggtttcaccatgttagccaggatgatctggatctcctgacctcgtgatccgtcccccttggcctcccaaagtgctgggattacaggcagatgccttttattagatttactagaaaacaacccccctgtattcctcattttagtatctgctaatatggtgaattatacttaatgattttccagtgttaaaccaaccttgaattccaagggtaaactccatttggtcttaatgtgttatcctttttggatattatttaatttaatttgctaaaaattttgttaatggcaggcacaatggctcatgcctgtaatcccagcatgttgggaggctgaggcgggcagatcacttgaggtcaggagttcgagaccagtctggccaacatggtgaaaccccgtctttactaaaaaatacaaacattagatgggggtggtggtgggcacctgtaatcccagctacttgggaggctgagtctggagagtctcttgaacttgggaggcggaggttgcagtgagccgagatcatgccactgcactccagcctgagcaacagagtgagactctgtttcaaaaaacaacaacaacaaaaaaaaactgttaacaatttttctgtctgtgttcatgaggtgtgttagtctgtttttggttccttgtaatgtcttttttctgagttatttgctggcccttccctttaattttctgcaagagtttgtagaaaattgtattacctctcctgaaatatttgctagaattcactagtgaagctgcctggggctggagttttctttaatatagagctgttcagatagtctgtttattcttttccatttctgaaagtttgcatcttttaaggaatttgcccatttcatccatgtttttgaatttgtgggcataaagctattcataatatttccttatggtcatattaatgtctgtacctgtgtgacccatgtcccctctctccttactgatccttgtaataggaggagttcagaatttattggtgggtagcctcctagccacacattcagagcaggtggaagtgtatttataacagaaggggtgaggagagttgctggggaaggaagagcagttaagacactttgtgttttggtgcgtttaggtgaatcataatgtcctttctgtagattaaataacttgtttttctaaaatgtcacaatttcatttttgaaaatccaagtttttgtgttgaaacaaagcattcctgaaattaataattgttctttatggggctgggcgtggtggctcacgcctgtaatcccagcactttgtgaggccgaggtgggcagataacttgaggccaggaatgaaagaccagcctggccaacatggtgaaaccatgtcactaccaaaaatacaaaacttagccgggcgtggtggcgcgtgcctgtaatcccagctacttgggaggctgaggcaggagtatcgcttgaacctgtgagacagaggttatggtgagctgagattgtgccactgcactctagcctgggcaatggagcgagactccatctcaaaaaaaaaaaaattgttctttatgaaataaaaacaaatagtatgacaatttaaaaaactataatagcataatcgtactaagccagaagaaagacaaattcctcctttgtgtctaagaaaatactgaaaccatgtgttgcccagtaagagtatatgcgtacgtgaatattctgagtttaagtttgcagtgctggcagtgctgatccttaaaatagtaatataaaaatgatttaaagcctcataaatgctcattccaaatggttacatcattatgctatttttggctcaattggttttacatttgaatactttttaacattatattggtggctttgttccaactttgatttattttagcttaattgatttgtcagagtagaaaatcagagattttgaaaatttgacataaaattgttggttagatgcattttcctgtaacacccatcgtcatttctgtgtgtttatatttatttgcgtactgcttgtctctaacttgggatcacgtttgctttgcttattattgggtaccccacacttagatacccaaatattttgcagtgacttaattgttcttgtttttagtgaatgttcaaaatatgtgacaataaatagagtgtaaatttgcatttcctctttccattctcctgttcctatcattctttgccctctcttgactggtgtgccccttcctactccagtctcccactccaccagttcatctttaaagctgcctctggaagggtctttacaaaagtggagatccatcaatgccattttttctagaaaccttttgtgattcttcctttcctagaataagggttctgtgagtccaggtatgtgtctgctgttctaggttgtgagcccttggatgtcaggggtaacatctcacttgtctttaaattctgagttcagtgttgtgaacatagtgtttaataacttgttactgaactaaattgaccttctgtaaatggaagggaaacactgtgctttcgatatcatatttaaagcttttgttagcaaccagcctggtttatgtcaataaccttctcccagcctaggcatcaggaggtctggcttctgtaacccattatcacgttctgtatattattatgataagcaaaaaacatacccagatctaggtcctgttttttgccttctacagaacaatagaaggatattttccatcagggcttgtatgtccatccattaattaatctgacttttaagggtcaggctaatttcccgaagtaaagtgttctgtggagtttacaccagttcctttgaagactccttgctggctccttagaattcagaaaggaacattcccaggacctagaatatacacacatgcacagatcccttttataaacacaggctttcctttgggatattgagaaatcttttaaagatcccactttcagagttgaaactgcacagcgattgtcataggttctgttgagacactggagagctataaatagatttgatttgctttccctttttaggtgcaaattaaactactgtaaattgagtgtccccaaagccagaggtttttatttacagcagtccttagacgttcattgcagccttggtaggcacataactgttattatccccacattatacattacggaactgggaatcaaagaagtttaatgacttgtattcaaaatcatccagtcgttcaaataatggtcatcaaaaagaattttagatgcagtccagctgagggaagctttccaaccagacagtgcctaaagctatgctgctttttctgagatttcttagatctacctttaagcagcgcatttggatgatctgcggaggcctgtggaaataattggaagagtctgcatggagagtctgagctgtaaccctataagggaaaatatgcaaggaccatgctcgaacacagctcctttgcttcagtgccactcgagttctgataccctttggaacaccgagtattctcacacagagaggaccctgaacaggtggtgatcaacttgctcgagaaaaggaattcatcagaattagtctttcaccacgaatttttgtatgttctgagactatcacaaaagacatggttactaagtatgagaggacaagccatggcatctttctctgcaattttctctttgaagcagatctcaggaatgttgtctattatggagaactggaaacataaaagtgaattaattcaacaaacatatactgagtgtcatgttcttgtttccacatcaggcatcgtgcttgacattctgggcaaagagagaagtcacacagtggtccctgtcttccaactgtctactggctagtggaggagacagacaaattagcctgttattacagcatagcgggagagaggcggtgatggtcggcctgaggcgggggagacgcagctgagtcttgaagtgtagcacctcagtgagacagccaggtgaaggaaggtgtggtagtgatgtgtgtgtgggacgacgcagggacacacagggttaagcataccgggcagagagcagtggcacgtgcagaggcctggggcagaagcaggcgtgatatttgtgggaaactgagggattgagaaggcctgaagtgtgacacataagcagagtggaaagagacaatctagaaaataagcacagtccaggttaattaagatttttatacaggatccggagaagtcactgagaagagtgtagcaaaccagggtgatttttctgaaaagcaggttggtcatggtttgggaactgtttcttaattggagcctgaaatctagagagcgatgagatgagcttttgtgaaacagttctccagcgtcctgcctttgtcaaagaaaggtgtaaccattgacccagcctctcctctgcagagagtcagcataaagcacagaggtgtggtgggccaagaagtttagggaatgcaccgtgtgtatgagttcactgctaggcagggcaggggataggagtccgtaatccatgtttgtcattctccaggagctcatactttttgtaggcacattgatcagtcttttctttttacatctgattttgagtcagaattagaaaatctttttccacacccaggttataaaagaattcatctgtttcttctagaacttgagttgtttcatttttttctgtttgggttttcaagtatctttagagtttttctggtgtacgtaaggtaaggagtttcatcttttctttttcccaaatagttaccagttgtcccaaccccagttattaaggtgacaatttttcttatatttctctgtgtatttgggtctattactggactttttattctgttctatggatccgactgggaatttaaatacgttagtatcaaatggttttaatgatgagcctttattatttttaaatagttggcagggctggctattctctcttcattgttcttagacatctctgcattcttattttttccatatgaaatttagaatcaatttgtttagttccagaaacaaaacaaaacaaaatttgttgatatacgggttaggcctatcttgcattgctataaagaaatacctgaacttgggtaatttctaaagaaaagagatttaattggttcatagttctgcaggctttacaagcatggtgccaacatttgctccgcttttgggaaggcctcaggaagtttccagtcatggtggaaggtgaaggggggagcaggtgtctcacatgacagagcaggagcaagagagggagtgggggagttgccccacacttaaacaaccacttttcctgagtgggactcactcactattgcaaggacagcaccaagccatgagggatccacccccgtgacccaacacctcccaccagccaggccccatccccaacactggggattacatctcaacatgagatttggaggggacatccaaatgatttcagtgtattattgctattgctcgaaatatatttgttaacttggggagaattgacatctttttgatgttaagttgtcctatccaaaggcaaggggacatctttccatttgttcacatttacttcttcatctttcaatcaagttttaagttttccctatgtaagttttgcgcatttcttgctaaattatttaaagtagtttacttttttattgttttataaatgggtgctgatattccatgatatcttctagctatttattgtttgatataaaataagcatgcagaaagctacagttttcacgtctcctgctttaccaggtttactttcacatcagctgccaatagaaataattttttttaagtttctgattgttttctcttttcttattgctttgactaacacttctcctacagtgttaaaaagtagtgggggaaatgggcctctttgacttgtttctgaccctactgggaattcttgaagtgtttcctcattaaataagatgctgtttttttgggtgtgggtgttttaatcttagtacatgtattttatcaagttaagtgcctatcaattccaagtgtattgacttaaaaatatcaggaatgattattaaattttgttgaaggctttttcatgatctgtggaacaattgcattatcttctcattagataataatatggtgaatatatcagtagattttctttctgtctttcctcctcctcctctttttttttttttttttttttttgagatagggtttcactctgttgcccaggctggagtgcagtgatgcgcttatggctcaccgtaacctcaacctccctgggctcaggtgatcctcccgcctcagcctcctaagtagctgagactacaggtgtgtgccatcacatctggctaatttttgtattttttatagagatggggttttaccatgttgtctgggctggtctcaaactcgctggctcaagcaatctgcctgactaggcctcccagagtgctgggattacaggtgtgagtcactgtgcctggcctattagtagattttctaatattgaatcacctttgcatttctttttgagatggagtcttgctctgtcaccaggctggagtgcagtggctctatctcggctcactgcagcctccgcctcccaggttcaagcgattctcctgcctcagcctcctgagtagctgggattacaagcacgtgccaccacgccctgctaatttttgtatttttagtagagacagggtttcgccatgttggccaggatggtcttgatctcctgaccttgtgctctgcctgcctcggccttccaaagtgctgagatgacaggtgtgagccaccgcacccaccctgcatttctagagtgaatctcatttggtaagggcatggtagtaatgtgtaggcttctgtttgctaaaattttatttaggatatttgcactgatgtaaggaaaagtggtctttggttttcttttttgtgctatctctattcggtttagatatcacatttatatttgcttcaaaaaaaaaaaaagaatttggttatgttctgtgtattttatcctctggaacaatttatgcagtagccttggtgtttaaggtttggtagaattcccctgtaaaactacctgggtctggtgtttttttgttttttgtttttttgtgagggtaattctggtaaattatttttttcttacgaaatttcttatgaaattaattatctatttaacctagtttcaagcgtatctgcatagagttgcacagaggagtctgtcatgacttttcttgtggagggtgtggtacttactttaggacttcatagttttagaggacaggaggtatggggtcgtgttcattgactgcattcannnnnnnnnnnnnnnnnnnngggtcgtgttcattgactgcattcatggatccccgtgtcttaaagtgaagttccaacaagatgaacatgtgctaataatgacggttgtagttaccactgatgaaatgcttggctgtgcatgtgtgttagctcatttaatcctcatgatgatgctgagatatataatatccatctcgctttaaggatgagataatttgggggggctacttacccaaggtcacacaactaggaagaatcagctgggatgtggatccaggtttatgtggtgacagagtccaggtttcttttactttttcttttttttttttgagatggagtctcactctgtcgcccaggctgaagtgcagtggcgtgatcttggcacactgcaatccaccacccggattcaagtgattctcctgccttggtctcctgagtagctgggactacaggcgtgtgccaccatgcccggctaatttttgtatttttagtagagatggagtttcgccatcttagccaggctaatctcgaactcctgacctcaggtgatctgcccaccttggcctcccaaagtgttgggattacaggtgggagccaccgcgcctggcccagagtccgggtttctaaggagcagtggaggatgagggccaaatgagtggcattggcagggatagaatgatcagggacggcttcaccaagaggtgggatgtgagctgtgctcattggcattggcagaattcagaggggtgaggagaggtcagggaggtgatgccatgtgggggtgcctggcaggagaggtagccttgactcaagtggcgggtgctatcagagggtcaccccatgagggccagcaggttggaatgctgggggatgagtggtgtagactagacaggggagcggggacgtacagagggagcaggaaaattgggaaaatgcacatactgttcccaccccccaatttagattagataatggggagttgcctgggtctaggtcctgggagtttctatagcgggttagaaatttgaagggaagaaccatatgggaaggatcacagataaaaatagaaaggaaatcaaaaggccaccagcaactgtgttggttgtagcaaggcccttgagtgtaattcaggatgcaaatagcaataggtgttttgcacatcagtaaagtgtgaagcctgtggggaatatggatgtggcagcctctgcagagcctgtcgcccatggcaactttccccgtgtttctcagatgcagcaggaagtgatgggtagttcatagtgttttctcagagccagtaacagtagacatttctttctcaggtttgtaggagagcggagacagacaatgctttagcctcctcagtcttggagttcctgtgtgaggaagacagttccgtgcacagcaaggaacgctttgactggcggtctggtcaccccgttcccggctctcacccctttaccaatgctttgtgactccaggccgcctttcttctctgggcctcagttaccacacttgtgaaataaaggcatttgggccgggtgcggtggctcacgcctgtaatcccagcactttgggaggcctaggtgggtggatcatcaggtcaggggttccagaccagcctgaccaacatggtgaaaccccgtctctactaaaaatacaaaaattagccgggtgtggtggtgggtgcctataataccagctactcaggaggctgaggcaggagaattgcttgaacccagaaggcagagattgcagtgagccaagattatgccactgtactccagcctgggtgacagagtgagactccgtctcaaaaaaaaaaaaaaaaaaaaggcatttgggttccagggtccctcctagctttcaaatccatgattgagtcatgaaggtaaataaagaaaatgcctttaaagtagttttggttcccacaaaccataagtcatttctttgattttgttgaaataaatgaactcactgcccggcctgagccagagagattttctgtaaatagtgaagggattggttaagcaggaagtgtgtttgctttgttgaattctttgtctcctgggatgtctagttctaattcttatttcccttgcttctttagggctgtgggatataccacttgagtgaaagaaagcagaaaggctgggcggcggggcgcatgtctggaatcccagcactttgggaggccgaggcaggccgatcaatttagcccaggagttcaagaccagtctggcaaatagtgagaccctgtctcttcaaaaaatttaaaaaattagttgggcgtcgtggtgcgtgcctgcagtcccagctgtttgggagtgtgaggtgtgatatgtgatcgcatcactgcactccagcctgggcaacagagagagaccctgtctcacaaaaaaaaaaaaaaaaaagcaagcaagcagagataattaattagtccaaagaggccttttgctaggaagaagggagttttgcttttctaatgtataaaatatatgcagaaacgcctccaggtaattttgccgtcactttgggaatgctaaattccgtggtcagatcttttgtttggtgtcggtgtttggggaagattttttcttctggaattcagtgatttattcctgtgtccttgatgccagtctgtgtttggtgacctcgccattctgtccagaacagggcagcaggtgtcggggctggggtgtcgaacagaggaggtggttcacgtgtagatatggctcttgttagcttgctgccttggggcagccacatcacctctgttcatttgattcctaccgtctgtaatatctcaatgatgattagattgtgaggctcagatgagataaaatgcagacagttattttggatattggaatgtgactggttattgtcctgtgtgcagaaccctctggccagtctttgggctgtgcagacgggagaggtgagtgggctgggcccttgcttcagtctttccagttccctgagcctcagtttctcctcagtacattgaggaagttgggtgaactatctacagctgttcttccaattcaaagatttcattttttagtgtaagaactattagtaaaataaacatgtcaaacacaatttgagtaatgaccttgagggatataacttgtgtagctagcctgtcctgtgtggtgggagataggttatttgaacgtaacctatgagggatgtaacctaagaggcattaggagcttcttccaccgggagcaaaatttagagagtcagtgttacggtataaaaagtagtgacagctggttctgattcccattctggctcttatttttaactgtgtgaccttaggcaaaaacgtaacctttcttagtaccagtttctccacttgtaaaaatggtgaaaacagtgtctatcttgaaaggttattatgaagattagttaagatgtctgtaaagcacttagcctattgcctggtacatggtcagtacttaacggtagctggagatttctattaaacatcggtaaggagcttcagagaccacggtactttctaggggaaaataggagagcctgtattgtaaagggagatttggctggaggccctggaggaaaacaagggcacctgttgttcttgaccttggagaagcagctcctcctcctgatagaaggatagagcctgtgtcgggcagtggaaaggtggatggtgaagataagtctgaggtggtataaggggaaggccactctcggaatacatcagtggaaactggatccgaatgcctggactcctggatcttccagagagcctgctgcacagctggtaagaaacagcaatagctctggagggtggagaggagacgtgggtgtcctacacctgctgcgtgtccacagaccagagtagtacgatgccaccccctgctcaggcacacatatttcaccagacctttatttataggaaaatctccagagtgtgtgttggttattacccttagatcttaaggggaaagacatgtttgtattaaaagtttaaaatggagaattggttgcaagaacttcttcccttcttgctttggcgccgtagtgagattttggtacgccatgcccaccagccatgtgtgtttgtgctcactgcttccatgtgtgtgttctgagcacttggtttatgttgaacgtagtcaggcaccagcagagatacagagatgcaccaggagctgcacctgcgtcctgggaactggcgatatgggggagccaggcagctcaacgaagaattgtgctacctctaaggttactctgtagtctatgttgacatttcttgttcattttcctaatttttttcgaggactaaattttatttggtcacactattgctctttttaaatacaaaatgggtataacgtctcatcagactagggttatctctgaaaacagtctgtggaattattattatgaaatgttcaaagcagggcttttggactcaggtttgagttcagattcttactgtgttatttatgttctagctatatgactgtgagcagattatcaactggagaggcttggtgaccgtaggcagcctttctgtgtctgtttcctcacctacaacacggggataataacagtacgtgcctcctagcaatgttgtgaagagcacatgagttcatatatgtaacaggcttagaacagtgcctggcacttgtaatcactatgtgaggatttgcttaaagaaaagcagactaaaagctgacacaggagttcttattcctctgctgtagatggggcgcagtgcgtcttcgctgcattcttgtgagaatcaaatgagctattttatgtagatgccagcacagtgcctttcacaggacccgttgtgagaaaatggtcattctcttcctgtggaagtcactcatttgaaaacctttgcatgctttctgtgcagaatgtactgctaggctgctgtcaggtgttaggagataaacataggatgacacctgcctttaaccagttgactagctaccttgagggaaaaaaaccccacaaaaacccaagtaaaccttaagatcactaagtatccagtcatcagtacagctgctacaggaggaatggattttggtaattagggaagacttcagtgagggggagccaactggggtgtttaattagagaaggctggaaggctggaagaaagaggggatgagtattaagtatttggaaagactgtcaagtagaaaatatggtttatttagtctgtgaatatcccaaaaaggaggagcttttctaacaattacaactgtctgctatgggagtatttcgctttctgaggcgctagagagctgtgttttgagaatcttttggttacagtttcaggtgaacagaaaaccacacagattagcttaacaacaatacaatgaaatgaaaatttattagaatgatacaaatatttcttggaattcaagtgcagcccagttttccgagtagctaacaacaggcccgggaaagcctcggagcatggtcggcgtctgagacacttcctctcttgcggggctgcctgcctctgagtgtgccagcttctgagggtgtcacctctgtgtgttcgtcctccagtgctggcttctgtcctttgcacccgtgtacttgcacttgccctggttgctgcatttctatattttcagttcaagagaccatcccaaccgaatcctgtttcttagtcttcaggcaaaagatagaggaatggaagatctgattgactgtcttggaatccggccgtccaattaaccataacctagtagtgggaggcagtgtgcaggaccttgcagtatagcagtggctgctgaaagtcccccttgtggttgaggctgctgttctcagaggagaggatgggcagataccttggccagggccacgacaaactcccaggctctggagggttttgcacagcggcctcatggtcgcactgtagagggagctcaggttttaggtggcaagttaggatcgatgcatccttaggttctcttcagatagttccatgctgttaggtggaacccaagcaaattctctttccttttttaaattaaatatgcatagcatacattttacctttttaaccctttttgagtataaaatttagtgtcattaggtatattcaccatccatttccagaacattttcatcatcccaaactgttaactctgaaccccattaaataataaccctacattctccccaccactagcccctagtaaccactgttctactttctgcctctatgaatttgactactctaagtactttatataagtagactcgtaatatttgcctctttttgtctattttaacataatgttttcaaggtttgttcatgttgcagcatttatctgaatttttttctttttaatggatgaattatatttcattgtatgtatataccacatttcatttatccattcatttgtcattcattttctatcttttgacattctgaataatgctatcagccccccgtcccgccccccacctccattttttttttgagagtcagggtctcactctgttacccaggctggagtgcattgactcagtcatggctcactgcagcctcgaactcctgggctcaagtgatccttctgcctcagcctctcaaagtgctgggattacagacgtgagccaacatgcctcgtccatttttaaagtatagatgagattgcttagaatcaagaaattgattaatgaaaaagaccttaattgaaaggtgtacttagtccaacttcttcatttcatagaagggaaaatcgcccagctggaaagagtgaactgctggtgccacatccacctacttaagctcatttaccatttctctcccgcttacctaaaatgatgagagccttgatggtgcacggcagcctcagtatggatctttaatcccgaaggatgttgtagacttacagaatagtagatttggaagaatcccacagacgagcagctctcaaacttttttgcttaggctttttgcatgaatcattttcattatgcttttgtcagttgagctgcatgacctatatgactgacaataggtaagtgacgaataaatgaatgaagatcttaaagtaattgcctacatcagcagatctcagatctgaaactttttggtctcaaaatatattttgaagaccttaaagagctttatttatatgattatatctgtaggtacttaccatattagaattaaaattggcaaatttgaagatatttattcattaaaatatcaataaacctattatgttaacataaataatatatatttatgaaaagtaactgcatttaccaaaacatgataattagaagagtagcattgttttagacttttgcaagtatcttttgtatctggcctagaagatagctgattctcatatttacttcttcactcagactgtgtgagatattatggtggaagtatgtgaagaaaatctaggctgggtgtggtggctcatgcctgtaatcccagcactttgggaggccgaggtgggcagatcatgaggtcaggagatcgagaccatcccggctaacatggtgaaaccctgtttctactaaaaaaaaaaaaaaaaaaaaaaaaaaaaattagctgggcatggtggtaggtgcctgtagtcccagctgctcaggaggctgaggcaggagaatggcgtgagcccaggaggcagaacttgcagtgagccgagattgcaccactgcactccagcctgggtgacaaaggaagactctgtctcaaaaaaaaaaaaaaaaaaaaaaaaggaaaaggcaatctgacctcccacagataggtagttgggaagtttttcagtagccttttcagaaaattgtagacattcttctttgatactacaccaaaacttgacaagtggcggtttcctaactgttagttgtgatgtggcatctgaagctgtgccatcctctgttacattagaatagtttagtttattttgctctttaggtggatcttttacccatacatgactttgttacatcatggttcactgagttgtgcagatcttccaaataaatgtcaacatatgacattaggcaatataaatcacatttgttcatgtcactgctgatctcagtagaaaagcctccagtattaggaggcagtaagctcttatggggtggatacaaagtttnnnnnnnnnnnnnnnnnnnnnnnnnnnnnnnnnnnnnnnnnnnnnnnnnnnnnnnnnnnnnnnnnnnnnnnnnnnnnnnnnnnnnnnnnnnnnnnnnnnnnnnnnnnnnnnnnnnnnnnnnnnnnnnnnnnnnnnnnnnnnnnnnnnnnnnnnnnnnnnnnnnnnnnnnnnnnnnnnnnnnnnnnnnnnnnnnnnnnnnnnnnnnnnnnnnnnnnnnnnnnnnnnnnnnnnnnnnnnnnnnnnnnnnnnnnnnnnnnnnnnnnnnnnnnnnnnnnnnnnnnnnnnnnnnnnnnnnnnnnnnnnnnnnnnnnnnnnnnnnnnnnnnnnnnnnnnnnnnnnnnnnnnnnnnnnnnnnnnnnnnnnnnnnnnnnnnnnnnnnnnnnnnnnnnnnnnnnnnnnnnnnnnnnnnnnnnnnnnnnnnnnnnnnnnnnnnnnnnnnnnnnnnnnnnnnnnnnnnnnnnnnnnnnnnnnnnnnnnnnnnnnnnnnnnnnnnnnnnnnnnnnnnnnnnnnnnnnnnnnnnnnnnnnnnnnnnnnnntttttttttttttgagacagagtctcccactgtcgcccaggctggagtgcagtggtgcaatcttggctcactgaaacctccgcctcccaggttcaagcgattcttgtgccccagcctcctcagtagctgggattacaggcacatgccaccacgcccggctactttttgtatttttaatagagatggccatgttggccaggctggtctcgaacttctgaccttaggtgatccgcctgcctgggtctcccaaagtgctgggattacagacgtgagccaccgcgcccagcccaagtagtttttttttttttttttttttaaaaaaaaaaaaaggaaaaaaaacctgtgagtatatggtgaaggatatcatgaccgctaggatagtttggtgtcacttccttgattcgtgctaagatgctagcagttttaccttggcatttacaccattaatgcagaaaaaggtgaataatgtcttagcattctgaaaatagtttgggcctcgggccttgtgggctccctgaaaggaggagttcacatccccagaggctaagatcatcatctacaaactgctgacctaagccagcattccagtcttgtggatatcagaggaaaagtcaagtctaccatcattctagaaggaaaaggcatggtgggaattcagcacctgaacttgtatttacaccagcctcggcatctggcctcctttgtgctaactgcataaacatgctcacagttgtcctgggctggagccagctttgcaaaagcagagagctgggtgttgagtttctgaaaccatgccctactggttattagaaaactctttggcattttaaactcccatctccttcttgacattgaaatttaatatcgtggaattgacaccaaatgatgacgtcaggcctttgggttgtcacaccatctgttggcagcctggctttggagcttctcccagttgaattttgctgccttaaagcagaagcaaaggagtagtgcatttgttaagaagaagacgcctgaatcttttagtggacctgctttcagcaaacttgttttttaggtcagaatactatatccaatgatcaagctaaacatgaaatgcttcgagtaagactcagtattcatactttgacatttgcaaatcactgggtctaataatactcttcctcttttgttgtcagcaatggaagagttaatagttgaacttcgtctctttcttgaactcctggaccatgaatatctaacctcaactgtcagggagaaaaaggcagtgataaccaacattctgctaagaatacagtcatccaaaggtgagtctcattctgacgcctgcttttccttcttacagtgtcttggcttctaaatcgtctttaattttaccacctttctaaaatatatttatttgttctttaacttacaagcttatttattcatcaagttttcattgagggtttacacttgtgccaagttctgtgttagcctccaggtgtagaaagataaagctttgaaggagctaatggaatcgtgttttgggagtcctcagggcaaccccagcgtttggagattacctggaaggactcacgggacttggcatcaggttgttcttcctcgtgtgcaggacgcactgcagccgtagtgaggatgcacagtccgactggcagatcggaagggagaagatgtaggcggaacatggaggaacccatatgccagcgtctgtgtgctctgtccctcccacgagggtcacacagagcacacgctgtcctcagcaataaaaacgcagcaagctctgtgcgacatttccattcaggctcatcagagactcggtgtccagggtttttacttgggtccggtcctctaggcaccctctgcctatcacacaccagaattccaggacaggcagggtttcagcacaactgtgttgtttacacaaacagtacaggcacagtgaaccacccttgtccatcagggaatggtgggatcacttctgaaatccacgttcccagaggccagccagggccagccttgccagcaggcccctctagagagagcagctttgggcctgctacattaactctttgatgcacagtgagcaggacaataaaaagcaggcaataagaaagcctgctaagtgctgctgtggagagcatcagagccttatgagagcacctgagaagcaagtccacaccagttgagtgagagaccggggtggtggaaggtccgaggggcagttcctggatgatgggatgtgagaatcttgaggactctatggagatagtctgccggatgagatggaggatttttcttttaaacctctttattgagatgtgattcacaggccatacacttcaccatttaaagtgtacagttcatttatacttttacatgaattcttttagtatatgaagccatgtatgacacgattagatttgcattctggaaagctcacctggccagtctggaagatgggctgaaggatttggtggcagtttgaacgtgggtggcttggggaaacctgggtgggcgatggggcctgccacttagataagaaagcaggatagggaccctattctggggtaatatgaaatattaacttttttttttctttgagacagggtctcactgtgtcacacaggctggagtgcagtggtgtgatcactgctcactgcagtattaacctcccaggctcaggtgatcctcccactgcagcctccctagtagctgggactacatttgtgcacaccacaacacccagctaggttatttttgtagagacagggttttgccatgttgtccacgctggtctcaaactcctaggctcaagcagtctgcctgcctcggcctccaaaagtgctgacattataggcatgaaccattgcgcctggcctgaaatgttcacttctgaagtaattttgttacttccctgctcagactcttggatctgtcagcctttgcctctggtcacaatccagactccttcggccatcccacaaggccctttatcataggtggttatgagtatgaacttcaaagttaaactgcctttttgattctggccctacctgttaccaaacatgcaacctttcacgggttacttaagctttttatacttcagtttcctccgtgtataaaaagggctaatggtagtattgacctcatgggatgttgtgaggattgaatgagacggtataaaatatttcaaaacagtgcctgatgcatagtaaacacgtcaggtattgatgaccacttgctttcccctgatttcctgtcttttccctccgcccagtgagctccagcactggtctcttcatgcctccttctggatgaatctcctgatatttttcaattcatgaattctttcttcagctctttaatttgctttaaacctatctattgattttgtgtgtgtgtgtgtcatttatccttttcctttcttgcttttgtttgtttgcagttctctaacgaagttcttttctccattgcagctcctggaggtcaggcactggggcttttcatgtttcaatgcctggcctctagtgtagtactggacccattataggtgatcgttgttaagtcagtatttttacaggcctttccaaatgagtgttaggcatacaaatagtactgtgcccaaattaaaacttgtttcttcctctttcctgcctgcactggtatcgtgttcatcacctttcctagtagtttgttgtgtatctgtttgtctttccaacttaaatatgagtgcccaagacatgtgagcttgtatcagtcatgtcttccatacagtatgtctattacagtatctgactttaagaagatacttaataaaaatttattgattcccaggaaggtgtctgtcctattactacatgggtaagtcctgcctgccctgagtagaagttgagggggagcagctttccctttgaggtgcagcacggcactgaggagcatgcaggctctggcactagtgccgccatttccatctatgagtgctttcattgatttcttacaccccttccccttcctccttccccttcctccttccctccatccatccctcccttccttccttcctcttttcttttctcttttcttttcttttccctttccctttccctttctcttttattcttttttctcttttctttccgtttccctttccctttctctttttctttctcttttcttttttcttttctctttccctttctctttctcttttcttttctttcttttttctttccctttccctttccctttctctttctcttttcttttcttttttcttttttcttttctcttttctttccctttccctttctctttctctttctcttttcttttctttcactttatttaagctgtcggttcttcacctgtaaaatggagaagaataatacctaaccttgcaggactgttgtaaaggattagagaaaataaatatttgcaaagtgttcaacacagggttcaggaactgatagatgctagtggtacccttctcatccccatcctcatccagttctgtggttctggttaattcttacaggttttgatgtgaaggaccatgctcagaagcaggagaccgctaacagcctgccagcccctcctcagatgcccctgccggagatccctcagccctggctggtgagtcaaggtcccaccatctcagtggtcatcgctggaggcctgggggtacttacgggctccaggggcctgtgatggaagcccggtgtggaagaatggagcccttatttgtctcgaggcactcctttgagtatatttctagggctgagaagctgtgagtgatagctagttggtagactctaggtgtagcctccccttaggaagctagcatttctttgcactgcctcacaccaccataaattacctatagcaggagctacagggccacagacatcttttcttacgtcagattaagaaaaacaaaaattaggggatttagcagacaaaagtatctgtagaccttgtggacttgactctcttctgagttaattctgaagttgaataccttattctgaaactttaatagtcattgttagacttcttctggggttaactatccatattgtttccaagagagaaaaatatgtacatatttcgggaatgtatacttcagttttatgcattcaaattcaaatttgttgtttttttttttttaatctggcgattccctcatttgcaaacttttatgtaccattcagctttttctatatttggctgttttctaacttgtttactcgaggaattcagagtgtcattcaaagttagggcaaaatcagtagcaattctctttctgtgtttgctttcagtgtgaatcatctgatgatctctctgccaggatacgaacggtgggaaggcagggccgtttcttgatcacccccgctctgcctgggcctgccacagtgctcaagagtcttggagggactcagggcttctcactgcagtgggcacagagggaaacaagcacttactgggttcctggcacacagcaccataaattacaactcattaactcccacaacttggcctcaaagaacccctaacgcttcttatcaggggaagtgtacgtacacccatttttcagagaaggaagctgaggctcagtgaaggtgtgtggtttgctcaacatcataaaataagtagagggggcagagattgcaacatttatttcaaattcacacttttctcaacaatactagttcagaggtgtggcagcaaatcagatgcaagcatgcctcagacaggagaagactgttagcattgagcctgtccaccgaagtggagtccagggtggctgtaggctgcaggggcagttcaggaggaaggccgcctgcttcccgcccccgcgctgcctcaggctcctcatatgatttggggagattaatgtaacctctgtgcctcaggattatccaggagatggaaagagcaaatatatctcaagtgcttaggatatatttaagtcctgcactctaatccctcctcagagcagcgcttctcaaactttagccttcagccaaccacccggccatctgaaagtgcagattctggttcactaggtgtggatgggggctttgatgctgcccttnnnnnnnnnnnnnnnnnnnnnnnnnnnnnnnnnnnnnnnnnnnnnnnnnnnnnnnnnnnnnnnnnnnnnnnnnnnnnnnnnnnnnnnnnnnnnnnnnnnnnnnnnnnnnnnttcctctttcctccacagggtcttgctctgtcacccaggctggagtgcattggcacattcatagctcactacagcctcaacatcttggactcaagcaatcctctctcctcagcctcccaagtagctgggattgcaggtgtgagccaccatgcccagccaaatgtttaattttttttttttttaatagagaaagggtctcactgtgttgctgtcttgcactccaggccttcagtgatcctcctgccttggtcccccaaaatgctaggattacaggtgtgacccaccccacctggcctcatttgctgtttttagatataatgtgatattaaagtccagaaatatagcattgttattttaaaagatgaagagctagatgggaaatcagcagttcttccattttctggcttcctcttctggcttattttcattttttctttgtaagattgtctggaatctctggctcccctgtgatgggtcttatatttcatcacatttcatattgggaaagatgttctgagatggagcgggaactgagaacagttagaagcagctggggccacgtgcggtggctcacgcctgtcatcccagcactttgggaggctgaggcgggtggatcgcctgagctcaggagttcaagactagcctgggcaacatagcgaaaccccatctgtagaggaaatacaaaaattagccgggtgtggtggtgtgcagctgtagtccagctacttgggaggctgaggtgggaggatcacttgagcccgggacgcagaggttgccataagccaagattgcgccactgcactacagcctgggtgacagagcgagactctgtctcaaaaaaaaacaaaaaacctgctgggcgcagtggctcacacttgtaatcccagcactttgggaggccgaggtgggtggatcacctgaggtcaggagtttgagaccagcctggccaccatggtgaaacccccgtctctactaaaaataaaaaattggctgggcatggtgttgggtgcccgtagtcccagctacttgggaggctgaggcaggagaatcgcttgaacccaggaggcggaggttgcagtgagctgagatcgagccactgcactccagcctgcgtaacaagaccgagactccgtctcaaaaaataaaacaaaacaaaacaagaccacagaaccaaaccaaaacaaaagaagcagctggaagagtagcagtggtcctgtgactgtcatggactcttctctagtgctgctgcagtgccctcccacctgctttggaccaaactgcatgtccctcacgtgccagctgggtggagcggagggatgccagtttcagatgaagagttctcatgactagtcagcattttctaccattttcaaccatcgaatgattgattcacttctgtgttgtcttcttccagtatagtttattacttattcatcctctttctccctctctcgtcctctctccttgtctcttgctttccctggcctgtgatctgctcctgcctttggtaggaaaatggttatggcaaactagcctgggttaaggtatttatgaggcccttctactggcatagtcagaactggtcaatcaaaaatgttggttaaggtgagaaaattttaaaaaggtatacattacatgtgctttaaatatgttaaatttaagtgaatgatttaagtgttggaattacaggcgtgagctaccatacccagcctaaatgaatcctttttgagtgacagtttgccagtgggtaatttctccctcctggtgcttaatgcatgagtatcaaggtaatttttccctggacacctaagccatgcttaattgctataaaaatcactgtgttttgatgtaggaccgagggccacattctttggtgtgttgctacctatggggttctgtttgtcttttctgtgtaatctatacatatgattactttgtaatttccagtttttgtaacacaatctgagtttagaattcctagaattttatgaatgttgccctgtctttttttttaatagttgatgtccccacatctaattgtatagctttttaaggtacttttgtttgtttaagagtcaggtccttactttgttgcccaggctggagtgcagtggcacgatcatagctcactgcagccttgaactcctgtgctcaagcaatcctcctgcctaggcctcccaaactgctggaattacaggcatgagccactgtgccctgcctagtttgttttgactgaacctttctaaagcatctcagagaatcatcaactcggcttttgcactcatttttttcattggtttattatgtaatggtcaaattaaagtaaataattatggtaataagaatttaaagaacaaagctgactcttggtaaatacacaactcaacaggtgggacagtttttgtgggcaccccagggaggagcctgttgccctgaatgtttagccttttagggatttcagggtattttacagagggaatagagaacagctgtcaactccatgagtcaaggaggtagagctttggttaagctagctggactgtagttttctgatagttttttagtgaatttgggattcagcaagtcagctagtcactaagtacattaagtttgccttaatgaattggctttgggctagttggccgtttcgctattgatgaattgactttcaagagaatttgcttattgtggggtcaggacgggactggtaggcagctgtgccaggcagagggtgtgctgtaaattaaagcacaagccagaaaaacagccagctatactaggagcgttgcaggtagctctgccttgctgggtcatgggatttgggcaggaaatccacacatgaggccagaattgtctgcaggggttaaattacaaaggacctgtgggttgtgatgagaagttgggaatgtgttgtgatgggaagttgggaatgggttgtgatgggaagttgnnnnnnnnnnnnnnnnnnnnnnnnnnnnnnnnnnnnnnnnnnnnnnnnnnnnnnnnnnnnnnnnnnnnnnnnnnnnnnnnnnnnnnnnnnnnnnnnnnnnnnnnnnnnnnnnnnnnnnnnnnnnnnnnnnnnnnnnnnnnnnnnnnnnnnnnnnnnnnnnnnnnnnnnnnnnnnnnnnnnnnnnnnnnnnnnnnnnnnnnnnnnnnnnnnnnnnnnnnnnnnnnnnnnnnnnnnnnnnnnnnnnnnnnnnnnnnnnnnnnnnnnnnnnnnnnnnnnnnnnnnnnnnnnnnnnnnnnnnnnnnnnnnnnnnnnnnnnnnnnnnnnnnnnnnnnnnnnnnnnnnnnnnnnnnnnnnnnnnnnnnnnnnnnnnnnnnnnnnnnnnnnnnnnnnnnnnnnnnnnnnnnnnnnnnnnnnnnnnnnnnnnnnnnnnnnnnnnnnnnnnnnnnnnnnnnnnnnnnnnnnnnnnnnnnnnnnnnnnnnnnnnnnnnnnnnnnnnnnnnnnnnnnnnnnnnnnnnnnnnnnnnnnnnnnnnnnnnnnnnnnnnnnnnnnnnnnnnnnnnnnnnnnnnnnnnnnnnnnnnnnnnnnnnnnnnnnnnnnnnnnnnnnnnnnnnnnnnnnnnnnnnnnnnnnnnnnnnnnnnnnnnnnnnnnnnnnnnnnnnnnnnnnnnnnnnnnnnnnnnnnnnnnnnnnnnnnnnnnnnnnnnnnnnnnnnnnnnnnnnnnnnnnnnnnnnnnnnnnnnnnnnnnnnnnnnnnnnnnnnnnnnnnnnnnnnnnnnnnnnnnnnnnnnnnnnnnnnnnnnntttttgtttgtttttttgatacagaagtctcattctgttgcttaggctggagtgcagtggcatgatcacagctcactgcagccttgacctcccaggctcaagtgatcctcttacctcagcctcccgagtagctgggactacagatgtacaccatcacacctggctaatttttgtattttttgtggagacggggtttttccatgtttcccaggctagtcttgaactcctgggcttaagtgattctcccacctcaccctcctgagtagcggggactacagatgtgagccaccacactcggcctgaaacagtgaagttttgataccaggcgttaccatcttcccatcgatgcatttcgccctttctcaggtaccttcacagtaaccttgttatctctgtttcacagatgacattacgaggctctttgagattatgtgacaacgttggctcttttaccagttgcagagctggggctaaagcccacgatttaaaacaagaaaatcattcattttcctgtggcgtaagatgtgaccctttggtggatgtgagccatcttgtttgcctttttcatcgtctttgaggaatctcagagttttggctcatgtataatcccagtggcatctttgttttcaattcgctttatggctggattccactctatcctgtttccgcccctggtgggctgcctcgccttccatctggatgcctgcctgctgatggaaaagggaggggagatgacatggccccacagggctttcattctttgtcatgcataagtaaaaggagagaaactttaagaaaatatgtgagacaatcttcccagtgtttactcaagcgctgtgtggaatgcagacttaacagtgatcacaatggaatggggtgtaatttggataaagacttgcattttgccaagaagagtatgtactcagaattcttagtgttaggattgaaaccattttcgcagcttaaactataaaattttattatcctcagtttccttcagcggcatggattccttcctgcagatgagcagcaagcggcacaggaagtttagatgatggcatgaatgccgtagggtgctgctgaaatacatcagttagaaaagggtttcgccaatatgtgatagaaatggaactggagccctgattttcttatttcaaattatatattttttggctgttactcctaacagattttaatccctcttaccagaaaaacagaatctggaggtgtcactgtggatataaaattaaagtcagaaagggattccaaatcctaggtgtatgtatttctcagctaagatcagctctcgtcatttattggtgtttccctggaaaggactaagcaacagatggggcaggggtagggaagaaggtggggagcagcagacagagggcggagtgccagccacgaggcgaggcgagcgaggcaggcgaggcaagcggcagtggaaggcatgaaggtgctgggtctgccttgggcgcggggaggagagtcttcctaagaaatgatgcgtctgcttgtgctgtgtgatatgggagcaaaaggtctggacccgtgcagtcttggttgttcggtttgttggttccctccttacatcttgtccgctcagcccgctgtgtggtaggtgctgaggctgcaggagcaacggatgccgtgcagttgtgccacagtttccaggtcagcaggccgtgcccactctggctgacttctgtggataagcatgtccagccccgggcagtgtctttaatctcttgagcctcagtttcctcatctgtgaaatcacaattgagaggctgacatctgactgttattttctgaacgagagaaaatatgtatcaagcatcccaggacagtgcctgacaccttgtaggcaagtggtcagtacaggttgaacatcctgaatctggaaattggaaatggtccaatgaacatgtcctttgagcatcatgtcagtgctaaaaaaagttttggattttggagcattctagattttggatttttggatttgggatgctcaagcagtaagtacataatgcacatattccaaatccacccccctgccacacatatacacacacacacacaaaatcaaaatcagaaacatttctggtcccaagcattttgcagaagagatcctcaacctgtagtaataacaataataattattactgtatttataacatatcattttacaaacaattatttatttgagatagcatctcactctgtcacccaggctggagtgcaatgcatgatcatggctcactgcagcctcgacttcccgggctcgagcagtcctcccacctcagcctccctagcagttgggactataggcatgcaccatcatgcctggctaatttttgtatttttttgtagagatgggattttgccatgttgcccaggctggtcttgagctcctggctttaagcagtcctcccaccatggctatttttattattattggaaagagaattctctgtgaattctttttgtttaaagaattcacttttccttaaagtagcaaagacagataccaatgggctttcctttccaaaagacgagaattaaaattacggccagtactgtaagcccacgagcctaggttatattactgtggtgttgtgtaagtactagttttctctaatgcaagatggagaccttacagcagtaaatgtacgattcctgaaggtagataagcatcttctaaactaaaagtttaggagcttttacttaagtattaatttgagggagaaatattttagtgaatttgagaattacctagtcactggcacagtgtcagttctttcttatttctaggtcacagcaggggtgaagatcagtcattctctgaggagggtagtttctcatacttctttttaagtgtctaaagatgccatggtggttagactttggacccttgttttattttttttcgagacagagtcttgctctgttgcccaggctggagtgcagtgtggcgatcttggctcactgcagcctctgcctcccgggtttaagcaattctcctgcctcagcctcctgagtagctgggattacaggtgcccaccaccacactcggctaatttttgtattcttagtagagatggggtttcatcatgttggccaggctggtcttgaactcttgaccttgtgatctgcctgcctccgtctcccaaagtgctgggattacaggcgtgagccaccgcgcccaacccaaggacccttgttgccttagcttgtgttttgtgagtggtagcccaggaaacagtggggacagatgcaggccgtgttaggggcatgtgcacggactgggtctctcctgatagtgacggagagttgagtgattccacagtggtgtgtggggctgccattcagtggtacatttgagggacttgctctgcccagagattcgcacgtcctttatcctttgggaggacatggggtcagctctcaatggaattttggaagaggtaaagttggctttgttgtctgtggacctgtaactttataagaatgctggaattggactctcagagctggggtgggcactgaaggttgttctgatgcgatgcccttgttttaggtgagggaatgggcacgtggagtcttggcaaggttgcagaggtgcaggaacaagccagccttggatgtgagtggctgtgcgcctgcgtcttcctccctttgccagactctcttatttcctgcctggcctctgctttcccgtggcccctattggaaacctaccttccctgttgtgtaccttttacaattccattaattgtgctctcagtgaattcttattggaaaggattggaaagacttgatcctctaaaagcagtggtggtgacagtttgctcatcatttcggcccttctcctgtttgactttaacaagcctgaagtgtctgaaacccctgtggccgatttcaaggataagtggtatttgagagtggagtgattctttagcagtattattttctgagggggtattatttcaaagtgaaagtagttttattttttaaaatgatttttaaaatgacaactatgcagaaaagtcaagcagtccagattgcatgtagaaagagacaaccgctatgaacacttttggtgaatgaccttctgcctctgtgtatatgtaagcacaaacactcaccttttatgtaaagggatcatagtacacctttgttctttgatgcagcagtatctcatagaggttaataaagtaaatggctgtacacatgcactggccttttaaatgtttgtctgtggatgtagcagtacatctgagcattcttctcttgaaaatttagattgtttttagattttactaaacaaacttttattgaacatccttatgtggtttttttcatatgtggtttttgacatatgtttctagaagtggaattattggatctaaggggatacgcaaaaggttgtgccaagtacatgaccaccaatagggtttgaaagtgtctactcagaaccccatcgattcagagagtaagttccttggggcactgaggaaaggagtctgacctgtactagttcacaaacgtttgtttgattcagctatttgtcgtgcttttccaggacatgaatagtttgtttgaccatgctaaaaggaatttggaataccctgcgtttcaggaataaaagatactcagtgaatcaagcagctgttttccaaaagcagccagcagagattttaacttggatgtggactcctgtacagaccttgcctggtgctgggccccatgtatcaggttctgttgcgtctgtaggaagatatgaaggacctggagatggtccagcctaacgccacactaagatgacagtttgggaagccagccttctgataggagtgcaaaggaattgaagttatttagcctcgggaacaaggacggggggcgggagggaggtaactctctgtaagtccctgaaggaatattgtgcagatggtctggagtgagttctcttcttcatctggtgagaggaaggagtgggttgaatctgcagtgggtgattagtcattcacaaaggacttcttggcttcagagatgagttacatagaaagcgatggagtcgtactttctggagagtttacattaaaaaaacgcaacagccccatactttcaatagaacctttttctacttggaactgtaactgagtagatttcaatttggggcctctgctctgttccattccttgtgaacatacctcttcccaggttgtttacagaatctaggtagtgggaaattgttgcatgctattcataggaaaaaggggagagagaaagaatatgaatattaaaaaggtctttagcaggcagacgtggtgtttgaaaactccagctggcagttactagtgtctgattttgagcagatttagattctgagcttcaacttctgtatctgtaaaatataaggtaatagaatacatgccctgaaggattcctgcatggattgattgacgttcatgtggcaagtgcagaagtgtctagcacagtgctgggcagattgcagatgctgggcgaatgctggctttcctgccactcagccacctcttttggcagaaggaccagtgagagacacaccagcaagtcctgtagatggtcttaggagggagatgctggggtggattagagccgtcaggaacatttaagaaaagaggggacttgagcacagtcctgaaggccaggtgggacgtaggttgtcccgaggcgcggagtgagcccccagctcgtccatattctaaggctatggcttcacaaccagagagagtttcggtctctgagtttgttaaaaaattgtgatgggccaggtgcggtggctcacacctgtaatcccagcactttgggaggccaaggcgggctgatcacgaggtcaggagttcgagaccatcctggctaaacggtgaaaccctgtctctactaaaaatacaaaaattagccgggtgtggtggtgggcgcctgtagtcccagttacttgggaggctgaggcaggagaatggcatgaacccaggaggcagagcttgcagtgagcagagattgcgccactgcactccagcctgggtgacaaagcaagactccaactcaaaaaaaaaaattgtgacatgattggttttaataaggagtggattccatctctagagaataatttctactttgttttagaaagtggctcccaggtgatttgcttttttaaagttttcctagcacacaatagggatatggtgagaatgtgggcaagcctcactcgtgcactcagccagtgtggctcaccaactcactctgtgatgagtgctgggtgcgcctgagcatctgtgtcccaggagcccaccgcctgtggcagggccatggagtcccagagtctgcgtctgaggcctgcgagggttggtgtgtgtggagtgtgtggggatgaaggggagtgcagacactgtctcagacccctggggcagcatctgaacaggcccagtcctgcgtgggggaaggggcattctgtgtcgtggatgctccagtgagactgctgcacacaccgaacctggagatttggtgtgaactggacggcatgtggccagggctggggcaagaatgtgcgcaggaaagtaagagagacacatcagggctggccttccaagcctcttcgtaggatgaggttctcttttgccgaagactttacaaaggaaagaggaaaagactggccacacctgttaattggaaatccagaatttccttctaatggtcatgctaatttctgtgtcacttttcctttcttcctcagcctcctgacagtgggcctccaccattgccaacatcctccctcccagaaggttattatgaggaagctgtgccgctgagccccggaaaagctccggaatacatcacatcaagtgagtggccagccctgcccagccatgctgcctttgtgattggcaggactgttgcagagcctgtcccctttctgggtaggaagggcaacagggtattataaaacactgtgggccaagtactttttgaacccaaagagattgtcagtacaggaaaggttttgagaaggacaccgagtgcctcacacacaagcctctcttccgattgctgtcttccttgtgactcagaggtagtgaaagcttattgctgtggcaacaggtatcagcagtgcggaagagaaatggctctttgtggtatattttttgggtgcgtgctacagcccccacttccttagtctttgatgctcttgggctgcacccattctgccacgattaaagcagtttccaccaggttggctgttgggccagaaataattgggtacagcacaaacaggcgtctctgtcatagacttttggttttttcttttttgggggtacaggttctattagatgatttttgcctaagttctggttctcctggccccagttagtggcctgctggtagcactcagaagtacctgtttgttactacccagcttcaagtgcggatgaagcatgacatgatgttgagtctccggaattcatttctgaattggtggctctatgtctcctttcagtatctgtcaggcagggggctaccatctcataagaaagttgaatacctgaatgtatgtcaactaatggaatccagcttgctttttaaaaaagaaaggtagataagtggaaagtgacagagcggttgctgactgtactcaggaggctcctggtgcattgatcttctttgcgtggtctccggccttctctgtctcctaaggaaaatgctctccctttccccaaagttgttatactgttacctgccacatagagactttgcatttcagatctttctctccttggcagtctacgagcgcggctattccaccaaagcaggatccgtcttgatgattggaaggaggttgttatgggagattcccccgttggcatgcttctctgagtgtggagaagggctgtggagaagccaggccagctggactgcgtgcccctgagggtgccagctgctcccgcttgcctgtctcctcagcttctggagcagtcggggcacagactgggccaaatgtcaatacttagttgtgctctggatgagaaaagggatagttctgataaggtggtcatggatttttcgattttgagaataatttaccaactctttaagaagacagtagattaattagaaaacaaattaaatgcctcgatataactcagaacgtcattgggttcctttatttttaatggcagtgagtaaagacaagtatgttttcttgttgagggtattttctagcatttggaacgtttgtctctggcccttcccctgcagtgtactttcaaggctggaaacagagtgattgtttgattttgggggctgttggtcatttttattctgaggagctgcacgtagctggcaggtcacggccccttcagtggggctgttccttagccgctgactccagaagaagaggtgactgaggaactcacgcctggggaatgaggagacagcagtgatggcgcacagtggcttctccaatcacacgtctgccgtgggactctcagttgatggccccaggacacagccgcccctcccttgaagagcaacagccatgggttgacttgtcagctcagttaaggatcgtaccaccttcagttagatacgaactttgagatggttttgtgaaacctgcgtgggttatggtcttatcggagaagccaaagcattttgaatgtcatggagggaagagtttattgaaggaattgagggcgtgtgcagttgtgagaacttcttccctggaagaagcacgggcagtttctgctgtgtctggtcgggccggcagccgggaagaaagctggatgaggactggggaagaggagggacagacagacgggagcctgcgtctctcctgatggcacaggtgaccagcaacagcccacgtgagctgcggcagtccctgtccccgcgtccacctgcagagtctggggccactgctcccctctgccctatcactcccagatttctctcagggccaccctagcccagaatcatctaagaaagggaattttgggaagtgtgattccagtcttgctaggctgatacagtagaaaactaccacagtttatctttggtcaacttggcacccatgcagagtctggggccactgctcccctctgccctatcactcccagatttctctcagggccaccctagcccagaatcatctaagaaagggaattttgggaagtgtgattccagccttgctaggctgatacagtagaaaactaccacagtttatctttggtcaccttggcacccatgcatacctcttctagccacactgagtttccaagtagagacgagcagcgcacgcttgagcctaacgtgattcaccattgcccgggtgacgggaaattccccaactccccgcagaggagacagagcccctttgtccaacatttgggtcacatccattctcttctagagcctgtaacctaaattccgagatattcatacaaggttgactcctgttagcccttcttatgtgagatggtgggggcctgggagagggggaagaagaattcgtttctgtgtacacagttatattcttatcaaaacaaggaagaaaagcctgtaacaggttccgtctccacacctggtcagtgttcatggctagaatttaccacctccatctactgctccttttgtattcctggtgcccccagcaaaccccttggttggtcgtggttttttcttggtgggtgattcagcttcctttcttgaaaggtctggaccttcagtagcacttctgtattggatggtcatgacttttcattaactttaatcagagggtgtgagaacacagaggggcactcagggggtcttccaggtcccctgcgtgttcttccttactcccactgtggggtagtggcttcctcacagttggggtccatcacctcagccactgcaggagccacttctttgcctgttactgacacgaggagcccagtgtggccaggtggcagcttctgcttccagtttaatgaaaccattgccatatcttgcccttagaccagtgcagtccagcattttagggaaggaaagcaagcattttgttagtgggtcactgggggtaatagtgggaggaggctcctctcgtttcaccccttgattcttgggctgtgaatctgggctgtgggagaaacagtaccaccaagtcagaacatatagtgccagaagatactctgaagtctcttgcccccaagcccacaaggtatcaccagttggctggcactataattggatattcaaaaaaaattattttgacctattgggtaagtgacttcagcgtgctggagtctgtggcaagatcagtgaatttcctgagcacagacccattattgtgtacttgatttgctgtaaatgagttccctggtcagaagcaatggtgtggggatcccatcatggagaacaggacattctttaaggccctgtggacctagaaggcaaatttattttaatgatctcttcatgatggaagtggaccagtgataacaacctgccattaggtgccagctgatatcccagggatggtgtcagggcgtggggatggggtaaggaggttgatgttgccgtctgctgttggcaggtagggtactcggaagtacctggagtcggattttccatgagtgaagtccgtgttgctgagttcatgcataacctctattcctgccatcatgtccacatatacatgagcccatttggacaagaagtctggggaatgaggatgactgatgcagctacagtgggtcgtggtatttacccgagtatcaagatcctcttctgctgaggtctgtttacatcatgtgcccatttgtgaaggtctgttgacagcatcttctgcagaccagttgtttgttacctgttttttaatcatattcctctccattgtcgatcatccaaccaaaccattaggcagtgttcatgaatggttgttgagggaggaggcagcgcacaggactaagggctgcttgctcgctcacatcttctggagtggatggagcctgctgtcacacacccgctttgacttgaggatggagtgccccttcatgggtcagagagactgtgggccatgcagggcggctcaggtttcctcttctcttggtgtctcatggtgaagcattacgtctctgccagggcttcactagctgaaagtagttcctcagaagtaagatggttctctctaaaggatggtgtagccgtgctccaaactcccagaggtccaccctcgccttgcctgggtgagcctgccagagtgtccataccaacctgcggagcagtgagggtttcatcagaacagcagaaccattacaatggggatagaagacttattctagattagccgtgcacacttgcgggagctgttgaagtcagtgggtggctgtggcctgagcacctggtaggacctgccacctggaaggaaagctggccgtgaagcgcaggaggtcaagggtaaacgataatccatgaggtcaaactgcaactcatctatgacttcctccagactcagtgacacaagtgacccgcacaagatgcggatgcccttggctctggagttgtacaaaacaccgaagcgggagagcctgcagcaagcagctgggggacctgagcccatggctgccccacaccagcagggtgcgcaacatgccacagcttctgcagggcctggcgccctgtgctggcctcggagatgggcctgctgtttccttctctccttccaggttcctcagtttctcctgtagccagaccatgcagagcaatggaagtggcgttccagttagctacggtgacatagcataaactcactacaacgctcgttggctgttttggtttcagacacagatttcagttttattttcagctttctaattcctctgttttgccctcttccctctccctcctccagggggattggttgaaatggcatttctgatgttatggggtgtgggtgtgtgtgtaaacgaaatacattatgtagtgctgctggtgtttggagatgagcactcacttcctcaggccccgatgttggatggtcatgtgcacaggtagttacacctgcttctagagtttcaggttcacagggagctatcttgtgtccttcattttatcctcatagtaactctcagagagacaagattatcttaaagacactgagtctcaaataagttcaatgacttactatatttctctagagtgagatctcggacttagactggccattttcaaacataagtcagatctctgctctattcacaaccttctcgtggcatcccatcccactcaaaagttaaagccaaagttcgtctgagggcttctctcctcgtccctttacctaccacgtgttcctcccctgctcactgccctccaccccccatccccagccccttttacatggtcacagcagcatgaaagagtggagaatctgtgatgcagaaggagagtcagtgttcaaaactttgtgaccctcttgtattttgtattttgtagctcttgtattttgatcctgtaagaatcgcaagtagaaaagtgttgaatgatattgccaaagtgaggatgtgagatggagaacctttctctgcactccaaatgccttgccttccacagagttgtgtggggcagctggaaggatcgaggggaaagccctttgtgagtctgaaaacgctagacacagctgcaaagcaccatcatcattcttatgaaatgacattgagacctgaaggagcagctccagaaagtagccatacttcatcattgtgttacttggacacatccctactctccaataggccgtttgtcatctctttccccctcacccgagtgtgagaacaaagagggccaaggcttttgtctgttttgcatctggcaggtaatatgtgctcaataaacacttactgagtagatgaaggctgtgctttttccactcctttcctttgttgatttttctatgctgaatttcaagttttttttttaattgtgaaacatctaatattgtgcttgctcagccgtgtgcccagaactagaactccaagagaaatgagggccacagctcctgccctagaggagccgtgttttctgccagcctctcactctcccctccctctgaaaagtgaggtcagaaaccaagagagacgcctggtgggtctcctgcttatggcctcagcaaagccagtgcattgaaacgaaaaggcagggtctgcgtggcgctccagtccccttgagaacacttgcttgtcacttaacctttgtctgtggttcctgtgccttttaaagatagattcttgtgtcatttgggtggagagaaggcatggccccttggaaagtcgtgacgccctaaccgccttctcagggcaccgttgctggctctgatgtgcctgatgtgcagtgtgtgtggtattgccgttgcttttatgcagtttttttctggaataaacattttacagttaaaaatagtagtttactggagtgttccttaatttcatcagaatgacactatgatagcaattcctgcccatgaaactagtttctggtgaagaagagtgtggtggtgaatttgaggtgtgaagttgactagatgagggggacctagggaactggtgaagcattatttttgggtgtatctgtgaggtgtttccagaggacactggacactggcatgtgggtctgagtggtccacacggggaagacccaccctcagtgtaggcagtaccatccgataggctggaggcccagagagaacagaaacagaggagaggcacgtgggcctctcttttccgtgagctgggagacgtctttctcccttggacgttagaacttcaggcatcccggccttgggaccccaggacttataccagcaccactgccctcccgcacttccccacctcctggattctcagacctccctctcagacggagagtttcaccatctgcctccctggtgctgaggcttttggactcggactgagccacgctttgcgcatcccagggtctccaggtggtagacagctttttgtgagatttctcagtctccataatagcatgagccatcccccctaataaatcacctcccttccttccctccctcccttcctccctccatccgtccctccctccctccctccctcccttgcttccttccttccttcctccnnnnnnnnnnnnnnnnnnnnnnnnnnnnnnnnnnnnnnnnnnnnnnnnttcactccctcactcactcccttccttccttgcttccttccttctttccttccctccctccttccgtccacccactcacccatccacctgtccatccatccatacatcgatccatctgtctgcctgagcatctgtctatccatccatgtatctaatctgtcaatctcctatggcttctgtttccctagagagtcctgactgatacaaagagcatttcctaatcaacaacgtcctttcaacagagttcacacggttctgttgttggccctttggtctgctgccttactctacacaaagtgtagacatctgaatgggttgggcctgatggtatctaatcaatgccccccccccccgagtacccctgaaatagaaccttcctgttcctctctctgtgaatacctgtaccacttactacaagactagaaggcaatcaggaattcttttccctgctccccatttctgagttgttcataatttttcacaaaacgtttatgacctcttaatgtaatccaaaaccccaggcctccagacggtgaacttctcaaagtcctagaccacagctctggctggtggagctaccaagtgatatcctgagcaagagtctcttctcttgattgggtcatcactaagcatactttccagagagttcttttgattgggtcatcgctaagcatactttccggagagttctcttgattgggtcattgctaagcatactttccggagagttctcttgattgggacactgctaagcatactttccggagagttctcttgattagggacactgctaagcatactttctggagagttctcttgattggaccatcactaagcatactttccggagagttctcttgattgggtcattgctaagcatactttctggagagttctcttgattgggtcatcgctaagcatactttctggagagttctcttgattgggacacggctaagcatactttccagagagttctcttgtttgggtcattgctaagcatactttctggagagttcattatcctttgtgctcggtgacttctggctgttccttgtttgctgctaagttggctggtttttctaaaaatgtcatttctacactcttagaagaaggcaagacaatgaacttaattgtctttttcataactgtagacctcaactcattcccaaggatgaaagggctactagaacatagtttactttttccgtttaaaatacaaaggcacgggttcatgtttcagtcctgtcattcaccaagcctatgctcctggatgaatctcgtagtcttcgagactcattcttccttttctctgaataagactaatgtcttatgtgccccatctccaagtggctgggaggtccggtgagatggtggatgtgagaaacctttgtaaatttggagcaggcccggcttttcatggctttatcctagcacctgctgtgtaaatatagatagtttttaaaaagtgcctggcatagagtagagctcacaacatatttgtggaatgagtgaaattaaaggtagttttcccatttataactaactgactcattaaatctttacttcattatttactgaacttgatgttccagcaagtgggccgagccctgagggctgtgtggtcctccaggccgctatgagaatcatctttctgaaataaagctaggatgatgtccatggcccctccagaacccctcagtttacgttggatcgtagcacagcacgcgatctgcggtctggcctctgcccatcttctcgttccatattccatcgtttccttccacatacccttgttctagccacgcttactgttttaaaaaccctcttgttgtaaaatacatttaccagaaagtgcataaaatatgagtatatgctcagtgatttatcataaagaagccatctgtgtaaccaccattcaagtcaagggtagaacactgtcagtccctgaagccccctgctccttcctagcacagccaagcgtaaccacggacgtcgttttgtggcctcgctcacgtcctgtccagaagctgaaaggaccccctgtgccttggcagcatttgatgcttgtcagtgctttcgctcatcgcgtttctccttctcagactttttcctttggttggcaatagcttgtctcaaggcctggctctaaagtgacatcttctgtgctgtcttccctgtgcccctgcatatgctgccccctcgtgcccggctccatgacagcttgcattttgccctagattgtaaagatcttgcccccccacccctgtgccgtccagcagagctttggcagcagggggagtgtttttcctctgggccccggtatccagttgacatgtgggacttgaatgaaaattgaaatgtaagtaaccccctgtggctgccctgtgaagcagggggtgctgggtgagtgtaggtgctgatgggtgtgtggggtgtgttggagggggatgtggagccagtgagaacgacccacctgtgggcggagggtgatgtgaagcaggggcagaagcggggcagagacctgtgacccagaccagggtgttctgttcgcctctcacctttgagtcagcccctcattgcatccctcgtggcctctgagctgctcctgtctcttacctcgtcccttcttcagcccattcctagtgccattgccaaagttacctcttcaatctccttagcttttgcctaaaatccttcctggacttaaagtaataataataataataataatcttgttctgttgcccaggctggagtgtagtggcaggatcacagctcactgcagcctcggactcctgggctcaagtgatcctcctgcctcagcctcttgagtagttgggaccacaggcgtgccctaccatgcctggctagccttttactttttatagagatagggtctcgctatgttgcccaggcttggtcttgaactcctgggctcaagtgattcgcccgccttggcctcccaaagggctgggattacaggtgtgagccaccacacctggcctcctggacaacttttcattgttgaaaattcaacttaaactctaaatctttctgttcctccctgctagtattgaatctttgcaaggaaattataaggcaaacatgattactgagtacaacttaaactccagtttccagcaagtaaaaatatgagttctcttctgtgcagactctgccattttgcacagtattgcaaccgcattggccattgttctccttatctctcattcatctatcatttaggtgttcatcccttaagtatgttttgaaaaagaaacgtgttccagatgattctgggggctgaggggaatttggagatgaatcagatcctgtctcagggagcttatcatccagcgcagctgaaagtaatgagaggaatgacgggcgctggtatttaggaagaccttttactacgccattggcccttccaagggctttgccagtttaatttaaagacatttaacgcgcttccttctacagttatttgggcacttgccctgtgccaggtactttgttaggtgccggggagatcaccgccaacgagatggtctccttttcttcagggggcttacagcctgcagtgggggccagtgttgaggtgtgctgcgatccgctctgtgttgggccgtgtggaggctcagaggaagggcatttgacctagtgtattagtctgctcatgccgcagtgacaaatgccaccactggggggcttccacagcagaagctcgtcagtccgggagtccaggttagactgccagcacggttgggttctggcgaggcctcttcctggcttttagatggctaagtcctcactgtgtcctcacatggtggggacagagctctctctctctctctctcttcttaaaagaccaccagacctatgggattaggaccccacccttaggacctcatttaactttagtaacctcctaaaagtcctatctctacatatagtcattatggttagagcttcaacacttgaatttccgggagggacacagttcagtccatagcacccagctttggtgattcagggagggtttgctggaggtgtcaggaagttaaaccccaaaagatgagagcatttaccaggcaaaggcaggagggcgagtggatggacaggaagcttgttagagggcgtggcacatgcagagaccctgaggtggcagaggggtgatgtgtttgggaaactgtcagtcacagcagtatacatgccagtgtgtcacagagtgaggtgggcaccattagaaggacaggtgtacatttctgtcaaagttccaaggatgccccagaagggagaggtggcccttggttgcatattgagtgtcagagatgttgtgcacgtggggatgccagcagggagaagcagattgcagccttgggaggtctttgacataaaggtgcggacgtgggagggcaagggacctccatgggcaagagttctgtatggcggaacactctgcagaatgaggatggcgctcgtcctgcaagaatgtggtgaggagtcagtgtcgggtcagcgtggggtcccgtccatatgaaacagtctagaaacagtttttataaacacagaatttgtaggcacttcaccttgtcattgagtttccactgcccaagtcttagcattgtttttttatttttgtttttgtttttgttttttcccttaaggagcagaggtccctttctcattcagttacttggtgattaaaaataagaggacgtgctcttgagcccacgggtaaacttcaaggtaaagaagtcctttttaccagtgtatgtttattttttacagattatgattccgatgcgatgagcagctcttatgagtcgtatgatgaagaggaggaggatgggaaggggaagaaaacccggcaccagtggccctccgaggaggcctccatggacctggtcaaggatgccaaaatctgcgccttcctgctgcggaagaagcggttcggccagtggaccaagttgctctgcgtcatcaaagacaccaaactgctggtaagacatttggaatcgcttgcattttttgtaagattgctgcactcagaagccatggcgtttatatccagtcaccattaacatcagctgtgcaggaagggcagcactcaggtgtcagccaggtgccctgagctagccgcagtaccatgccaggggcccccacatgccatcagggagcactcgcccgtgttgtgtgttcaaggttgccggtttcccagctccaaaagcagccagcgaacaaaatcattcccattcccgggcagggcctgtggtttgcgtctgtggaaatgcacaagattttaacttgccaggagttgcaagatggattttctcatttgtagtgagtcagtggattcctcaaagccagctcatagaagtgggacggggagcagccaggaaaggaaattcttctggaaagcttggggccaattcccatttttttttttttttttaaatttgagaggcagagcaggaagacaagtaaggaacagagaagcagggaaggcgagaacctggaccttgctgtgggattattccagtggaggccccagcaggaaggctgcattccgggaggacggtgtggcgtcccttcctcctccccactccctccccaccttccttcttttcctcctgccttttttttagaaaccatggttggttattagaattatgaactttaaagtatgtttttgccttttgttcttccttcagattaaccttgggggaatcattgctcaaaattatatcattaattagaaaacaagaatttatgtttctgtagagcactctagtggagcagataatcctttttttatctttttttttttttttttttttgtaaatccaggtttcatctttgaattgtgggaatctttttttgttttactaagttcctaggatattatatattttttaatgtttttgttcagttttttaaaacagagtacatattttttccacaaatgtggcctgaatttctcccagatttagaatgtgccaaaaatgatgccatggggaatattaaaaaatgaaaaaaagaagattaatgtggtccttatttccagtctgatataatggctacaagatgtggatatattatatgaatgttttagaaatacataatcaactttcatttaaaagagaagcttccaaatccagtgagggaagcttcgcggttgtgtgtagggattagcagtttggggttctgagtccctggtccctctcccctgccctcctctccctcaccccctaacttcttaacttcttcccccctcccctgctttgtcttccatttgggcccctgccagctttcccccttcaaaaccaggatgataatacctactactaagagtagttgtgaataagaagaaattagtggaaaagcaggtgaaagcactgtttggtcaaatgcagaatcaaagttattgacttttattacgaagcttttttcctttcaaaaatgacctatcattcagggcccagatgacccccattggcataaaaaataatgaacagtgatcaaagcaaatactttccaagtttaaacagcacagaaaaggaaaagccatgttcttcccctaaatgttcccagtctgtcttcccacaagttaccgccattaacagctttttttccatctccttctggaacttgttccttctgtgctcaggtagctctggggtgggtactgtgatgtacctagattcccgcttcaggactgaaggttgcatttccttggcagggctggtgagcccacctcggggactgtctgcattgaagaggggcctagagcccaaggccgagctccctccccaggggtctgcattcagtgtgtgtgtgtgtgggaggtatagacccagactcactgggcagctgtgatggggccttccagccccagagctctcatggtggtatccctgaggccactcaaactgggcgtctttgcccaccccactcctccctctccttgctcctggtgttgtcttcaggacgcccattcataaacctcctgcatgctgctgcctgctatagaggcggcttcccaggaaatcccgcctgctaggactgccagattgcagcctgtccctattgctgattgcatatctctcgtgaggcatttaacttaaggaagaatatgttataaagttccctttctgaaatgataagcgtttgagatgtggggtttgctaattatctgatctgatcactatacattttctgtatcaaagcatcactctgtaccccataaatatgtacagttattacatgtcgattaaaaaggtttacacaatttaaaatcaaaaaataaaattccctttccgattccttccattgtacgattagttgcttttcacctttctttttatacatactcaaaatgcagaaaatctcaaatggtcaacattcataaaaatctgaggttagttgaggtatttttttcttccttttcagatcagttgagtttttaaaaaggggatgtatttcttatctgtgtacttcaaagtcctggatttagaagaccaaaacaggaaggctgggcgctgtggctcaggcctgtaatcccagcactttgggaggctgaggcgggcggatcatgaagtcaggagttcgagaccagcctggccaatctggtgaaaccctgtctctactaaaaatacaaaaattagccgagtgtggtggtgcacgcctgtactcccagttactcaggaggctgaggcaggagaatcgcttgaacccaggagggggaggttgcagtgagccaagatcgtgccactgaacttcagcctgggcaccggagagagacttcatctcaaacacacacacacacacacacacaccccaaaaacaaaccaggaacacacacacacacacacacacatcccaaaaacaaaccagaaaggactctagaaatcacttctgaaaataactatctattcattccttcctacatcagtgaatgtttagagtcaagatgcaggctctgcacgtgcacaattggggctggagtcctggtctggtcctggtctgtcacttttcaggttgcctgactcttcaggcaggtgacttaaccagctgcacctcggtttcataatctgcagaatgagccaccatgctgattgaggtgcttgaaatgcctcatatgatgtcgacattcagcacttggtagcagatgttattgttgctaataacttaattccataaaataataataacaataactgcaaaacacattttgcaaacgaggaaacagactcaggaagtttaagaaactccctgggatgcagataaattagtagtagatctaggacccagatctgccctcttggactgttaggaggtatgctttggccccaagtagtacaggtaaacaaacgggggtaggggaagctttgggcaatgatttgattctcagttttacagataaagattaagcaagagccatttgagttaagtctcagttctaaccttaccagtcgaaatctttagagtgaatgtcagttgtgtagatggatcagctttgtatattatacattgctgttatcctcttactaaaataatttgtgtctttcagaaagagaagatgagataggcagataacaagcaatataggttattagataaagtatccaaattattccattttctctcattagggctgtggagttgcaacaaatctaatagtatattttatatattattcacataaatataaatgtattttatatatacatttaaataaacatttatgttaaatatatatttatgtgtgtgtgttgggtttttttgttttgttttgtttttctttgttagttggagacagagtctctgtcacccaggatggtgtgcagtggtggtattatggctcactgcagcctcgggctcccaggctcaagggatcctcctgcctcagcctcccaagcagctgggactataggaacacgccaccatgcctggctaattttttatgtttttggtagagatggggtttcttcatgttgcccaggctggtcttgaactcctgggctcaagtgatccacctgcctcagcctcccaaagtgttgggattacaggcgtgagccatcgtgcccagcctatgtttttatttatgtaaatacattcatgtaatttaatgaagaagccccaccggatcataaactgtatcagagtagggacttgtggtgtttgttgaatcctgtgatagatgctcagtaagtttttctgaatcagtgaatggatgtactttttcacacttggaggcgaagtgtctgtgaagagcactgtgtgtatgtgtgtgtgtgtgtgtgtgtgtgaacctgctcatctgcagattcagactttcagatgccttgcccgcactcaggttttcatgatgctagagcttcctcagtgtttctgttcgaactcccttataatatcagttgatttgttgtgttgaatgcagtgctataaaagttccaaggaccagcagcctcagatggaactgccactccaaggctgtaacattacgtacatcccgaaagacagcaaaaagaagaagcacgagctgaagattactcagcagggcacggacccgcttgttctcgccgtccagagcaaggaacaggccgagcagtggctgaaggtaggttgtctgctgtgtttcacagccatttcagttccacatgcctttctgagatccattttaattttaattttaattttaattttgttcaagcataggcaagatggattcacccaaagagttttgtctttaatagctaaatattctgatgacatggaggttaatcagaaaccccgcgtcactttcactcttatctttaaaaggcagcttgtctctgtttgtaggctgcttcgacgactttctcttttattttccacagtgtcactttattgtgtctgcatatgaattctttttaaattttattctggttgggattggctgggcttctgaaatcttgtggatttttatctttctaagtttgggaaaattttttcagccattttcttaaaatacagcttttccccatttctccttcttccctgagactacatttaaatatatgttagactttctcactatatttacttctggtttctttttgtatttaccaaccttttttctttgtttgttgaaacaaggcttggctctgttgcccaggctggaatgtagcggtatgatcgtggttcactgcaacctctgcctcctgggctcaatcgatcctcccacctcagcctcccaagttagctcgcatgacatgccaccattcctggctagtttttgtatcttttctagagacagcatttctccatgtggcccaggctggtctcaaactcatgagctcaagtgatccgcccaccttggcctcccaaagtgctgggattacaagtgtgagccatcgtgtccagccctaaccattcttttttcttctttagtctggtttatttttcttgttcctttccagcccattatttctgtctttggctgcttctaatctgctattaaatgtgttcctgttcactgggttcttaattttggtgatggtagttgtcttagtctacttggattgctctgatgaaatatgataaactgagtggcttatttataacaaatgtatttctcacggttctggagtctgagaagtccaagatcaagggaccgttctattcagtgtctggtgagggcctgcttcctggttcacagatggcatcttccatctgtgtcctcatgtggcggaagggacaaggcaggtctctggggcctcttttataagggtaccaatcccattcatgggggctctgccctcatgacctagtcacctcccagaggttctgcgtcataacaccatcctcttgagggttaggatttcaggatatgaatttgggggaacacattccgtccatggcagtagtgttcagtcctagagtctctaatctttttggtttgtttttgttttagagttcattttggcttgtatctagaatttctagttgtttcttcttcaggctggaaatactatttgtacattgttaaatttcttttagaaacgtttacttgacgtttatcttcataaatgtcatcagcatggtggtttgacagtggttttggtggagtttgaacctggttctgttgtctgttgtgctgtacttgttcatgtcatttttgtcatccttgtgccaggttatctcaagttcacgctaggcattatattaggggaaaaattattgaaatctttttttataacagctttattgagggataattcacataccataaattcacccttttcaagtccaattcagtggtttgtgtttttttttttggtatattcactgagttgtgcagccttcaccatagtctagatgctgaatttcgtcgctccaaaaagaacactatactggctgggcgcagcggctcatgcctgtaatcccagcactttgggagccaaggtgggccgatagcttgagcctgggagattgagaccagcctagacaacatgcagaaaccctgtctctgctaaaagatacagaaaatcagccaggcatggtgacacgttcctgtagtcccagctactctggagactgaggtgggagaatcacctgagcctgggaggttgaggctgcagtgagttgtgactgcgccactgtactccagcctgggtgataggagcgagaccctgtctcaaaaacaaagaacgccatacccattagcagtcattgcccttttgccaccacccctgttcttcttaggcagccacttacctgctttctgtctccgtagagctgcctgttgtcagcatttcacagaagtggctcttacagtacttgggctttcgtggctggcttctttcatttagcgtcgtgttttcaaggtccgtccatgttgaagcagatttcagttcttccttgctctttattgcttcttgggtcatatgtaagaactgattacttggatccagggtcctgaaggtttacatgtgtattttattctgagaagtttacagtgttagctcttacatttagatttttgatccactttgatttaattttttgcatacactgtgaagtaggggtccaacttcattctttttcacgggggtccccagttgttcctatggaaataacttgattcctagaactctgctttccactaccaaggagcattttcccttgcctctcccgcacacttgggggtgttagcgctccaaaattagtttattctcaattcagggtttgaggttttcagccacccaggtaaccttaaggcagccctcagtccattcaagagccacccaggtaacctcaagacagcccacagtccattcaagagccacccaggtaaccttgaggccgcccgcagtccattcaagagccacccaggtaaccttaaggcagcccgcagtccattcaagagccacccaggtaaccttaaggccgcccgcagtccattcaagagccacccaggtaaccttaaggcagcccgcagtccattcaagagccacccaggtaaccttaaggcagcccgcagtccattcaagagccacccaggtaaccttaaggcagcccgcagtccattcaagagccacccaggtaaccttaaggcagcccgcagtccattcaagagccacccaggtaaccttaaggcagcccgcagtccattcaagagccacccaggtaaccttaaggcagcccacagtccattcaggagccacccaggtaactgtaaggcagcccgcagtccattcaagagccacccaggtaactttaaggcagcccgcagtccattcaagagccacccaggtaaccttaaggctgcccgcagtccattcaagagccacccaggtaaccttaaggccacccgcagtccattcaaaggcaggtttatatttgtttcagttcactcttaactccaagttacattccgttggggtctccatcctgcttatgggtattttgccagggaccccctctttggcatgccctggactacagcttggatctctcttcccactgagccattggaggttctgccttgcccctcagctgcccccttggggtagcaaggcagtcccagccaccaggcttcccttctgaatttccatcttcttctggattttggcccaggccttgcttactatcatagtagctgccttatgctttcggaaagatgcttcctctattttatcttgcttttttttgaaaaaaattttttttaaatttccataggttattggggaacaggtggtgtttggtgacatgagtaagttctttagtgttgattcgtgagattttggtgcacccaacagcgaagcagtatacactgcacccagttggtagtcttttatcccttacctccttcccaccctttttccctgaatccccaaagtctattgtgtcattccccacagtccactgtgtcattcttatgcctttgcatcctcatagcttagctcccacttatgagtgagaacatacaatgtttggttttccattcctgagttacttcacttagaataatagtctccaatctcatccaggttgctgcaaatgccattaatgtattcctttttatggctgagtagtattccattgtatatatgtgtgtgtgtgtgtgtgtgtgtgtgtgtgtgtgtgtgtatgccacagtttctttatcaacttgttgattgatgggcatttgggttggttccacatttttgcaattgtggattgtgctgttataaacatgtgtgtgcaagtgtattttttttataatgccttcttttcctctgggtagacacccagtagtgggattgcctgattgaatggtgcttctacttttaattattttaagaaacctccaggtcgggcgcagtggcttgtgcctgtaatcccagcactttgggaggccgaggcaggcagatcacaaggtcaggagatcaggactatcctggataacacggtgaaaccctgtgtctactaaaaatacaaaaaactagccaggcatggtggcacgtgcctgtagtcccagctgcttgggtggctgaggcaggagaattgcttgaacctgagaggaggaggttgcagtgagccaagattgcaccactgcactccagcctgggtgacagggcaagactccatctaaaaaaaaaaaaaaaaaaagacatctccacactgttttccatagtggttgtactagtttacattcccaccagcagtgtagaagtgttccctgttcaccgcatccacaccaacatctactattttttgattctggtcgttcttgcaggagtaaggtggtatcacattgtggttttgatttgctttccctgatcattggtgatattgagcatttttttgtatgtttgttggccatttctataacttcttttgagaattgtctgttcatgtccttagcccacttttgatgggattgtttggtttcttgttgctaatttgtttgagttcgttgtagattctggatattagtcctttgtgggatatatagattgtgaaggttttctctcactctgtgggttgtctgtttactctgctgactggttttgccatgaaaaagctccttagtttaattaagtcccagctatttaactttgtttttatcacatttgcttttgggttcttggtcatgaagtccttgcctaagccaatgtctagaagggtttttctgatgttatcttctagaatttttatagtttcaggtcttaggtttaagtcgttcatccatcttgagttggtttttgtacaaggtgagagatgaggatccagtttcattctcctacatgaggctagccaattatcccagcaccatttgttgaaaagggtgtcttttccccactttatgtttttgtttgctttgttgaaggtcagttgactgtaagtatttgggttctctattctgttccctaggcctatttgcctatttttataccagtaccatgctgttttgttttgatgactatggccttatactgtagtttgaaatcaggtaatgtgatgccttcctttgtttgttctttttgcttagtcctgctttggctatgtgggctctttttttttttttaacatatgaattttaggattgttttttctagttctgtgaagagtgacggttatcttgcttttctaattgtcttcatcaggaagattggcccaacccacctagtccatcgttgccggcaagtacctgttgtgagaaaagggctcaggagtggggtgggaaaacctggtagaacacttcatagcagaaggtcttatactacacaggtctccctccatcaaaccttcagtctctttcgctgtcatccgcaggaaagcatgtggttctgaccccatgacaagagcagtggctcccaccgctgtctgccagctgctcaggacacacagatgctttttttttttcatgttattggcagtggctgaggctcttcccacatctgtatcatacgggagattcaggagagcttttttcccctccagatgatccttctggaagtcctgtgattggaagtttctactgtcgagcttacttagccttcccagcatggaactttaatatgttatacatcagccaccaccattaccaatttcactaaagccctttacactcacaagggacttctctgccatcattgcttcttaacctcaaagcaggcgtgtgtagtttcatttgtcagctgacagcctgagtctcaggtgggcgaagtgctaccatgatccatagcgatcaagcagggggtctaagtcagggtttcctggcttcacatttcattctcactgtgttgggccatctgacagtttgccgttccctcttttattccacatttctatgaccatagtgccatcccttccgtaaggagggaacgacaattatggaattcagtgtgaagctttctgtatgattctgttttcttcacccgatcccatgcttttggtcacctgtacccatccttctgcgttctgtgcttagctcttcctcagtggaaacccaaaaaaggccgctctgaaatttcagctttcttctttttctcctctgtccttacagttagttaagtatttcctgcacactgaagagcagcccccttcttgctggtgctggtctgacatgaagtcatcctggagtgtcactgggagagggcgtagagccgacagtgcgctgacaaacagaccagtaaaaacaaaactttctcaagatgtcagacgctgatggggtgaaataatcttgtatcgtgtttcaccagatgggagctacttatagatcagaggcacttagctaattatagaatgatgactccatttatgaacggaagttaattgcaagaatttttttttttttttttttagcatttgctgatttttcttaaaaggaaagtaaataatacggggtaaagtatcttttctaaagagtttaaattgttcagttactctatttttcatgtctgtgatgttacttccagtacatataatggtacaggaatctaagaagtcttgattagaaaggaaagtcagatgacaaaactagtttcaagcagttacagaattatcttgggccagcagagacttgagatgggctagtgtagtttcttccagatactgtcattagatcagaaacacttagagatgtaaaaaacattgattcccagtgattcagatttattagggacttaagaatctttttttccctttttactttgtattatttttatatccttttaaggtctaaaatgctacagatagaattgaaacatgcctcccctatttaagtctctctcccttcccaaaggcgacttttatctgaatttggtctttattattatcttggtatgcttttaaaaaaatactttcacttctgtaatcccagtgctttgggagggcaaggcgggaggatcacttgaggccaggagttcaagaccagcctgggaaaaatagcaagaggctatctctataaaacattaaaaaattatctgagcatggtggcatagcctatagtcccagcttcttgaggggcagaggcaggaggatcgctggagccccaggagtttgaggtttcagtgagctgtgattgggccactgcactccagcctgggtgacagaatgagaccttgtctctaaagataaataataataataataataataaaacctttcacttatatgtgtatataaccattcaaggtaaatgatactttattcatgttttagaatttctgtgtaaatggcttcaaactccacaaaccctgcagctgttttttctcactcagaattatctgcttctgatggccactttttgtgctcacgggctgttgctactgcaggccgaggtgccgtgaggtcttccagcacatgtcccacagcctcgcgtttcatgtcttctctaggacgctcctgttacattggaattgccttatttagtatgtgcacaccttcagcatcaccagactctgccagattgtcttccaagattatttgtacaattcccttctcccagcagtgcaggagagttactattttgtatgtattctttcagagttgccttgtacataggcaagcaaatagcaatgcagatttcatctgcttccccctcgccccgccccatagaaagggtgcagcattttggaccttgttttttttttccacctaaacaaagtatcctggagatttttgcaatttagagaatagagcacttcctctttctttattacaggctataacattttattgtatgaatagaccatacttcaaaaagatagtctgtctcccatttatggacattgggttgctttcagtcttttgatattacagacaattctgtattagataaccttatgcttatctcatctcacacttttgctggtctgtagcctaaattctcagaaagagtaatcacttccatgaaggttatcagcattcgtattataattttgatgtatagctaaggcactctcctaggaggtttaccaattttccctcccaccaacaatatatcagagtgccttttcttcctgtagccttgccaatagagtgtgttagccaacttgtgagtttttgctagtctgatgtggaaggatggtatctcagtctagttgtaatctgcactcctcttattgtgaatgacactgagtattttttatagggtttaagagcctacagttgtatcagtatttctgtgaactgtgtttatatcctttgctgtttttgtctgtattctttgcttataattctctttttaaggagttctcagatgactgaggcaaagccaggtttggtaataactacccttgctcagcacccccatttccttttaagaggaggcctcagggaagtggtaggatatcagagaaaataagtctttttgtagtcagataggcagttagggtaaatggcatcccacaaccactttgaataaagttttacttgatttttataattgcttcttaagttcagcataatataacacagccaggaaaaggacttgggagccagtattgtgtggagagatagtgtattagtcttctcatgccgctatgaagaaataccttagactgggtaatttataaaggaaagaggttacattgactcacagttccacatggctggggaggccttgggaaacttacaatcttggcagaaggggaagcaaacacgtccttcttcacatggcagcaggagagaagtgcggagcaaaagaggggaaagccccttataaaagcatcagatctcctgagagctcagtaactatcacgagaacagcatgaaggtaaccgcccccatgattcaattacctcccactgggtccctcccatgagacatggggattatgggaactacaattcaagatgagacttgggtggggacacagctaaaccatttcagacggtataggtagagcacagactggagtcagactcctgggactatgacctgagccctagctgttaggcactgtgtttcttggacaagctatgtgacttctcagtgcctctgtttcttcatctgtaaaggtgggtataataatggtatctgctttctagagctattgtgaggacgagatgctaagacagagtgttcacaatggcagaaagcatgtcatgagccttacataagtaaaagctgctcttaccactgttgcttttcctctgccaccacctctgcatctcattaggctccgcatacgcctgcagagaacaggccggatagctgatgacagcaggatgtttctgggggcaagaactggacttacatcaccgcttcccacactcctttggccaaactgtgggggaggctgagagacagactcttcctgtgtctgctgaaagaagaaaccacatggtgaataagctgctgtctcgaatttcaaaataaaccaaaacaccctaaggcaaccatcttaagcagttttgaaaatgctgctttccttttctcatcaggacgtagcagagtcctggtgctggtggatcccaagttcacatagccagccggggggtgtgggggcgacgctatagggatttcttagcatcttgtggtttcaagcagccctaggtgaacacagagtggctttaatgtgctgtgcaggtaccatagtggctttgccagagttctcaaggaagaaccacaatatgtttactgtatccattgtccttgcagaacctgaatcctgtggacacccacatttgaagccacgtctttaatattcaccgggctgaattcaccttccacatgcccttcatttcctcctgaagatttgggtgttcagtcactttcatttccttttaccccaaagaagttattaaaacaaaattttaagaaacctttttttatacagcgaatcttctggaagtcaactctcggagccttgactgtctggaagggtcttcatttctccctcgctcggatgagacgtcacccgccctttgtgcccattggtcctccgggtgtggagtgtcctttcccgccttcctcctcttaagatttgttctccacatctggttttcagcagctgactgcgatgtgtctcagtgcggtggtgtgggtttttctctttctcagggttggttgtgcttctttgttctatgggttggtgtctctcaaaagcttcacttggggaagcttttggccgtcctctcttgcctcatttttctctcctctcccttttttttttttttttttttttggagacagagtttcactcttgttcatgctggagtgcaatggcactatctctgctcaccgcaacctccacctcccgggttcaagcgattctcctgcctcagcctcccaagtagctgggattacaggcgtgtgccaccacctgcagctaattttgtatttttagtagagacggggtttctctatgttggtcaggctggtctcgaactcctgacctcaggtgatccgcctgcctcagcctcccaaagtgctgggatgacaggcatgagccaccgtgcccggcctctcctctccttttgaagttgcatctgtaggtatgttgggtcctctgatacttcccgtagattgtggatactccgttgtggtttccttcactccttccgtgcctcagcttgggtggacgcttctatttacctgtactcgggcttacgggtcctcttctctcctgtgggctcttcagcccagctgatgacgtcatcttttctgagatccatttttcacttctggcatttctttctttcttttttaaatcgtttccatctctgctgaagttctccatctctttatgtcgcctgccttttcatgagctatttcagcatgttttattttagttattttaacatctttggtcattccaatattgggcccagctcttgggctgcctctgttgaatttgtctcaggagtttccatgacattccatgcgttttgtgtagaagaacagcagagactgacaagagtcctatttccctggagaagggtgtgcccgcctcctaccctgctccccactggcagcctgtatctggctctcctgcaggtggggaggggctgcacgttgttgcagcttcaccttgcctcactctcactcccctactgccttccaaaccattgacgtgttggatcaggagtttcctgtcgttggcatggcatggcccaggacccaagacccgtggtgaaaatctgaagatctcttttgtgtgctacagacaagtgccagctttctaaaccagcttgattttgtttttgtttttggcctaccggccagctttttcgcttgctaagtggtctcttttctctgcagtcttgcctctggctttttgtgccttgggcgaaatccctctgtgctgtgctctgtctccagctgtggatgctctgggaagcctgggcctcctgggaggggcgtctctctgcttccctgccttcccctgtagggcaactgccttgcacctgggagaagggctgtgcctctgggggcggcggggtggggtggggactctccaaactctgtttccttgcctccagcttctgttctgtacctgcatacccagtaaagaccttggagagagttggcaggtgactgtggactcattctgtcaccggggcaccttgaattgtcaacaggtatgccagcccacacagtgagaacttggctggcttcttccctgtcccaaatatggtgggttcccccttcacccaccattctaccagttagaagggggcctgtgggtcacttttttcctgcaaaggagccttcacttttaggatttagttcatgtaggttttttgcatcttcattgctcagaacggttcagacgtactaggacttttttttttttttttaagcatatccacttgttttatttgtcagggtgggagtgatggtcttgcatgctcttctgtgtggtaactggagtaaaaatgccctgtgcctgctgccttttcttcttcacagtcttgccagaagtttatcaattttattagttctctcaaaaaatatctttctgggctatgttaattttttttcctgtagtgtgattattttctactttatgtagttctttttctttattattttgcttctacttttttttagcttaatttgctgtaattatcgcaacttcctgaagcgtacacttagataattgagtttttagccttttttccttatgcatgcattgaaggctacatgtctcattctacacacagtgttaacggcaccctctacgttttgatattttgtacttttattattcagctcaaaatattttctaatttctgtcttgatttcttctttgactaatggtttatttgggaatatagtgcttactttccaaatagttgatgtctttaaaattatctgtttttaatttgaaagaagtcagtgttgttatagctctttatttcaccttgtaaaggccacgtcttggtgactgaggtagattttttttaaaaactaaagaactgccgcataaaaggaacaacccctggtgagccagaaggtagtgcgctagagtgatggaaaggtgggtgagagtcgggaagcatagggtacattcctggaataccattaactcgttatgatattttggggcaataaaccctttcccgtttatctatcaagtggaaataatcatcagaattttcaaaggggtagaatgaaatcatgatataaatgcattcttagaactataataaacagtgaaaatatgaatgataatatttgtattaccccttagggttaacaagtctctaacatgaattgttttataatacaaatgccaagtcttttattaatataaactgctgttatcccatattgttcagtactaatgaaccagactttcagtcttttgaaacacagctttggaaaagatctgtataaatttatattcatagattgcatagtggtcaaatcagagatttcagggtatccatcacccaaataatgtacactgtacccttcaccagttcctcaccatccttcctcccattccctcagtgcccattaaccaatttctcgccatcccccttcctcccgttccctcagccttcccggcctccattgctgtcattctccactctccattcacgtgtaggcattatttagcacccacatgagtgagaacatgtgagatttgactttctgtgaaacgtaattttaatgtaaccattaaaaatctttaatgaagttgcacacgccctttgtcaagtctaaaaaaaccatgagaactgtgtttaaccagtgcttgactttgcacatactcgtgcaagaattactgccaaatttgtttctgctctctgtctccaatttccattactagtggttcttgacagaattaactgactgtctctgtgtgtgtgtgtgtgtgtacacaaatgctgaaaacatgagcctttgtgtaggggtcaaacagaagacaagagccaatattcccagaaacggagtggtcagatttccttaaaaaatgtgcagagattgtgtttctggagtcgagggctcaagttaaaagcaaacaaaataccacaaaatatataacaatttgtttttttggaggatttgcgattctgaatttggatccagttctcttaaatacacattgaacctcataggacatggctcttcaagtagaaatgtattaatagaagcctcatttatagctgttcaaagaattggagtgatcagtgctttacttattacttctgactaaactctgcaggtgcagcttggcaatcaacagagatccaaagtagaaagacagtttcatgaaaataacctgacctctccgactggttgaaaaactttgtgggaataaagactggtttatgctgatgcatgtttttagcaatgcctttcttcgtaccttggacatagttattatgcctgggggaagagagtcccacgaagctgggatgccatgagccacccccttgctgggcaccaggttgatcctgggcctgctctgggttgctgaatgcgatcctcccaagcactgttggagatgctgttattttcctggggcaatgtgagttctagctgggagagaagttaatgattagagagcaaacgtggctggcttgtctgtgttccccattctaagcattcagattacatggttgggtgtaccaggaaagcttcttggaaaggcgattacgtgaggtgctttgatgctgggcagcgtcgtctgtctgctagaaagtcggagctgatgggaacaggagagggatggggacactccagggaccaggcgagtctgccaggagcttagccagggtgtgtgtgttagggtagggctgagtggggaagtgcgtatgtgccagatggcttttatctactttcctttaaaaaacacacaaaacaacactttttcctcttgaggattttagaaaccagtgccgaggactggggaagcttggtcatgaggctcttcttattttagtgatggcctacgtttctttccttctgtttttctttccttcttttttttcttcatagaaatcttaattccagtttctttcctcattccctcattgttttccctttaatcaaacttttggttgctgtttcgaagtagacattgggaacagtgacaaaagcaaggcccagcccctcccatgaacacgagcacaacttagtaggagacacaggcctctgtgggcatgtgtggagggggagccctgccttatggaccacacagaagggccagagcaggcttcctgaagatgggagacctcagctgaatcttgaaagatgagttctatttagctatataaaaaaaagcacagctcctccagaagacaccattcacacagccagcccctccaccctacccaagaggctgctgggaataattggagtagtgctgccaaagaagttcccctgttgaaaaaaaaaaagaaagaggggccgggcgcagtggctcacgcctgtaatcccagcactttgggaggccgatgcgggcggatcacaaggtccggagttcaagaccatcctggctaacacggtgaaaccccgtctctactaaaaatacaaaaaaaaaaaaaaattagccgggcgcagtggcgggcgcctatagtcccagctactcaggaggctgaggcaggagaatggcatgaacccaggaggcggagcttgcagtgagccgagatcgtgccactgcactccagcctgggcgacagagcgagactctgtctcaaaaaaaaaaaaaaaagaaaaaagaaaaagaaagaagacaaccgttttttttgaataaaaacatttgccagagatcatgggttttggcaggttatgttttatggggtacagccttttagtgtaaaatgaagagcatgtcaggtgcgtttgtataatggaagcacattttcatttatttaacactattaaatataatcgtggggagagttcaggtttccttaatgcctgttaggggagaaatactgggctggatacttcacatttgttttaacgtttagttttcacaatgaccccctgaggtattattttgtgcgtgttattgaggaaggaagcaaggctctgagaattgctcagcttcacataaacagcaagtggtccacctggggtttaaacccaggtgggtttgacgtagaagctcaggagttttccattgcgtgaacatgccttccctagtgaaaagaaagtcttgtcctcaaatcaaataaaaatttgccttgtcatttggagacttaataaacaccttagggtaggtgagggagtaaagaccaaaaaagcaattagcatgaaagcgagagaaacaagagagatcagacacacagatcactgcattgaggttcaggtttgctcatgcttccacacctcggcattagcaaagaggagatatgacagcgagctctctgggtttcttctttcattttctttctctcttttgtagtctcaactgtggacatcactctgttgttttttcataaaacagctgaggagcaaaatggctggaaacactatcctggtctcttgtcaggccttggatttaatcccagcaccagcacaagctgagggaatttggatctgtctgtggaggcccaattgcaaaattactacacacatatctgggactttggtgtttcttttttgcccagaagaagcttgagtttaactgaaattgcagcttagtcctaaaaagaatagaagacattttgaaaattttgcctgctaacttttcagttttaagaatgtaagttttgcaagtgctggaaccttgtctgtcttatttgctgcacgtcccccgtgatcacagtgggcctggttgctgatgagctcagtaggggttggagaaacatgtggtgactgcatgtagggggcggctgggaaagccctcgtgcacggaatcctgtcctgcaggctcaccatccctgcatctggaagtctagtccagaatcattttctgagctcttatcataggtcatcaaaatgctgacagtaatgacggtgttgcttccatggtttgaatgtacacgtgccacatgctggcttagacttcttccatagcggatctcactgtctcagtttaaccatagtcctgcaagacaggtaatcttcacacttattccctcgctggggaggaaactgaagctctgagagattaaatactttcccccaaggccacacagctggtaacagatatatgtatatatatatttttggagatggagtttcactcttgtcgcccaggctggagtgcagtggtgcgatctcggctcaccgcaacctctgcctcctgggttcaagagattcttctgcctcagcctcctgagttgctgggattacaggcgtgtaccaccacacccggctaattttgtatttttagtagagatggggcttctccatgttggtcaggctggtattgagctcccgacctctggtgatccgcccacctcagcctcccaaagcattgggattacaggtgtgagccactgcgcctggcctggtaacagatagtcttactgagaaagtggactctgtcagacaggatgtgctagcctctctgcctcctccctcttccctccacatcctcactctgcctttcattaaaatggaaccatccttcagcaggagaaggaacactttggaaacgccttcctttgctcatctcctcctcccccactcctagtctctccgcttcccttagggagtcacggctgtctctctctctctcggctcatctccctccgtggagctctcttctccctctccttggagactgtgctctcctggttttctgcctgctttcccgtgccttccagctcagcatcttttaccagcttctctcctttaactctactccttgacgccaacgggctccgggtccttctccctgatctctgttcttctctgtcttgccatcttccctggtaaactcatccagaccaaggctgtgagcatcatccttttgccagtggctcccagtttatttctagcactgactagaagtttgctgttgacttcaaactggcttctctccacccagcccatttctctgtccagtcttcctctgagtaaatagcaccacccagttgctaagaatccaggagtcaccttggagtcagttctttccctcaagtcccatgtccaatccagctgggcctggcgattctccctcgggtacctcctgactccctttctgtccttctgtcttcagtggggtcactccagcctctgctgccacctgcacagctacagcaacgtcctctcatggatttccctatgctttttcgttgttgttgtccctgtataattatttcttcccacagcaactagagtgttttctacagccttttaacaatcaagtgctggttatgctttaggccctgtcttggggcatttaaccttcagaaggtaggcactgttgcacctgcacttttcagatgaggaagctgaagcacagggcagttaattgatttgtccaaggctaaagccaggattaaacccaggcactaggtcctgagccaatgctcttgaatccagtccctcctctccttgaaatgctcctagggtctgtcttctcctgggcctgaagtctcctactggcctcctgcctcatctcctaccacgttctccctctcccgtcctgccagtttgcgctccgggttattcccaactcttcacatccaccgcagggctttttcaccagctgttcctgctgcccagagccctttcccgccagttgttcgcatggctggacccttcagcatcattgcataaggccccctggtctcttgatctaaagtagccacccactatcttttgttctttgtggcacttactgcggtctcgtgttgctgtcattcttttggtgacccttattgttcatggcgataaataaattacatggaatgaaactccatgccagcaggagacgtagttgaatgttccatgccctatgttagtaccagcgttgatagactttgggtgaatgaatgcatgggtgagtgaacaaatgagtacctggcacgctggaactcagagccaggtgctttgagcccatgaatttccctaccacgccatgtgcctctgtctgtacaactcacagttcaagcctttaagtatctctgcctttgggcatactcacaaagtgtctgtgctttttataggtgatcaaagaagcctacagtggttgtagtggccccgtggattcagagtgtcctcctccaccaagctccccggtgcacaaggcagaactggagaaggtaagggcgctgctcttgctgggtggggacggtgaccttgcagtggattggggtctctttcaaagtttgataacattctctgagaatttcagcgcttccagttaaaaaagaaaaagtgcagtcgtgcttcccatctttttaactgcctgctttgcgctaagcttgaattagtcattttacagactgtgtagttagtgttgttactcccagctacagatgaagcaatggatttaaatgtgtgagggccttgttcaaggtcacatagctattaaatggcagagctgaagtctgaaggcaagcctgtctacttccggaatacagcaggcgtttcataaatgtaccttcccaaaggtctcttcccagcagaccaggatgtgtctctgtctccctttgctttgcactcttgttgcttgttggaaggcagaggggcacagcagtgggcggggatggcctgtcatctgtacacccctttttgccagaaatgtatggagcccatcactgtgacgccgcaggccctgctctgcatgcactttgcttgtctaaatccaactgatattgtttccttggagacccctggcttcctgccatgaaaccttctgttggcagcttgtgtccctgggactttctgagccctccctctctaacctcctgccattgaagagacagatccctttttgcctgtcctcatataagtcaggattctccagaggaacagaattaatgggatgtatgtatgtagaagcagatttcttagaaggcattggttcacatgattatggagcctgcaagtctgaaacctgcagtgtgggccgcaggcggagacccaggagagccgatggtgcaggtgaagtgtgaaggcgtctgcaggaatttagggagatttcactggctcagggaggacagtgtttttcttccactgaggccctgaaatgattggaggaggcccacccacattacagagggcaggctgcttactcacagctccctaatttaaatgttaatctcatccccagatgccccccacattgacacgtgaaattaaacatcacagtcctcatcctcataccgtaatggaacaggctgtttttctccttgactacaaaactaatctctgctcactttagaaaattcagaaagctcatagaaacataaatgggatgaaaaaagtcactcattacaacagcacatagaggatgcagctcgtcttaacactactgatatattaaccactctttcctgagttcaaggtttttttttaatggtttggataagcttatgcataaagtttcttatactgcttttttttttttacttaacctttatattattagcaaatttccaggtttttaacaactcttaagccacaaacatttttacattttcattagcttaatgtcaaatttgtatgactccattatcacttatgtaactgccccccccattagttgttttgtccttttgttttgtctttttgtttgttttctgagatggagttttgcccttgttgcccaggctggagtgcaatggcaccatcttggctcactgcagcctccacctcctgagttcaagtcattctcctgtctcagcctcctgagtaactgggattccaccaagcctggctaattttttgtatttttagtggagacgggggtttcaccatgttggtcaggctggtctcgaactcctgacctcgtgatacatctgccttggcctcccaaagtgctgggattacaggtgtgagccaccgtacctgtcctgttttgtccttttttggccatctaaaataaaatagtacttgacatcttttgcataatttttgctgattctctgcctattacctgagaatagatttctggaagctgaattactagaccaaaggatagacctctttttcttttttaagatctcgattcatgttgaaaatcaaattgctttcccaaaaggttgatgcaattttatttcccaccatactgcatccaagttcctcatccacgcactcacaccagaattggcaattctgctttacttatgttggtttctaaggcagtaccgtgagcacctggctggacctgttgccctggattcccccagctgttcctggtgtgagagccagggcggtgccagctctaggtcattgtatccctggaactcagcttcccactaagtggcactggtttcttcactgcagctcttaagggattgcccctcgaattccgagttgaacacacatgttcctttgtgcctgggaactgctcacatatctcatctgtgtcccagtctccaaggccctcgtggaaggcacaggctctgaggacggtgtttggaggccactccctccgctatgaccccacaggttcttgggtggcaatggaaggggtctagctgtaaacactctacctcattcagatactgacgtggaatcctaattactcattaaatccagacgttaggactgagatagtgacagtcccccatccccctccaagggttttgatagcaaccttgccctcactctgtgtacattctgagtgtattgttacaagcagatacttgacactcacccaattaattattggtgaatgacaggaagaaattaaatggactatggaatatttacttctgcgaggataatatggcttggtgagggaaatattttttgtaatcataatatttttttcaaaatcatttacaagaagtgatttgaatgaaataggcatgagacagtatatatataggttagtataattatagcctcagtgaggtttttctttttttttccccctctggatgtttttaaagcggttgtggccacctaaccagccagtctttgttatagttaagctctaaccacttctggattgctatgaatttggcctgtgttttctttcacttttgagataacttttggttgatccatcacacatcactgggtccaagtgaccactgtaagaataacttaatctttttctccttacagaaactgtcttcagagagacccagctcagatggggagggtgttgtggaaaatggaattaccacatgtaatggaaaggagcaaggtgagttctgcttgtgccaaaaacatatatacactaaaaaaaaaaacaaaaacaaaaatctacagccaggtttgtaaagtctgattgtacgaaaaatgtcctgggtgattcagatgtgtagatatcgtcatcatggcagaggatactgatgggagtgccggaaaaccctttggttaacatcaaccctgcaggtcttctttttccatcctgccagaccttggccgaggttgccatctgttgtctttttctgccctgcatatgttttgaacttatgactcacagctggttatttcttcactcgatctgtcactgagacaaatttgcattggtgagcagccggcatgttgcttagggacctggtgtccagtgaaaagcactttggataatgaggcaagaaacccactttcccattcaagctctgcctttgctgagccccatgatcttgagcaggtattccctcttgatgagcctcagtttccccatctttaaaatgaggaggccagacctgccgatttctgaggttcttaaaaatgattttctgaaaatgtctttattttgccttcatttgaaacatttttaaaaatgtacattatataaaaatatacataatataaaatataccatattaaccatgtctcagtgtacagttcagtgcattaagtacatttatattgtactgtcatcaccgccatcagtctccagaactcttttaatgttgcaagagcgaagctctgtcccttttaaacactgactccccattccctcctcccccagcccctggcacccgattttgcttcctgtctcatgaatctgactcctctagggacctcattgaagtggagtcctacaggccgtgtccttctgtgagtgcttattccacttagttccatgtgcttaaggttcatctgtggtgtggcctgtgtcagaatttctttcctttttaaggctgaataatattccattggatagatggaccacattttgttttcccatttatctgtcgatgaacacttgggtggttcccaccttcgggctagtgtgaaagatgctgccgtgagcatggatgtgcaaataagcctgtcttactttttcaggccagctttctggagacagaaattaaatgccataaaattcaccctgtttgccatactgttggtgagttttgacaaacactgacaggcacagaaccatcaccacaatcaagacacggagcacggctctaaccccccagcccctgtgctctttctcccccgtctgcctctgcctctacccgaggccctggcagctgctgatctgtttcttatcctttaccagaatgtcataacgtggaagcatctcggttgcagacttttgagtgtggcttctttcactcagcacgctgcgtcggagagtcgtccgtgtttgtggctagtgtcactagttggttctttgctgctgctggaggcattccactgtgtggatggaccgtagtcagcccattcacctcttgaagaacatttgagctgtttccactttggagcgacggttgaaaaatctgttctgtgcattcagagacaggtttttgcgtggacatatgttttcatttccctcgggtaaatacctaggagtggattgcttggtcataggcttctctccagcctcagtattgtcacttttgttttgttctttctatttgagccattttaataggggtgtagtggtatgtgattgtgttttaatttgcatttccctaataactaacaatgttgaacatttttaaatatgtttatgtgccatcagtatatcttctttggtgaaatgtctccagatattttgctcatatttttattggattatttgtgcttattgagttttgagagttctttgtcttttctgaatacaagtcctttatcagatgtgttttggatgtatagtctcccaatctgtggctggacttttaattttccttagcagtatgtggacggaggtgaagggcaggacttgtggctgtggagggagagttcccgctgcaaaaccagacagcctgtttgctcattgaacctgtgaccttggctgctcagctgagtaatccaaccacccaaatccacctgcccactcctggagggagccaagtgtttcctgtctctgtggtgaaatcaccttaaaccaagtagcaatccagcccactaagaatcttggagctcaaagaatctggactgttatgacattacagagttcactctcagaggtcacgatacccacttttttcatatgtggttttctaagtctgtcctatctgagtgcaattttggttctgtccatcggaagttattcagtggaaagtattatctgtgtcttccacagggcacacattatgtgtaatcaaaaccaggaaagctatctttaagttttgccctgaaataaaataacatacaatctcaatgttcctgcttagaagttgaggcacagcagacgttggtttggttggttcattttctggtttgctgtttcttctcccagtgcatctattaggttctacagaataatatgtgtgtctggatgcacttgtaagcaaatatatctgtatttaaaattctcctgtttcctcttaacaagaacaaccttctatgctttggaattaaacggtggtgaccttggtttacacattttctttttgtctggcatggtgctttgcatgtagcagacgctcggtagttactggagaaagttaaggttgaagtacattctaaccttctctcttagcttttatccttgcctctcactcttgaccagtttgcacctgagagatttgagttaagctccttttatcccagccatgtggtaactcagacacatttctctgcgggctgcatagagaaaatcctgaactcatacagctttttcttagtgttagaatctcagatgaagaaagagacagtccaggctccatgcggtcaaagccacagggaacgactctggaactcctgtttcttctctcaaggcggaatccctcctgtctaataaaccgacacagtatggttgatcctgcagcaggtgtgaggagtgtgggctgagaaggtcctgggaccttctgtttgggggctgtgaggctcctcagccccacttcacatctgtaagatgtgatcatttgtgaatgtgtctgttggtaaaagtcattgaataaatagtctgacagtattaatttctcatgcccctattcctcccagtagcctaaataataatactaaaaagcacctgaattcccgtttccgtcggttactgggaaactctctgggtttatgatactcatggttttagagaatgcccggcgttagtcttgctccagtggcgtgcgccagtgcctgcccacctcatgggccagcgtgtgcctggatactccagcttttctaccctctagctgcagggggctgagcgttctgagtgttgagtttttcttcctggttctgtgatctgtgctcatctctgccttttgtttgatacatagcatcaagttgttctcgatggttttctcctcatgttcccatatacttggattttttcgccccaggattaccatatgtctgcctttgtaaaaaactgatcagggagtattcaaggaattccaagttttaattatgatctcatttctttgcagtcagagtcgagcaagcactttgtcggtcaagttgggcgttcatctgacaccccagctcaccgcgatgagctgcattttctggggggggccacattatctgtgggggatgcctcttgctccaccagcctttctgagggtgccccgggcactcgggctgtcctggccaacaggttattctttgtaaagctcacgggaatgcggctgtggtgaaacatcctcctctgggtcttcagaaacagctgggaggggccgtccgctgttgctgtccctcttggtttggttgaagtaacattgaagtgatacagctgtcctagccgccgctccctgtctgatggtagctgggaggggctgtgccttcagacttagggatcgaaagccagtctcggcgctttattttaaaagagggtgtgtacgtgttgggagagtggaaggaggggtgggggtggcattcctgggttctttgtttctaatatcacaggaggcctaagtctgatttgtttaaagtcacacagaaatgctgggactgtgttgcgttagtcagcttgggctgccataacagaataccacagactgcgtggctgaaacaacatgcatttagacggccctggaggctggaagtccaagacccgggtgccgccagggttggtgtctagcgagggctgtcttcctccaaggcggctcccctcccgcgccttcacacggcctttcttctgtgcctgtgccgtctcttcttagaagggcactaacgctataggaccaggacctaagcgggagggtggagtgtgggagggcaaggcccgaggcaggagacaccaggggtatgttctgccgccctagcgtgtttggctgtggtgggggcaccagggtggaggcagaaagaggaccacttcccgctccccagcagagagaggcggagattgggaaggataaggggactgcgtgtgagtgtgtgcgtgtgcagaggaagggtttaggagttaggccagggcgcgtcgtcttgtgtccctggccgctcttcctctgcagttcttccgtgggatgtgtgtgggttcatttgttcctgcggtgggggtgggagggagtccttgactctcatcaccttctgaagtgtctgtgatctccgcagccagcgggttgagggattcatgctggagatgaaggggaaagggtcgggcgctggggtttgcccacgacactgagaatctctctgtcccctcagctccagtgagccctgcagtgcagctgtgtcccgagcgcctcgccggcctcccctcagctccagtgctgggcacataacggccctcaggagatgagacgggcagacagctcaccttctccgagggtcgctctctggcccaaaggatcttgtcactcggttctggtgctgtctcacacgcacgttctgatttcttgcctgatccctgcccctgcaattccgccggaggtcacggacagagccctcggcagtggagagaggtgccagtgacgggatggggcagacataggatgccagctggcagctgactctgggcctccatcgtgggagatgatggggagtgatgagaaccgccccgtgttgtccctcaccggcccgtctgcatggagactgcttctgtggtcctgccgctgttgcttgcccacatgcgggtccagagttgctagacttccatctttcaaaggaagccaggcatcatttttatgcacaatgtgtatgagttctatgtttcaaaaattaactccaatttaacactgtcctggctaaaccgaatatgaggggctggaaggcaggcccctggtctgagagctctgcatagggccgagtcaggtgtctcacagatggccgaggggctcctgaggaagagtcaattccccttcctttcctgggcctccccttgccagccaggccagagctgcactagctgccttctgttcctcagacacttggggctgctttcagcctcacagcttttgcgtcagtgatgtttttcttacctggacggttttctccctgagatgtgcatggctaattattaacttaagtcaactcctggacaggctttctctgaccgcccggctgctcttccacataaccctatcttagatctccatgtggtccttgttacaagcttcctaccagcagccctgtgttgtgctgaaatcccagcatctagaccaacagccagcacgtagcaagtgctcattaagtaaaagttgagggaaaggccgggcacggtggctcacacctgtaatcccagcactttgggaggccaaggtgggtggatcacttgagtccaggagtttgagaccagcctgggcaacatggggaaaccccatttctacaaaaagtacaaaaattaaccaggcctacgtagtgacacgcacctgtggtcccagctactccggaggccaaggtgggaggatcagttgtgcccaggagttcaaggctgcattgagctgtgatcacaacactgcactccagccaggggacagagtgagaccctgtctttaataaaagaaaaaaatgccaagggaaagaagaaatgggttttgatgtatgttttttttttcaattaatatctacaattaaaacatgcttttttgctgttgttactcttgacagtgaagaggaagaaaagttccaaatcagaggccaagggcactgtgtcgaaagtcactgggaaaaaaatcaccaagatcatcagtctgggaaagaaaaagccgtccacagacgagcagacctcctcagctgaggaagatgttcccacctgcggtaagactgcgcttcccggagacgagcagcgtgcacctaagtgggtttcattttctcctgcagtggtgtcggtacccagttcatccaaggctcgttaatttgagctcttttgcattggacttggaatcattcagatagtgggaaatgtattaaatgtttacatttttgcctcttattcatacaagactttgcaggccttttagatgatctctaaggttctttcaaggaaaaaaaaaaatttccctttaatcctctgaagttcccccaaatcccttggaagtgtttttaaaggacaacatacgcaggggctgctggtaaagaaaggattatgggaaaacctttacagaactaaggccagttctttcccttgggcaaagtgataaaactaagtggggtggggggagtggggagggatagcattaggagatatacctaatgctaaatgatgagttaatgggtgcagcacgccagcatggcacatgtatacatatgtaactaacctgcgcattgtgcacatgtaccctaaaacttaaagtataaaaaaaaaaaacaaaaacaaaactaagcttccttatcacgtcactgttagtcactttcctgttgctgccaaaggaatgcctgaggctgggtaattcataaagagagaggtttatctggcttatggttctgcaggctatacaagtatggtgccagcatctgcgcagcttgtgatgaggcctcaggaagcttttactcgtggcaagggcagagggggagctggtgtgtgtcacatggcaggagaaagaggagcaggtgccagggtcctttaaaccatcagatctcgcaggaaccacaggtgtgagaactccctcattactacagggaaggcagcaagccatttataagagatctgctcccatgacccaagcacctcccaccaggccagccccccacactggggatcacatttcaacatgagatttggaggggagaaatatccaaactataccaatgaccgaaccaatttctcaaaccgaagtttcaaatccagtctaacacacagaccatctccccggtcagtctttcatccagtaagtcatctttgagcagctaccttttggtcatctttgagcagctaccttttggtgaccacaacagccctggccccccatggcttccagtctggtagcaaaagataagtacaagcccagttaccacagaaacatgtatgtaataattggctctggttggcgataggagggaaaacccaagaggccgtgagaggatcataggaacctcagtgggccggggggatccagcattgtggggtggtctccatgaagacatgggtgagagtttccatccggaatgccttctaggcaatcaagttcagaagaaccgtgcagctcttcctaggaggaaaacttgatgagctacgttttcgagaaattataggaatgtgctgtcattttccttgtgtactattgcggctcactcagctccctgcagtgtgagcccatcattccttctatttgaatagtcattctagttgcccccaccccttattgagcacccgttatatccaaggtgttgggttttattttgagatgccaaaagatacctcatttagttcctgccccacagcgcctaaatggggctatacacacaaagataaatgtattcaacagatctcacgtcccagcggtgtgggctcatgccacaaggataatacagaggatgggccatggtggtcaggaggagggatggattgcaggggcagatgcgaggacccagcaggcactatggcgtgcactgtcttgaagggaggacaggcaaagtctcagctcctcggcagctttcacagtgtgatctgggaagttgcgtcatactgacttctggtggacacaatgaagttgtctgggcagacagcagtgaaggcgtcatgtggttgaaggagtcttgcagaggggtcctgttgaaacagctgcctgtggggttgagttaggagggaaggctatcaccataagggtaaccgaggagcctggtgcgttccaagctccctgaacttggtcaaatggcagttgagtcacagaagcaggccagttggtactgatgtttttccactaccctcccttccctccctaaataaggctagagctgaaagggcggccaccctgccgaagtgctgtcagaggaaacagctgtagcacggaatggggagggtgaatgtgttggtgccccagtgctgggcccgctgacctctgcctttcttggagcgcatggaaggtgggactgcctcacatcagcccttgagagttatcgattaacaatagaaagcgggaattagggattcaatacaggagttatggattaaaaacagaaagcaggaattagccaacaagaaggaaactactcttttgtttttgttttttaatgctccaggtcagtggaggaaatagaaattcttccttgaaaaacaattaaacattaatatgaaaggcaattgagagactttggcccaaacccgtccatttacaaaggagagcactgaagctcagagagcttgtatggcttgctcggagccacacagcgagctgagaacagagacagcctctgacccaactgtgctggttccctgtcccacaggccttccccttatcccttcccccgaaagatctgaacactcccgtggctcctgataaatagctgcatttgtgctggtgactagacactgcggtaaaccctcttcttgggcactttcttggaagcacagttggtcgctcagggagcaggaatactgaatccacagcatctaattagacacatggattcctatcaaactgcttagtggacagcttttgcctcaatattaacagaacatcctctgtccacaagattttaaagctgtcatctaattccttgcaggggaaaggggagaggggaggggcttttagaaaaataaaggggcaacagtgaccattttcagttattttagtacagctgcaaagtttcaggcagaaaaaaggagctggacaaaggcccttgagactgagcctgccaagttgagtctccgcagctgctgctctctgttccagggagatgaagggccgagctggactggccggaagtgcagtgctgctgagcccataggacagagctcccaggagccactgaaagcggagttcaaatgccagcccttccacacagtgcagctgggtcagccgttcccctaaatgcaggacagagctgctgtgagggccttgtttgtgggggcaggggagggaaggctctctgcaggtgcttgccggctggaaaggtttaggggggtttgggccaaagtctctcaattgcctttcatattaatgtggcgaggattgcagcctggctggccaggtccgcccgcctaaccctgcaacgcctattgagtgacgttgactgacgcatttagcattgggcaggtcagctcagcacacagccgcgtagataatatgatctgagacatgcgcaaaggcccctgaccaaaatttatctcttatttgcccttctcctgggcttacaagtcctggaattattgtcaccgtatgaattaagccgttgttaccaggaaatgcgtttccacctttttctctcttccccatccctatttccgcctgtggctgggactgtggcaccttttgactggctcacctcattctactctgcttccccctccccaggccaccagatggaagttttgaaacgttagactaaccgtatcacattctgcattgagaaaaaccaaaagtgcctcctttgttgccagttcagggcctctaacactgctgtccccgcttcacttttccgccttctacatgactggcgtaagaacaggggctcattggctcactgcctgtgtccacagcaccgtgcagagcttggcagacgataccagctcagtaaatacttgttgaatgccatgcattcctttaagcaaattgcttcacctctggatgtcaggctcctccatctaggaaatggctcaatacttcaattcctttgttttcataaaaactgaggataaaatacatgaaacactgagctcagtgcctagcccatcatttatgctcagtacctggtcactgtgattatccatgtattcatccgacatgttttttaaaaacatcacctaagcataccagacctatccaaggcacagtaaatgcaacgtcagacaagtaaatcatgagaaacggagagactgagagaaaggaaaggccccagggggcaagtcggaggcttcatggagcctgggtagccattcccagggtcccttccagctgaaatgttctgtcactttatgaagctctttcaatggcaggattttttagtagatattcaggaaagctagatacgtctcatttggtatcataatccacctccacgaaaagtagacgaagccaggcactgtagcatgcagctggaatccccacgactcgggaggccaaggggagaggaccgcttgatgccaggagtttaagaccagcctcagcaacatagcaaggccccacctcaaaaaaagaaatcagatgcagtctgatgaaagggcaggaaggcattcttagtccaggagccaccatgacaggctgttagtgtaccagctcctctgcccctggcctcgtcgaggacacactgcgaagagtgggaaggaggcgtttggcttcggcaggcctgtgatcagctgccagcagtttcctgacatttggtttctccgaaagctgcttcttgatgcccctcttgcaggcccctctcctcctagctgatcagaaacaaatacttgctaagatataatgaacagttacattgggataaaacgtctctcaaaagtgttgaacgttttggccacatgtaaccaaagcacagtagcctctggggtgggcaggcactatcatttcccttcctaaagagaataaatacatggaaacgtggccactcttctaaaaggctctgcctgcctgctcttctgcagctgccggaattcgagagccacccggcactgagacccgcgacgccccatatccggaccagctgaccgggagggtttatatctgttcccctccatctgtattttttgtttgtttaatcttcgagctgtaaagttagttttctatttctagcatgatcctcttgccacagtgttgttgcaagaaactgcactctttattttgaatttggagcagaaattagcagaaaacattaaactcagaaatttttaaaattcagtaacaccctaccataatatgataagtgagattcaaaaataaaatcagttctatctggacctgccttgttaagtggttaaatcttgagacgccctgggtgagccttgaagctcccgcctgcagttcttgatccaggagccaagttggccccgtcctggctgcactctggcaccacctggtggtggatgttgctccagcgtaacctttcctggacatgacttggggtccgggtcagcactgatttcatcagccaggctagaggtgtcagattgggagaatattggggggtccagaggaccccctgactctagactccttagatgaggttgtctgccatttccttcgtggcctcttcatgttccccagccagaaaataggaactttgggcctccccattttgagaaatggtggcagggggctggatggggtaggggcagtcgctgaaaacagacaggtgactgtggatttacctgctgttgtgaacaggtctgttatcccaggggatttttttggggggaaaattgggggtattacgataattgcatataaaatcatgttctaaataaaatgtggatctgtccaatataatcatcccttttacagctgaaatgtcaagaaattcatagtatctggtggccttggccagattctgtcagggaagaagacaccatgagagtccatgtcccttttcgggaccaggtcccctgtggttgggaatcggggccaggtctcctgtggctggggatcaggactggaccccctgtggttgggaattgccgccccactgcagagtccatgccctcttggggactgggtcctctgtggttggggatcggggccgggtcccctgtggttggggatcagggccggtccccctgtggctaggaattgccctcttggggactgggtcccctgtggttttggggatcgggactgggtcctctgtggttgggaactgctgccctgctgcactgtgtggtctctgtcattgaggtcactggcatttcaattcttggtttcttctgctccttatcacggcctcgtgaagggttgcctgggccctgaccactccagagcacgggctgttttccttgccctgtagcttactgctccttttcagaagccatttttgggcatgttatcttaatgcacctcagtatgtgaagttatttgaggggactccttgccttcctcttcctttcagatacaccattacatttgtcaactcatgctcaaaacatacttaggattgatacagttggctgtcattgtatggaagtctaaaaatgtaaaagtgtcggctttcagcatgagtggttactctagatggtgtcagagccatggcgagcacgtggttcccagcgctgttactcgggtgctcagatatgatagttgattctctttttaagtagaggtttcttttttctttttaaagactaaatgtattggcctataattccagcactttgggaggccgaggcgggtggatcacaaggtcaggagatcgagaccttcctggctaacacagtgaaaccccttctctactaaaaatacaaaaaattagccaggtgtggtggcgggcgcctgtagtcccagctgcttgggaggctgaggcgggagaatggcgtgaacccgggaggcagagcttgcagtgagctgagatcacgccactgcactccagcctgccagcctgggctacagagcaagactcctgtctcaaaaaaaaaaaaaaaaaaagaataaatgtattggaactacatcatttacaaatagcattttgcagaacaaaaatagtaatgtaaggccccagttgtattcatattaacagctctttatctgccgtctttaactcccaacaggggttcaggtcttgctttgctgtgtggtcttggacaagatacttcacattatctgggagttaacgtcctccttcaagaagtaaagcctctgagactctttcctactttaattctagggcctcttcacctccctgcagccctcctaagtgtctgaaatacaaggagcttggatcgagtgtagtttgctctctgaacacaagagggcggccacggcacaggccttggagcctcagcctggctcctcctttctctgtcactccctaacaacatcagcccacaccccagatgaaagttttagttccagaagaagcagtgtgcatttctcttcagtgtgtgttggtagaaatgacatcatattcagccaatgaaaatttagactttataagtgtgtacctagtaagtcactgaaccaatagttataagtaataaagcatcattctgggtcctgaacatacctctctctttttttttgtctttatagcatttatcaattgctaataaggtgtgtaagattgagaacataaaagcagtaagaaacatcctccaaaacccttttggaaaggcattttaattgattagttttttttttttttttttttttttttttgtgatagggtctcactgtgttgctcaggctgatcttgaactcctaacctcaggtgaccttcctgccccggcctcccaagtagctgggactactattggctggaaaaggaatctgaaaaatcagaattggaaaggatgtattttgttttgtttcttaacatttttgaggtaggggtatgtgtgacatttttgaggcaggggtatgtgtgtgtgtgcatgtgtgaattgaaggagtagctgaacttgagttaggaatctggtacttccttttctgccactatcaacattttctatgctatttatctcgctttctaaatcttaaaggaagggggcagtaatttactagcattatggtgtggttggaaggtacagccaccctggtatctattttttcatgtcttgttatttctagaagaattcattttatgtttgtaacaagtgaaaagtgtccatttcctgtatttgaggaggtttttttttttaaatgaggataataatttttcctgtcattctaccactcctctatctgtgatatactgaagatgttgtgccataccagagacacggatcacaaactttcatgaagattcagactttagagtttagatttcctccgggcagcttcacccgtcgctttgcagtttgaggagcaggaaggcggcaggtgcgtcctcagcctcaggtgggaacctgcactcagggcctctgccatctgcgggctgcttccagcgctggggatcttagtgcctcccagggcctcctatttcttggaaagttttcatttttagatagtttttgtttcttcatgttaagccaaaatctgcctgcctgtgactcttactctacttgtatcatttgcagctcctcaaaataagtgaaatcggtttccagtttgaaggcagctgtcgtgcccccatcctggccatccgaaacctgatggcttgctaacttctcacgtgctttaggtgaattccatagtcccacatcaacaccaggcatctggtaactggttcgttgcacatgttaaatgaggggcttccagatacggcctgtgtggtgtcatgaaaagcccccaaaacttgtgatgccgtagccacggctctcctagtttatgcgaatttgcatttaaagcttgatcgatcgtgtgaaggatttgttttatccacactcccatccctgggcctcctcagtgtgaccctagacgtcttcacctcgcctggtcttgtccgaggcggctgacctgtggccttgtgtctccgcaggctatctgaacgtgctctccaacagccgctggcgagagcgctggtgccgagtgaaagataacaagctcattttccacaaggacaggaccgacctgaagacccatattgtgtctattccgctccgtggctgcgaggtgatcccgggtttggattctaaacatcctctgacgttccggctgctgcgcaacggccaggaggttgcagtattggaggtaggatatttcccaggggctgtactccacagagggacacacgcggtgatcttcctttcaaaaggcgaatgctgactcctctatcaaaattcctcccatctcgctgacagtacctcttttgggcccaccctcttttctctcactgcccagtccatgagtctttgctttacttcttgcctcagttttttttctgggagatacgacaatgacggcaccccagcaccactttctacccatttgtacacatcagattgacttgcctccttgtctgagttcctctttatgcctggttgcagggaaattaaatacacaatcccatagagtacattgcttttctaaagcacctggaaaataacttgttttaaaatttccaggaaagctctttcccccaggagctctttgaaatggtggtaaatgtttcctttggaatgttctggacttctttacagatggaagactttttggggccatctgaatgccttatagacggcggccagtgagccacatgacacagacactgaaagagcgcctttgctgtttcggagccctgggcttggtgcacgctttgttatttatttggctgcttcactagaatttcttactcatgaaagcagaaaagacagttaaaactcatagctacatactcaaaactttcattattgaaagtttttaatttttcatcatagaaaacattctgttgatgttttctacccagttttagacctttttttcctgtgatttttccctttatttctgagtcttttcccccacttagtgttattatgaccaagatgcaaagatacacacacagacagatctgtgcattcacacgccagatggtcgcatccatgtcacgcaccttgtgctgtagaatcgatagaaaccagttcatgtgaggcgtgctgggtggccggtgtgtggcagaaactcacctggtgtgggagccggctctacatgcgtgcacagtgacactcatcggcagaggagagagtgcctggggctgcgacctaagccacggctgcccagtcaggcagtctttctgaagatcttgaatttcatacataggagttcattgcagggactgttttcatagaggctgcttttttttttggtggggatgaaaaatagatgaacactgtctttttcctgcagggctcaggacgtaagggaaggtcagaagcacgcattgctgcccccgtggctggttttgcagcagtgtgatctaacagagagggctgggctcagatgggcttgggacagctgggttccagtctcagctctgtgcagaccctgaccacggccaaagcttttgttctctctcagcttctttacccaccgtaaaacacgaatgctgagctagagtcagtgtaccttgtaaacatttatgtaggctgaaaactggagggtggatggcggtggaaaaaagctgaaaacttaaataaagaaactgtactcttgatgtaacaatgcgggtctcccatgagagctctgacagcagatctgagaagggttgcaaggagaaggaggcatgaattggcacgggtaagatacaggaatgaagagggagatgctgggcaagtgcccagacagagaagctcggggtgcggtgggggtgggtggaagtcaggagctgtttggtgaagaagtcacctgccctgccattgctgggggcacagtagctgtgtgccccgagtcctggagagaaagtggtagcatttcataccttcacaaacgcttggaccactgaggaaggtgcttattccttgagagagctgaagtgagtagacgcagtttcctgaatgacacgacagcaagaattggaaatttacccagtatcacttcgtgtacaactatttttacagctgaaaagtgacttcacttacaagtgacacataaacatctacagccttccaatgtaagcaagaagcctgacctcatcagtggtgaaatgccgtgagccagccaatagagttgcaatgccgtgagccagccaatagggttgcaatgctgtgagccagccaatagagttgcagtgctgtgagccagccaatagggttgcagtgccgtgagccagccaatagagttgcagtgctgtgagccagccaatagagttgcaatgccgtgagccagccaatagggttgcaatgccgtgagccagccagtagagttgcagtgccgtgagccagccaatagagttgcagtgccgtgagccagctaatagagttgcagtgccgtgagccagccaatagagttgcagtgccgtgagccagccagtagagttgcagtgccgtgagccagccaatagagttgcagtgctgtgagccagccaatagagttgcaatgccgtgagccagccaatagagttgcaatctatactttttccaagatccttttattttaacttttgttttgagataatttcagagttaccgaaaagttgcaaggatagcacgaaggatgcctgtgcgcccttcacccatatccaccaaagaccaacattccgcatgcttgctgtctcttgcacagccctgcgtgtgtactctcccccgcgcccctttctctctacgtctgtatgtctttgtgtaggatttttttcagaaccttttgcaggtatgttgtgcttttatccctaaatactttgatgtatatttgctgaaaacaccttaccagaaccacagtgtaatatgatcacagtcaggaaactaccatgcatacagcatgctggtctgagtcctagatcttcgtcaggtttttctagttattcctatcatgtccttcaggagctcaaggaaaccccagcctgtgtgttgtagtccgctgccgcgtctctttagcctgctccctctgcctcgacaacatcattgacacttaggaaggagactgcttttctgtagaaggctcccaggtttgggcgcgtctgctgttacctctccttgggatccagcagagaattatagcgggagcccatggaggtggcggcatgtttcatgctgcgttacatcaggaggcccacagcgtctgtgtgtctcactgctcatgatgttaattttgatcccttgggtaaggtttccccactgtaaattgactgcatttttcccctctaagtctcatgtgggaagatgctttgaaactatgtaactatcctattattactcacaatttcacccactggttccagcatccattaatgactctttgcctgtaacaatcataatgacagtttctaaatggtgacgttctaattccgttattccttctacatttattagctagcatcgactgcgagaccattttcctttattcccatttaattattcgtttgtttatatatgtatgtatatcagtgggaattcatagattattattattattaattattatttttgagacaaggtctcactctgtcatccaggctggagtgcagtggcgcaatctcggcttactgtaacctccacgtcccaggttcaagcgattctcctgcctcagcctcccgagcagctgggattacaggtgtgccaccacacctggctaattttttttactttttagtagagacggggtttcaccatgttagccaggctggtctcaaactcctgacttcaagtgaactgcccgccttggtctcccaaagtgctgagattacaggcatgagccaccgtgcccaacccatagtttttttttgttttttttttttgagacaagtctcactctgttgcccaggctggagtgcagtggtgtgatctcagctcactgcaagctccgtctcccgggttcacgccattctcctgcttcagcctcctgagtagctgggattacaggtgcccgccaccatgcctggctaatttttttttattttttagtagagacagggtttcaccgtgttagccaggatggtctcgatctcctgacctcatgatccgcccgcctcggcctcccaaagtgctgggattacaggcgtgagccactgcgcctggcccagcctatagatttttaatcagtgattatatcctttactgtcgtgacttattttggtcaaactatcacagatttggtcagcaggaggccctcggagctggctgtttgtcctttgccatgtccctgtaataaagagattatatagtccatcatgcttggagcactttccttactttgtggcacaaggagatgccccaggctcatcctgtacttttccctgctccagacctggagtcagccgttccccaaaagcatgtgattccttttagtggagaatggcggagagttgagaagccaggatctgggggccagatgtgctcacttctgccggcgggccagagctcctgggtcttttcagtagacaaacgctagaaacagatgtgtggatgtggatacatacacacacattcacacgtttatatgttatacatatgacagatacttacaagtgtatatatacacgtacatgcatacatacatatatgcacccacacacgtctctatgtctatacctatctatgtattaaaagctgtgagaactaatacctccaacaccacagtattattttttaaaagcctctgaggacatttcatacaatgaactgtgaagaaaacaattggtaaactctaaagtaataatatcaattacatcttagatattaattgtattaaaacatttttaaaatgctttgatgaaatggttatagtgacataggtatagattaatcatggatacattctcaatatagattttgtttgccgggtgctgtaatcccagcactttgggaggccgaggtgggcagatcacaaggtcaggagatcgagaccatcctggctaacacagtgaaaaccccatctctactaaaaatacaaaaaattatccgggcgtggtggtgggcacctgtagtcccagctactcgggaggctgaggcaggagactggcgtgatccgggaggcagagcttgcagtgagccgagatcacaccactgcactccagtctgagtgacagagcaagactctgtctcaaaaaaaaaaaaaaaaaaaaaaaaaaaaaaaaaaaaaagattttgttttaggaaggacataagacctgtgaagagaacacatttgtggttttttttgttttaatccaggtattcaaatcagttcattttaatttggcaaacactgattctcttttactctctgtaaggtacttaatgggcactccttccctttgtcctcatggcctcattgtgtatatggttagtaatgatttgttatatggaaaatatcactagccaatttctcaacataaaaagtagctgcttgtttgttaacatcccttcctttagagaggcctttatacattgcatggaatatttacaattacttatattatgatcagtgttaaacttgtcaaggttataattataaaacccaattttctttaagctcaacttagagatctttatttaaattagtaatttttataagcaataaatttttttcttcaacattcagttaactcatagatttgatagcttaatttctcctaaactttaaccattatttgcatatttgattaatcaaaatttttaaagatttcaaataccactaaaaatgtaactgattttctaaatcactttaaaacaatggcttaaagctgggcatggtggctcacaactgtaatcctagcactttgggagggtgaggtaggagaatcgcttgagcctgggagttcaagaccagcctgggcaagatggtgagaccctgtctctacaaataaaaaataaaaaaattagctggacttggtggtgagcacctgtagtcccagctgcttgggaggctgaggcaggaggattgcttgagcctaggagttggaggctgcagtgagctatgatcacaccactgcactccagcctgggtaacagagcgagaccctgtctcaaaaaaaaataaataaataaaaggatggcttaaaaattgaacgaacataatcttaaagacatatttcagacttgcaaattaagcagaccaaatggaggagatagcaaacatcttaaaaaatggtgtgcctaaagcagcccagtgattacagagtgtcatttcccctgtggaaacacaattgatatcaaaggaaattacttttttatatcatctaatcaagaaactaaatgaccatttcaggcccatgtaggggggctcacccagggctcctggtataaaaaagtttgcgaccagtaaagggcctggagcttggtcacgcttcccaagtcaggcagcagcagctgggacgtgccccttctcatggtcaggtggtgttgccaaaggcaccccagcaacttccttcagccgggatgcaattaatcctgttaattttcctgtcttacaccctagtgcctttccccacagtaatgggaaggcagtttaggacctcagagtttcattcacctttggtgtaatcgggatgacacttcctaaattaaggcctgctgcgaacgtgacgttaatcccatcgctcagccatcttccttttcgtttcttcttagggacatcatgtttcatcgcctttcctattatgtggtctctttattgacacatttatgaaaatgtaaaaatctttagttaaatacagcctaccttttttcccacttcaacaggcatcttcttctgaagacatgggcaggtggattgggattttactcgcagagacgggatcgtccacagacccggaggctctgcactatgactacattgatgtggagatgtctgcaagtgtcattcagacagccaaacagaccttctggtaagacccactgccatgtgaaatggcaccacagttcagtaactgtcttttccctaacttagcttaacttagtttttgtgtgaggatatagacccagaagaaaaactaaagactttcccttttgcattatcttaagccaaattttgcagaaatgtttttgtcgtgtcagcccactgggttttctattcgagcagcgtgtggcaaacttgcatgaaggacttagatagtaaatatttttggttttgtgggccacacgtttcctgttaataaccactcagctcccgctgcagctggacaccgtacataaacgaatgggtgtgtctgtgttctaataaaactttatttgcaaaaacaggccgtggcctggatttggccaatagtttgctgacccctgtattaggggaacagttctacgaagcagaaatgattctacatattgctgtaatgaggactgagttttcaaagctatccgtcaagtactttgtaaatttaaattgtgatttttttaaaaaaaaaaatgctgcagtcatctataaaaacgtccttttgaacagtgaatatttctttaacataatgatggcagaatatttgtagcagcagttcttggtatggtccacagaacccctggagattttccagaccctttctggcagtctgcggggttaaattattttcataatatactaagacattgtttcctttttccactgttgggacatttgcattagtgatcactggctggcagcttcgcaccaatagtcgcccttcgccgtatgaataatcattgtcactgccaatgtaaatagtcaaagaattttaccatttgcgatagtaaaagaaaatgctggtttcacttaagatgtccttgaggaagcagtaaaaatgatgactttttctataaaggatcagatagtagacatttgcatgaaggctctgaagcccgtgggtttttcctgttctgcgtagcgtgatgagaggccacagagagcatgcaggtgtgtccaatgacagtggtcctgttgaggaacagctcagacaagtgaggtgctcatagaactagctgccttgatttttttttatttttactttaaaaagcaacagacaaactagttatttgcacataggcatttgcagatgttttcttgaaaatgagctagctacacccatcatctctaggcaaacagttggcagtatttgttgcttatgatacatttaagctttccttagaaattagaattctggaaaatttgcatctgccgtggtgagcttgccggctactcagcacccatagactcctgctgagatctgtagtcatgtcagtgagcagttttttttgatgttgtataatgaaggggtcaacatttgaaagatcggcagaagtcatgcttggggaaagatctattcctagtgcaagataaacgactggattttaatgtgagtcgattgatctgctttccgactccatggcagttggcggtaagagaccaccacttgctgcgttttggtgtagtcccgaagaagtgtcactacagctcagaaaaagcaattaaaatgtgccccacttgtccggcttacatgtgtttgaggctggattttcttcacatacttcaaccaaaagagcattttgtgacagagggcagaagcaggtgtgagaatccagccaccttctattaagctggacattaactgggtttacaaacatgtgaacactctgccactttctggttcgttattggcgttgctggacattaactgggtttacagacgtgaacactctgccacgttttggtttgttattagggttttgttgttgttgttttttgtttttgtttttttttgattaagggttgcccaggctggagtgcagtggcacaattatgactcattgcagcctcaacctcctgggctcaagggatcctcccatctcagcctcctaagcaaatgggactacaggcatgtgccaccatgcctggctaattttttttttttttggtagagacggggtcttattatgttgcccaggctggtctcaaactcctggactcctgggttcaagtgatcttcctgtcttggcctcccaaagtgctaggattccaggcatgacccgcgatgctacttttaagtgaataacaatgaatgcatttctcaggttttaatttcaaatccagcaggtattaggtagggcatcttggcttgggtcctgctgtggtatttactaattagaacaatttggacaagtcattcattacctgttagtacctctgctgccttctgtagaaaatagagatggtgggtgagataatctctgaaacttgcagctccagcatctttcaccccttgactgctgcatatgtttctctcatccttagagagttgggactggggtgagggaagtgaatgaaaacaaagctggtcatgaattccatcatcagcaagtgaggagaaacatacagacagctgctggcagacctgccagtgctgagattacacgacctttcaagtgtgaagaagatgggctcagatgcctgtgctgttgtgttgtgcccgtttaatatgaactccaccatctagtttttccacacaagtgctatttatggggaattggagcagtcttcctttgtgtcttgaatggtgaatggatactcatttaatgcttagctaggacattctggggctaagaaatagttctcaaagtgaagataacttggcccattttaggactcaagccacatgttacatacacccagctaaggtcaatagccttgacaagtggaactagtcttgcacagattgtccataaaatccccagtaatactggaggttttctacagtgcacactgttctcaccactgtccttttgtgtggaaatcaggatagatgtagtctagtacttaccgttctgtttatactaattattgtttaattatattctttctaatcagcaaaatataggtaaattataatgattctccaattctttaagtactatgcagtaaagaaagcacatttaaagtgtttttaaagagatataagatccgtaagtctatttttgcaaaatctgcccaactagcagacataaaagtggttatggttgttcactatatttatttggaagatactaaatttccataaaaacctatcctacgtccacatgtaattgcaagtataatcagcacgccgataaccacatttaagagaaaccctgaattaaaatcgttgccctagaatacagcttggcttttactttataaatgactagagtattaatctaaatcaaatgtggcaaggtcacatttttgagaaaggaatgtagattataacactaaaaatatttattaaaaatatgcatgtaatgaatttatggctgcaggaatcttttctacctcgttaaagtctttataggagctgtcagttagcaataaagcttattttcaagttttctagccaaacactcctgtaacacttaagagagatgagatgtgacaaggaaacagtgttcaaaatatggttgcttgccagtgtgatgaatattctaagattaaatgttttgcttttatataaactggcagccagttaatgaatcttttcaaggttcttaggagaattctttgtgcattgtacatgactgaggaagagacggcagtaatatattttgaaaagaggaaagtgtaagataataatggagattctcccaggaaaagtgggatacttaggaactttaataatggtaaacaatcgaaacatattttcctgaaaacctatttacaatgagatacataaattatacaacacaggaaaatactccagagttttcctgaaactctcttcaagtcacactcagctgggagcccctcaggaagcagttgggaggatgaagagaacggaaagcaggggctggtgcggagcatggggagatgcacggatggggtggtgaggatgaagaggatggaaagcaggggctggtgcagagcgtggggagatgcatggatggggtggtgaggataaagaggatggaaagcgggctggtgcagagtgtggggagatgcacggatgggatggtgaggatgaagaggatggaaagcagcggctggtgcggagcgtggggagatgcacggatgggatggtgatgatgaaaaggatggaaagcaggggcttgtgcggagcatggggagatgcacggatggggtggtgaggatgaagaggatggaaagcaggggctggtgcggagcgtggggagatgcacggatggggtggtgaggatgaagaggatggaaagccggggctggtgcggagcatggagagattcacagatgggaggcagttctcttggccaccctttcctcggagtcccgggaggttattgtgaaatagctccacttgactctctcctggttttggtgtaacaagtggcatgtggcctcttacttcatttccacttctgtctttggctgcaaatcctattgtggaaagacaccaagcacaagaccgaggcctcgtgtttagttgcgacctcaggccctgccctcttggggactgggcagagttgtcctcactgggccaggtccctctctgtagggtgaagggtgactagctgctggctgaggcctcctccacttaggacattctgtgtgcctgtgacccctaatccctgtgctcccaggtcctgccagatgagcctgtcagaggcatcctgcagtggctcttcccagcacagaagcaggagtggagccccccagggcctctgttctgaccccatcctttgtccctgctgcagcagggtgagtgcagggcatatgctggaaactgaagatgcaagcccgtgagagacgtgcctgccgctggaaggagaaagacccaaggcagtacggcccagggcacaggggaggggatggtccctgtggccaggctttattcattcctccatttactgcctctcgctgacagaaagtatacatagcgctgtctccctaaaagccttccaatgaggcatttaattagaaaaccttaaatatgtattttttaaaaatcaaaatcttttactgtggaactcttaaatgttcaagttttgctgtgcctttccttcttgtatgttttcttcttcattttattttcctacgtatacttttatgtactttaagtttagcatatattaattttttataagcaaaggaaaaagtttataaattataattgaagaatgtgtccaggcagcaagccgtgcatggcgtccctccccagcatggggcgcacacgcgctctgtgaggagccatttccgcggcccgcactgctgaagcccagcccggagccccaagcccggtacctcccgaggctacgctgccagacttcttaccaaagaggcgggcttcacttgcccctgtgtttctctccccggttttcacttacgctgtgttttcttcatctggtgatcacagaagcgcaggatcctatgaaatacccacactagcaggaaatgctgtcagggtggtcccttccctgggatttacattattagtcctgacccgtggcttcggaacccggccgaggctctaggcacctgcccctgcgtgaggacccctgtgtgtgcccgcatggtccctgcgctcctgaggccgaccctccagtggggagagcaggcaggacgcagatgcagggcggttgccctgggcccggaggggagggaggggccgctgtggggctgcgggacgggccgcctcctggggggcagcacccacgcggagacctgggtgcgaggggtgtcaggagaggagttcggcaggcagagtggctgggggagccgcgagagccaggggagtgccggggcacccaggagactgaccgagcgcaggaagccacagcgcagggacggagcagaaacccagtccctcggagccccgaggccctgggcagcaccttgcgacttcagaagcccctgggggtgttgggcggaggctggcgtggcccggcctgccctccttgaaggggagtgagccgttccctcaccacaggctccacactgttgggcctcacctctggccactaaacgggcaggtctttcccatgcccagcaattctctaggtttctgtgggcaccagctgggtgtcctaatacatgaactcaaccctcagtggtcttccgggaggcagcgtcaggctccccaggttaagggcccagtccacaaagctgactccacttcagatgccagtcacaggtccaggatatcacctgtgcgtctaaccaataggttgtgagttggaggttcccacgacccctcccctccagttcagtcattgctagaacgctcacagaactcaggaagagcttgcttactggatttccagtttactatgaaaggacacagttcagaagcagtgagggaagaggtgcgccgggcaaagcatgtggggcacagcgctcccgtgccctcgctgggcgcaccacgctcccggcaccgccgcatacacacagtccagaagctccgggaaccccatcctcttgggtttttatggaaagttccagccgtaatcacagggttggtttccctggcaaccagctctcatcctactcttcatgtatgaaattccaagagttttaggagccctgaccaggaacttgggacaaagaccaaaatacatatttattacgccacagtagcacaccttctaaaggatttctcgggccgctgtcagcggctctcagaagttgaggaaatttcagggaagaggtgaagagatgtggggtggcagtggtgctgattgactactaagaactccataaatatttgttgaatgagtgttccagaaagcttatagaacaggggtccacgaactttttccaaaagagaccagacagtaactttcagctttgcaggccatgttgtccttctggaagtaacacacttgtgaaagaggcatgtgttccaataaaactttattatgaacacaagctgtgagaggagttggccactgtgaaagacggatgataatcaaaacgcttggtatttctgaacacctgttatttgcagactttgctgcgtgtacctagcgttggggccacagtgagagacggatgataatcaaaacgcttggtatttctgaacacctgttatttgcaggctttgctgcgtgtacctggtgttggttactggcgatctgtgccgcagttctgcagattatgtgccatcctaattttataggacagtccctccagcgcatcatctcatttctgccgagattctgtctagtatttcttctctgcccctgtgacctctgacatagccttgggcataaagtcagaactcattaaagacttgactgattggagtaaaaggtggtcaggttatggattttaacgcatttcctttctttcagtttcatgaacaggcgtgttatatctgctaacccatatctagggggcacctccaacggctatgcccaccccagcgggacggcacttcattatgacgatgtcccgtgcatcaacggctcggtgagtgccctttttttggagtaatggttggttttgttagaggccgaggctgtgaaaattctgtgcttcagttcccctggtttcaggtctgaataaggtcagctttttaatgctctgaggcaaggagactccatctcatctctgttctcctggtttctgacatgctgtttatctgaatctgcatttgaacaagtggatagtttgaggctagtagacagtttgtcatttaatgtcactgtcatttttctgttggtgttgaggtagggtcccaatctgttgcccaggctggagtgcagtggtgcagtcacaactcactatagctcaacctccccagctcagtcgatcctcccacctcagcctcccaagtagctgggaccgtaggtgcacaccaccacatcccactcatttgttttatttttagtagagatgggatctccctatattggcaaggccagtcttgaactcctgggctcaagtgatcctcccacctcagactttcaaagtgttgggattacagatgtgagccactgtgcctggcctaatgtcgctgtcactaattaaatgtgtcagcccactaaaatattgactaaaggagaacatgttagagtaatacttggataacttgttaaatcaaaacatagcacagtataggttatcaatgagtagttatttcccgatgggattaaaatgctgtgaaatcccctcaggaaggaaatgatgacatagaggaatgaccacattacaaattcgacagcttaccttggggtggatttggaggagccaggctcctggctcctggcacagcgctatctgtatatccatctatccatctatccatgcaggaggtgtttagtaacagctttccctgttacgctggcctcgggggtctgtctggccttaggagtcctgaagtctgttctcagtgtgttgtgtctgtgtcgtacgtgtaatcagcaggcctcatcaagtgctggttctacggtgtctgcctgttactcatctcacaaccgcgtattgagcatcctgcctgatccaggcacggtgcccggccctgggcgttcagagatgaggccttcacagttagcagatgaatgaaggaggcttgtgagaaaccagtatgccatttgtctcccagtactgggagggtttgaaattggcatctatgttaagataattttcaaaggtagacataaagtaaatttattgttatgttttccaaggctatgaaatagacttggaaggtatttcagacttttttcttactgttttgattctccattcttttccccgatatcctgatgaatgtcctcaatcagccctggcatcgtaaattcatagctgccccacagcaggaaccaagagacaacagcctccttgagggaagagaggggctgaggacccccagtgctcaggagcataaacaaactgaaagcaggttctagtggccggggtcggaagtgggtggcccatccctcaggagccacgatggacgcagtgtgtccctggggctcggttgccttcccattggccgcctcctccttcctgctgctctggacctgccctggggttcctgtgggggaggccgccctttctgtgcgaggcccccacctgattctaaagagggatcttctcatcacttgatctgcccccttccctcctcagtcctctctcccttgccttattggctgggtgtctcccagtggccagactctgtgccaggagttgaagaagaaatggtgaagcgattgtctttgtcctgaaagggcctttgagtctcatgggggtgagtggacctgggagggaaacagacataggagcggggagagcttcctgggccctgggcagggcagggcccgcttgtaggtcccatgttaggacagggtggcacggggcaaacagagccactttaggatcccatcctagcttcagagtccatccagtagagccccccatcttaggcggaggggtatcaggtccagtgaatctcctcctttccccctcagccaatcctccctggggtgtctctgggtgcccacagtcaccacagcactccacccctgggtaggggcttgtgcgagttcttcctgcttaagatggcaccataccagcctgtggcaggctctcaggctagttcctgccctagattccagcccctgagcccttcttcaggtgggacctgctcttctgcctccatttgccctgtgtcaccccagtgtctcttgacagcacagtcttaccactggatttagactccagttaccacactcatctgcatcctgagaaccatccacttctctgagcctgtgtctagcccgtcccccccaaagaccctttcacacgccttttcctcaaaggcgtttctccacatgcacgccttacacacgaacctgtgactgtgaaccggatgctgtcttcaccctgtggaaccacacacgtgatcatccagctccacccagcccgttttattcagacttttatgacactctacaggccacccccaggagcaagtgttctttaggctattcacagcttcatctgttgtagaaacaaaggtctgccattcctaaagggctctgcatgtaggaattgtttgtgtgtgtgtattgctgggctacatgtttgtggcttccttgcttattaggccttcctctgcccaggcccttcctgaaactattttctgtgtgttcggctctgttaccagctcatctctttttggagggcctcatttctagattcttaaaagttcatacttatagccaggcgcgatggctcaggcctgtaatcccagcactttggaaggcagaggtgggcagatcacttaaggccaggagttcgagaccagcctggccaacatggtgaaaccctgtctctactaaaaatacaaaaattagccgggcatggtggtgggtatctgtaatcctagctactcaggaggctgaggcaggagaattgcttgagcctgggaggcggaggctgcagtgagctgagattgtgccactgcactgcagcctgggcaacagagcaagactccatctcaaaaaaaaaaagttcatatttatgacctaatatctggcatcgtggcactgtttcagctttagtaatgtttacccaacgttccccctgatgcttagactaagatgaaagtgtgcacactcacatactttaaactagaaacttctgtgaggtctctgtaggtgtttttctgagtcttccgtgtgacttaatctttggtattttaggaaaatgatagtctcgtctagaccgttttaataactctggacaaatatatgctaggttgtcattatgaaactctcatatccgagtttatctgcaggagccgttatttttagatcacaaaaatagacacattgaagtgattgcggaggaatacagacactcctactgcagaattttaagtcttctctatttttataacaaaaggttgtaattaccgtctggcagaaaggactatgcaggaagactatcaacggggtaaaaggaatataagagaggaattaatactgcctttcttgtcatgccaggcgatttataaagacctttacccctgaaaaggccctggctgtggttatcagtttttgagttaatactttaatacccatgttctcagattcctctgtcccatgcagtggcatgtagctattttagtcctttgttagagattttctgctaaaataaaaccattatatccattagatttggaagcatctaattttctatgaggatttgatttctcttttcacagacggttttgcttgtgttggttgtggcactttcttcagtacagagcaggggacagagggggtttgtgttgacagttcccataggacttgggtcactgactcctgcacaggggcttggaggagcctgcaggtggtctcatgtccccagaaggagcgcgaggcttagcgggagcaccgcgtggggatgagcgcgcccttccctccgctctgccactcaccggctccaggccctgtctctgcttccatttccccctttttccccggatgactgtgagacgaagtcagcgtccaggacgtgagaagtgctgtgtaaagcatcgggtgctctgctaggacctcgtgtgtctttatgtagacccagagcaccaggcccctggtcccatgctcattcctccccttccatccacgccctgcgctaggagaacttctgaaccccaggttctctaaagaaggaaatgccaaatcaacattgctttttcctttaaaagaaaggacaaaacaaaaacttcataatccaagagttctgggaatggtttaaggaaaaaaaaattttttccataaggcttcagaagtcaagtccttttgaatccacctgcatgcttgtgttgggtctgtgtgtgtatgtgtgtgggaggggggtggtgggtgcatgccttattgataacaactgcagtctgtgtgcaggagagtgttggggtgccaatgtatgctaaatgccgtactattaataaatgacatctcactgtgctaaaagctgctgtttcctgtgtccaagtcactaaccacaaagctatgtgtgttgcagtgggaaccggaagacggctttcctgcttcctgcagcagaggcttgggagaagaggtgctttatgataacgcaggcctgtacgataacttgccgcctccgcacatctttgcccgctactctcctgctgacagaaaggcctctaggctgtctgctgacaagctgtcctctaaccattacaaataccctgcctccgctcagtctgtcactaatacctcttctgtggggagggcgtctctcgggctcaactcgcaggtacggcatcttcttctgtaagattctagaaccaccttcaagtcacattgctccaacagagttttgcaacttgtagtaaatgggactcatcaaaggcaaagcataatgtgttttttttttctcaactagaatataatttgcagcctgactaccaaggaactgatgagatatttctaacgagctcatggtttatctgagcactgtgtttctttgcccacatctggctctctttctgttcttggaaaattccccagtgaaattttgtgaattatgtcaactaaaggcagagaagttaaaaagaaacgggtaataaaactttccagaagattcttgaacagcaagtttctttactatgtttccattacacttaatgaggaagggttgactccgtgtagtcattgcttttgatctttaaacatgaaatagattattcagagtgtggtagtgtttctccatgacaagtctaaaggtatactcccaaaaactagatgatgataataaggactttttaaacatgaaatagattattcagagtacggtggtgtttctccatgacaagtctaaaggtatactcccaaaaactagataacgataataaggacttttgatgaccattgaacaataataaccgtgatgttgaactactgtccattgcacaccctgtatctatggcaaacagtaacatttcagagtaattttgtggtgttaggcctttttaaaaaaaaaaaaaaagatgaagtctcactatgttgcccaggcaggacttgaactgtgggctcaagtgatcctccttccttggcctcccaagtagctgggacaacaggcacatgccaccgtgcccagcttatcatgcatatttaacctaagaattgttcatgctttgcctaaagacctaagcccatatgtaagaatatgaatatatagcaaatgggcatgttttaaatatttgttttttctccattctttggataatcttaagaaaataaccagataaaattgtagaattatagatagtagtgacttagaacagtagctcccaataggtcggcttcatcaaaaatcaaatgcacaggttggtgttgctttttgatttttcatgacggttgttcagatcccatccctggggattcccattcagtgagtctgagtggccctgagctaagtgtagttggggaccgggggtaggggagccgttggcctcttttgaggacttatgccaaaaagttgtcaggttatgtgttgcactcactaagcgaaagtttctccctctatgtttctacatgtctttttattggcattagagttgccttaggtaaaaccctgccacacagtttgccatcttgcactcttggattgtccccacattggttgggaatcatttgatgtatggttcccctgtggagtgtttgttactattgtccccttttgttttgtttttgttgaaataggaaacatttttgcaagttaaattacatgacctctgggtttcctgtcctcatttggtcattttaatgggaacctgtttttaatggcgagaccttgcactttctgagcacttatgtgccatatgctctatccatgtatggcacgtcatctgatctttttaggaacactgtggggaggtatctctttatgtttttaaatgatcaaatggcggctcagaaagtttaaataacttgctcaacttctcctaaatgattgatagagccagaatttggagctagatctctctgcctcccaaaaagtgaggcctgcaacagaaggaagctgtatcgtggaaaaaagcgtgggcgtggatgctggagtgagcctttgctgtcatgctgaattaattacacagctaagctgcacataaggtcacttcagcaaaatgcaaaacgtgttggcctgtatcagtctcaggagtagagtactatttcactttttcagaaacctgtagttagtggaagttcagtttccatagtgttgctgctgtgcctgtgttatgcttctcttgcttccttctgcggactccgtcggcgataagaaggcggtcacttatcccagtaggatgtcactcagtgtcaaagcacttggagcagcagaactcacactgcagggtcgtgctcctctcctaaaaggcatcccactgaaataaaagctgcttatcctcagaaacacaaactactcctctcatctgagtgctctggggtagtcagctgcctgcgccagcttggttagcatttgtggtctgccagtagaaaggggccacttctgcagtgttccagcggaacacatcctacagagcctctgccgtaccctccttagccattccccagaatcccagcagcccagtgtttggaaaccatcttggttttctttcactttcgatttttcctccatctatgccagtttctacaatacttagagactgaaagaaatgactccagaaaaaaaaaagaccaagatttgtttgactttgtgtttatttttaatgttcttatatgtttatttcaacagctcaagggtaaaaagccccccgtggcgtctaatggggtcacaggaaaagggaagactctgagcagtcagccaaagaaagcggatcccgcggctgttgtgaaaaggacgggttcgagtaagtataccatcggatgtcttgcattccggcttcaagtgcacttggtggagctgggcctgtctgagcctgcccacccgtgagtgccagcttggggtcagctggagagatggagcggtgggcaccgtcatccttcctcatcagccacatagaaggacagtggcgatttcaacccagcttttctgactgcttgtaaattgaagcccagaactggtttgccacctgtgggatcgactcagcattttaaaataggaggcagttgtgagtgcaggtttcttgcagctccgggtggccctgggctccaggtcaggagacctcagctcctgtccctgatctgtggttgtcaagccttgcagactctaaactcagcatctttatctgtcagacgtagacacgtggctcccgtggttggtgcggttggaatagctgaggtaatacacggacctccaagcactagagcagtatgaggagttctgaggaatggttatcctgcggtgcctgtggtccacagcaagccattcttatcccatccggtttacttcccacagccactttgtaagcataggcattatcctctaccccatcatagaaatgagaaaagaatcaccaagagagtaagcagctcccccaaggctcacagctggtaaatcacagagccagagtgggtgccaggccttcagactccacatccagccggaaatagattgggcagagaagcattaagacatgagacactcagcctgcctggacccagcaccctcttcccttccctgtagtagatccagctagggcgatatgtcatctcttaagtgtttgtattggtgttagtcctcattatgttggatgtctaatcagggagccagccaggcagcattttttcactcaaggggctcaaagatacaccaaagtggtccagcggacccacacatgcagacaagcaagtggcagggctgcagtgtggggatttacaggtgatgggctcctgagtccatctgggcatgtccaggaagatttcccagagaaagaaggtgggagttaggtgcagatgttgagtttgatgtggttacatgccatcgccacttgggatttgcacctgagattttcaaatctgaatctgtgcaactggtagaccagtctcagtgctaacgaagatgaggccagctagccccaggtggtaacccccacaccagctgtcgaagagcgaggctgccataccgacacgtgccgacattcatttgccctgtggttccacttttggagttggagcatccacacaggggaatgaagaggctggcagtgtccttggccatgttcgtgaacgaggcttgaaatcgctccgcagggccaggctgcgtctgccccaaggaagcgtatacatccctgatctaggcttttctccacctctgttctacccaacatacgtgttgaccagataggttggagccagttgggccaaatcctccctcctaccaccatttgtttaatgtactaacttcctttgaccttatctggcaaatcttatttcctgaatgtatcaggtgtatttactttcacctcttttagtgttgtttctttgaggaggggcagatgggggagaggagcagctcacacctggaaagctttgttacaagcaaaatcggagtcccacggagtctcaatcgccatggtgtttctctgtcagtacctgtgctgactttatttcctagatgatttattcctttattttatgggatgttctgtagggagtttttattaactgtggtgacgtctaatggtgacaaaagagaaaaataatggcattccgtgtttttgcttgaatccagccggttgcattatagattagatgggatttattacatggggaccaaaagatgtggaaatttataggtgattgcattgagttcattggggaaacagcttagtttagaaataagcgagtagagtttggacttggccctgtttgccaaatatgttgttaaccttagctgcaaacagcgatccttttgtttcagattgtcgaatgcttcgcctctcctcaggctgccgacgcttttgctgtcattctatgtggttcttttgattaggggaaaattgactggggagtgatcactttttatgccttcataaatgcagtatttcattgaaatcatgataacttacgttgcaagaattggcaaatccagcatttaggacaggtgctagaaatggctccctgctgtccctgagtggacaaggctctgggaatcacttatcgctgatatggtaagaattgtcagtgaatgtccactacatcaggcgtcgtatcattttgttagatttttttcagatataacgttctaatttaaaacacgcatgcacacgcacgcacacacacatacacacacacaggattccttctcgtttctgctttagagagggtgaagctgagcttctccggaggttgcttgcagagtcatggagcaagggagggtggagtgtgggtttctagccacctctctgagtccagtgtttttattcttaatcattatgccacccctgtggcttctacctgaagtagtttctagccttgtgagggagtcagacacttggggtgtgcagtcaggaaggcctgggagttgccttcaggcgtgagtgattgttagaagcgactgggagaccacggaagctttgaaatcggtgatcctccatccgagttttgttagaaccttcatctcttccatgtgtcttaacaaagaggtgttgtcctaaattactgttattgaaaagccaacataataggagagagcatggggtcaggttttgaaagctgttttcactggtgatgtgaagttgccaagtctgtaaattttccctacagctagtttcctcttcatttattcattttatgaaataagcatttatgtgttgcccatttgtgtttgttctaagtgctttataaatatttaatcctcgtaaccactcagtgaattgcctgctcttactatccccatttcacggatgagggaaactgaggcacagagggattcgtgccctgttccaggtcatgcagctacaagtgtaagctgggactccttcctagacagtcaggctccagataccgctcctggttgcctcttcatgtatccgttgttcatttattcactaaacaagcatttattgtgccacactccgtgccgggtgctaatctcagtgctgggggtgtagcagcaattcagagccagtcagatgacatggccataaggaacagatactgcggtgttagggaaggatttgaagacgtagagaaggaagcaaatttcagacattatttttgatattactcctgtcttttccgattatagaatgttcattctccaccttgttgcagattaattataagccgtgtgcctcaaagggaagtgaattaaaggaatttcctaatattctgttttcgtttttaagaatttgattcaaagaatattggagaatttgaactagtcacttttctgcttggttcataccagccctgtccttttcttgttgaattagcaaaataatgctttgtgtttgtttactgagttggctgattcaacaggctttttgagttaccccattatctgcttgaataaacctaatttttttttgacacggggtctcactgtcatccaggctggagcacagtggcaggatcacagctcactgcagcctcaagctcccaagctcaagcgattctcccacctcagcttcctgagtagctgggactataggcatgtgccgccatgcctggctaattttgtattttttgtggagaagggatcgtcccatatttcccaggctagtaaacctaatttttaattgctgcttttttttcttctcaagatgctgcccagtacaagtatggcaagaaccgggtagaagcagatgccaagcggctacagaccaaagaggaggagctgctgaagaggaaagaggccctgcggaataggctggcccagctccgcaaggaaagaaaagaccttcgagcggctattgaagtgaacgccggtatgaagggtgtgggtgactgcccagggtgcatgtttgtattagagactggagatttcattctgctttgcccaaaggacctattgctcaccaaggctgtcattttatttagtaagagtgggttatctcacagtgtttcttggggcttggaaacattgctggtaaccccgaggcaggtgcctgtgtggtcaaacatgcggcgtgcaggcagaggccagggccagacccacacgctgctcaccgaggcaggggaggtgctgggggacctgttccggcttctggcgctgacaacagagattgtctggaggatggcccctgtatccgcaggacgcagtagattctggtcaccgggtaggagggatcagctggatttctctacagagggtagcccacaggggtcagtaatattcagaagtccagacaagggtagaagcagcccctcgtttgttgagaagggacaggcgagagcaaggcagcatctgtcttgggatgcatcagggaagaggccaggctaatggaatacagacaccagagagggactgaagtcacagaaactgagtttgcagccagagtggcagccctgggccaggcgcgtgcaattcctgctggcgggagctggcgctcagctcctgagcctggggtggcaccgcttacctacgcatggcctcccttccagcccggtgcttagactacggaagactggctccttagattgagattgtactggcctgggctgggacgggggcttcagatgcctcagagccctgggcggtccagagaagaggctgtggccttcccatggctcgccgcgcggggaggagctgacgcacacccagcaggtggttagcagctccagccttgctggactttgtgcctcaatgatctgatgaagggaaatgcttttggagtttagaggagggaaggcaggtgttggcagggcaggtcgggctgaccctataggaggcccaggatgtggcctgcagtctgaggctgaccctacgggaggaggctgtgccagagaatgggacggggcatggagtttaatgagacagaagtagcatttctcccgtgttcccagcttgcaggatagtgaagatgcaggagggccaggagtgcttttggctttgaaaaagagaacctcgcctgccggccaccaccggcccaggccctgggcacaagtccgttcacctcttgggattggtgttctcatctgcccagtgggtgcatcttaggtcactgcagcaaacctcaaataaaataagtgaatgtgccttaaagaaatgtgtgccatgtccagtagagatgcaagctgagctactgttcattgcctcgggcgcaaataagatgactgaaggatcggcggagcgttaggggaggacagggttcacactccaagaaggtggcagctttgggaactgtggagtttagggtccacgttttaaaatgagaacattgaggcccagagccaggagctcctggccttcgtcagaatcagcatctcctctttcctggtccgagtcctcaacggctgcagcaaagggaaatggtaggagaaggactctgatcccttagagaactgctgaatttaagtttcacaacgaggacctaagtcaggggagctcgacctcagacgttttgtggaagttcttcttggggaccaggtgccttctctgttgtttggagaacctgtgcctgccgcgggagtaacggcgtttctgggaattccaggcaggaagccgcaggcgatcctggaggagaagctgaagcagctggaggaggagtgccggcagaaggaggcggagcgtgtcagcctggagctggagctgacggaggtcaaggagagcctgaagaaagcgctggcgggcggagtcaccctggggctggccatcgagcccaagtcagggacatcgagtccacaggtgtgtgtccttctggctcacctcggaggctggcgcggccttgcgtggccgagggccagtgcacccagagagaatgtggagtggctctggggcgtagcttgcttgtggccccttagtgtgcccagcagaagacagttcatgtgttagcatcagacactttcatcggccgggcctgtgttcctgacatgctttctcacctctcgctgaaatgttaaaagctgtggaaatgctgagtctgtgtctttcccctttgcacaatctgtttagaacagatccagtcctcgtgtctcttctgaaccaggtcatgatttgatgccagttcagtagagccggtgcttacaaaccgtctaacatgtctgagagttaagccaggtgctggggaaactgaaatgaatgaagcagtctgtgtcctcttagaatcaaacagaacaaagtggggtcctcttcccatgtgagtcatccctgtccctggttcctcttcactcattcggctgagaccgctgagaacttagacgtcttctccacttggtcattctgttgagtctcctgtcttgtgagttggatgccgtcactccattgagcgagggaggcactgggcccagagcagtaaacacgcctgcagggcagacagaacaggcagccagtgagggacggctggacttcagcccctgttccagccgaaacaccgtgggtgcccctgggtccccacccactgcgtcccgaacgctccccttctaggtccttctttccaaacccctcagtaaaatgctgagcctggttgaacccaccgctgctcttccacatgagccctgggcgggtttgtggggaagattgacacatttatgggttgacggcagccctgagtttcagtcacttgctggcccctaccgggcaccacccgcacagcctgttcttccttactctccccttctcctccaagcctctcccatccccccatccctgccccagtctcctgtggcaccccagcgatcacctccaacccagaggacaacctccctcccgcctgcagagctgagcaagcagccaggtcactgctctgtccccaaaccacaaacccagccactcatgcatggttctttcaggtgttcaagaggtggctctggggtcacacaggccagggcttgaaatgacttgacttctctaggccctgagtttttcatctgtaaataataacggtcgctgcatagactgtgtgtggacgcttttggcacagtgcccaccgaagcgcctgtgttcattcacatcattcacatcttcccaaacatacacatgcattcattcattcattccactcatccaacaattgcttgttgatatcattatatacattactgttatatattacataaaatcatatattcattcaacatttatctattatatataaaatacaattatatatttatacgatacatactatttaatatgtaaaggtgtgtgtgtgtgtacatacacacatatgcatatgctgtgttccttcttgaactcctgggctcaggtgatcctcccacctcacttcctgagtcactgtggttaccggcgggggccgccatgcccagcccacattctgtgttccctctgtgtgctacaaactgttccaggcctgcagttatgaacaagataggtgagaatccctgtttcatggagcttatcttctcatgagggaggcaaaccaataaaacacgttggtgtcagatgcggacagatctgtggagaacagtgaaacagtgctgaggaggaggggtgcagggggaattggaatccaagggctaggaggtgccttggacaaccccagtccctcatccagcataaatggggacaagagcatggtggggtcaggtgcagtgagagtggcagtgaggctgtaggcattggctgggacagggcaggggtcttcccttgcttcatggagccctgtgcccctccctctgtgatctgaggcaggagtgcacacagtcccccacgctgcttgtcctttgtcctgcgtggagggtggtggcagggcaggagtgctctgaggagctgtcccgcccccgtcctctggttctgtttgagtggaggggttgggcttcctgggctctggtcagtgcctcgatctcatccttcctgacctccagacacctgggaggatccttctcctgtgtcttcagcttttctgtcagctttttccaagcatttaaggattctctagttgaatccatccttaaaaaaaagaaggttctgcctggcctcctgctccccctggtgactgtccccttgccctgcgttcttgcctttccttccagggtgaactttggaagcagttgtccatgcttgcagcatgcttgcagtgtcctctgcccctcctacatcttcactttctggatgtggcttcccattgcacctgctttcatcatggtgacccccggcattcccatccagtggacatgttagtcctcactccccggttccggtgcccttcggcacagctgcccactctcttctatggtggctccacattcttccacccccatggctcgagcttccctctggccccttctccagctcctgccttgccaccccccgcctcgcttctcctttgtcccaagtatcctttgggggcccacgcctggcttgctgcctctgcttccccgctcccagtccactgtgctttgcgacttcccctctgttttgagggaggatgtccttggtgccatcctctgtccccgcatctggggaagcactctgcaccgctgcagcccaggccgtcctcgggagagtggcttattcggtggacccctcttgagatgcaggtctttgggtcacctgcccctttactcacagcctagcctggcctctgccagacacagatgtcctgatcatcattccattgtattcactcactactaccccaagctccctcccggcagccaggggctgccactgcataggtcaagttggctgcctggggattgtggccagtaaagcccacaggggaccccgagctgcccattttcatggtaattgaaacactgttctaaaacaatattccatataccctgagcaatattttttacataacaaacacattttggcaggaatcctaggaagcgtctcttccttggagacttcatttgagagaaggctcagcagactgtggcgttttttttcccccagagagcagtttgggatcccatatggaagagccagcaatgggggcctcggcagctcaggacacatgttgttctattttcagccttcctgaacacctcctcctttggcatatggaagctgccgtaaacactaggaaggcctctgtgctcatggagcctgcttttctccagcgagccccgcgcagtggggctgcatcccgttagccagtgctgccgtgagtgccgccactttctgctacctgagcatctctagggcgctgaccccagaaaagctcaaaaccttaaagcactgcacaaagggaccagctagaggcggcagcagctgcatgcaagagcccagctttgaatgcaaaagactagggcaggaatcccaccctcactgcttcccaggcacagccgggagtcagagcgccccttggagcctccacctgcccgtcggagcctctgccccccggccgtgaatgccaggagacgctctgggggtgaggcactgaccacgtggcagtccttgctgctactgctgttatttttgcccatttccaaaacttatttcttccttgaaataaatcattttcctgctggagaataccagtggcccagaaaccgctcatcacatggggttctctctctccgttaagtctccagtgttccggcaccggaccctggaaaactcgcccatctccagctgtgacaccagtgacaccgagggccccgtgccggtgaacagcgcggccgtcttgaagaagagccaggctgccccgggcagctccccctgccgagggcatgtgctgcggaaggccaaggtaagccctgatgtccgggggtgtctgggtgtcctgggcaggcactttaagctcccagcattctcgggtgtgagtagggagcccattcttcttcctactgcatccacttggcactcagccttcagtagacatctgggaatgggtgcttatcgagttctcaccaccccgcagatcctgttaggaaccgggttctcaaaggtgaacagtgactggaaggtgctgaccgtttagccccagtgccaacaattggctccagagtcatctcagatgcaggcaagccctgggctcctctggactcgttttctcagtggtgcggtggagattagaccaggagaccgctgaagtcctcttcagcactcagatgtgtgattctttagaaaaacaaaggaaagggtccaggaataagctttcccccagccccttccctagcaccgccagctgcatgaatcgggctctgagggcctcggaggaacctgtttactccctcctggggcagcttccggtcttctcatgggattagccactagcaagttttgatgctaacctttgaaacctcagaaatctttaaaacacagtagttgatcaaagcaaacgggtcctggcggcagcagcggaaagtgctgtgtgtggaagtgcacggagtgcgatggtgtgagctggggagccacgggagtgtggccggccccgccccgaggggctggaacacgggagtcctcctgtaccggctctgtgggttcctctcattgccggaattaacttttctttttttgaggcagggcctcgctccctggcccaggctgagtatagtggtgccatcacagctcaccacagccttgatctcctgggctcaggtgatcctcccacctcagcctcccaagtagctgggactgcaggtgtacaccattatgcccagctaacttactgtattctttatagagatgaggtttggccagtatcgcccaggctggtatcaaactcctgggctcaagtgatcctcctacctcccaaagtgctgggattacagtcttgagccactgcgcccagcttggcattctttgcagcttttggagccccctctgagttgactggggataggtgtttcctgcgagatgggaatgagtgccgcccccctgctgtgctctctggggtgctcacaggagggcccctgagaaacatggttgtccccagcctcccagaacagtggtcctccatagcagatccgtgtactgaagaccgtgtgtgtcggtgagtctggggaagggaggaatggctggctgtcatctccattgcttttcttagtgtttaccaagtgttctcagctggtgaccactgagctcactgatggaggaatatgttttgcctgggggatgtttagaattgagctgcccaatgacatcccacttaggactcgcagatgagagatgctgtaaatgtacttcatctatttagtttctttatcatcaaagaaattggactgaaaattctgtggtcccaaccctcaaaagggctcccatcaccgtgtgtgcttccgtcatacagaggttcaggccccccgctcccttttgctccctcttggtgaatgggaagcgagtgatcctgggccacctcagatgcacagccagctgtccagatgggtccccactgataggtccagaaaacagcggaagctgctctcgtccctccagctgagaatcttgtgcagaaatcagaaggggacggactgagcagggttccccaggatttctgagaacagtgacaggggacccctggctggaggtggtggggcctgtagaccctgagaacatgaatgcacttgtgtatcgtaaacttggtctcatctgcctcccgcctttttctggggaccaaggggtctgacgtattccggatgtgggaagcgctatgcccgctgcggtattcctgaaataccttccaactctcggtgaggagcattgagcgcaagagagggttctggaaagtcagacggcttccaatcccgtgccccagggcttcctggctcataaccacccaccaggcacagctccaggtcagatttcccttcccttcatctgggcaggccgtgtgccaagggccatccaggcatggaaactgtggctctgctctgggaggtgcccgaggggcaggcgctgggctgctccaggtttcgtgcccctgcctctcgtgacacattcacctggagattctgttaccctctcgtgacacagtcacctggagattctgtttccctcccgtgacacagtcacctggagattctgtttccctcccgtgacacagtcacctggagattctgtttcctgccctgctccgagttgagtggaggatacaggttctcatcctgtcgcttattctgtggccagtgtgacctaggcttggaatgttaccatttcctcggcttgtttgctaaacatatgtggcaccacgcggaggtaacatggggtcctccctctctgaaaaccccactgcctgggaggaaatgggggacctgtacaacagaggactgcccttgagcgccgaccttgtgatgctgtcccctgggcaccttctctgcttacaacggcccacatagctgtcccagggaggctgaaggggcaagaaggcacgaagcgtacccagctacccatcctcccctttgcagaacacttccgccgagtctgagagggcctcagcatagtgttgtcggcattgtggcttggtgtttgtttctgccagatttgctagtgctgtgaatttaaccatgagttgaactcgagcttttgatttagacaaagtgagaaattgttcattgtatgcagcatgcggagacgtgcagtgtactcatgacccagttaatgagcccctggaaatagtgggagtcaggcgtctgcatcctggcgcagggtcactgggcgggcgcagagaagaaagtccctctttggtggccgggcactgtggtcggggctttcacagaccctgtctcctttgatcttcccaattgctctttgaagtccttggtgggactcacgttgtaccatggctcagagagatgaagcaacctctccaaggcccctcagtggctgaggcacagaaggtctggccctggcgtctgtgccttctgctgtcctccagagccatccatgccagggaaccaagggcctctgtcctgcatggtgtctgccgctgctctgacctgggtctgctcttttgcctcctctttctggaactcaatcccatggccaaaccccatttcaaatccacgtagctccagagaccatgagtagcccaggcttctgcctctgtgcagctgcactgggtgctgaggacccagagatgaatggatggaaaggaagaggtgaggaagagcacggagggcgctgtccagtagggaggggcaggtacatctattgctgtgacatggcttgttgaaaagcacaaaaactgcacagaagatgggagcattgcctccctgagtcaggacgaggggcacagggtggtggggaatcactgaagcctggtcctcaggatgcatgaggctggccaggtgacatcaggtggagaacaggcatgggtgtgtgtagagagaagcagatacaaaagccagagtgtggcctgttgggaggcagcagggcagagtggagatgggaggcctttgctgtggacccagtggttttggggcccagcttcatcactttggacctaaggcaagtcattaagcctctgtctccttagcgattgattgattgattgagacagggtcttgctctgttgaccaggctcgagtgcagtggcgatcatggcttactgcagcctcaaactcctgggctcaagcaatcctctcgcctcagcctaccgagtagctgggactatgggtgtgcgccaccacacccagctaatttttgtattttttgtagagttggggtctccctaagttgctcaggctggtcttaaactcctggcatcacacaatcctcccacctcactcagcctctccaagtgctgggattccaggcatgagccctgcacctacctgtctcttcacttatgaagtgggggtactgtccaccttgcagggctgttgtcagaccagacatagccgcacccagtgcatggcacagtgcctgcccagtgcccactgtccctgctttcacagtgctggcactgcgtagaccacagccatctgcagccagcactcagggcctgtggatggaaccagtccagctgctctgctgactggatttaagcatctacatatttaaaaaaatttttttctattagagtaaaataaacacgatgtaaaattgaccattttaaagcatttttaagtctacagttcagtggcattaagcacattcccattgttgcacagccatcgccgccatccttctccagaactttctcatcttcccaaacttcccaccccagcccttgatacccactattctacttccttttttttttatattttttgaaatagagatgatgaggtctcgctacgttgcctaggctggtctcaaactcctagcctcacgccatcctcctgtctgtgtgtcccacagtgctgggattccaggcgtgagccactgcacccagcccactttctgtccttgttagacttctccaggtccctcacataagtgaaatcgttacaggatttatccttttgtcatcggcctgtttctgatcatgtcctcaaggttcatccaggttgcagcgtgtgtcagaaggcccttcctttttcaggccgaatacgtggtgttgtctgtactcgccatgttttacatgtctatccatcggtggacactgggtttcctctgcctcctggctggtgtgagtcatgctgctgtgaacggggtgtgtggtatctgctggagaccatgctctccattctgataggtgaatacctagcagtggaattgccgggtcattggtcattgattctgttgagttttctgcagtagccgagcacccaccccctctgagttgaatgtggatggtggcgtggcttgtcccagcctgatcctcttgccctgtccacttacaagactctcctttcctctaggaatgggaattgaagaacgggacctaggggacagcagcaccactccagcctcagagactgcacacccccttgcctgtatcctcatctgtgtgacggcaggaagctctgcccagagtggcctcagctgcacgactccagaggctccacgactgagctctgaggccagtgcctgtcccccaggcccacttgtattctttctactgtaaaatggcgcctttaaaaaagatgtaagactttggttcccaactttgttaaaaaacaaaaaaagtgatggaaaggtgtttgaaaggatgctatcaggcgaagtgacatctttctaaccagataggccattgctttcaccgattccaacccagccctggactgaggatggatggttccatgagcccccagatgaaaacctggattcgacagggaagagcttggatccccggctgccccgggcatgagtgtggctggccatgggcactgggctcgccttgcacgcccaccaggagggccaggggcatacgcagtcctgacgtggactttgtgtcttggcgtaccctctccacgtgcccgtccccctcgtcatcagaggtaaaggcatgagaaaatcgcgctgtgaaacgttttttaccttttattattattttttggacagatgcttttgtcaccaagacatgaaaagctgccattcttcttaacctgttttttaagaatgtctttttactgtgtgtcacacttagatcaaggagttttcagaggttccttattttattaattaattatttgtgctgcttttgacaggtagcagagggttttaatacttcactaacagtacaccctcctcccccttgggctagcatccccagcccttaatccacgtcggagccggcaggtgcttctcacaccaggagcctctgggggcaggggctggctcctcgccgctgtacaggacgtttactgctgcttggggccagggcagtcctttgaaagggaagcaagttccggaatttgttccctcatggaactataacaccttagagcaagaggcaggaattccagggcctcctgcccctccccttcctccagcttgtcaagttaaaccactaatgtgttggtgggcctggccgtgctgcctctcctgagtagggtgggtgcaagtagggcctctttcccagctttcttgcttgccttctgtgcaatatttcttggagaatttggatgcctaaggcataaaggaaaaaaacagagttcatagtttgagctggtatttaccccctgggtttaaaaatcagattaacttcttggtctcccggaggctgctgtcaggaattctccagtacgggaagatgcagtcacttatgacgaaataagtcacccctgaacgcctccgcaggcagattcatggagaccagtcccagtagcaaccgccccttccccaagcatagaatacagaggtgccatacttggtgtaagccttccttctgtccactgtccagaatgtcctttttcacacagaggaagagatggcgggaaaacactgactgactccttgggtttcccccagacatactttcagagcgctagctgtgtggtgcacgggactttacagttaggattcatgtttaaggtggtggcgcttgaggcctgcaagggccacgttggattactgaagcggaaagcggtctcccatgtataagaaaaagttttacaacacgaattggaagctgcttgagtccacctgaacttgaattgattgcaaagccatctgccgggaacggttttgggttcctgagccatcagccagcctttctttcccctctgatgcacgttcctcccggcctagtccgtggaggcccatcacaccagcatccgtgacgccagcttcccactaggacatccaggcaggtcgggcggggacgccacacgcctcagggccgtccgctgcactgccatagaggagccctccctccagtggtcacttcccaccattgcaggcagacttcccaccattgcaggcagctgggcccacttcatatcacacaaaatgaattttctataaagggaaaaaagtttgctcctccatagatttttgctgccttcgggtcaaatagtttccctggttgacgctcttgggccactctgattggcagcctgctttgccaaagagaactgtgtgaggttttggtggttagtaagagaagggggagatggccagcctgaagtcacggtcctggcccagcacaggtgggcagcagcgagctggcaggtgaagtgtgagcagcacgcaaagtgtcacgtgggccttagccgtcacccaccagcttcctcaccaggcaaggaggccccggagccttagcagggacttgcccgacggcacagctgattggtgctcgactcccagcatgcatattttgttgtaaaaacccaggtttgtaattcacatccacaaccctaagccttttaaagcggaggcaaacgttaacgaaccccatcgtggtccatggagcctttcaaaatgggtgccctggaggggcctgacagtgggttccttccatggcggatactcccttgaaatttcacattccatcaaagtttaaagcatttacttcagaataagttatttatgtgtatatgttcaataaatatagtttttaatttatatctgtacatattagacacacgcgagccatcttgccagaattctgacagtgatgtcattttattcccctcccaaaacatgccccaggaacaagcaccccttgcctctgtggcagctgcgagtgtgtctgatttcataacgaagccaggctgagggcaagaggcccgacaggcaggccagggtccccggagaagccggatttcttcgcaatgtcactggtacttagcagatggtcgtgttcacaggggctagccacctgtactacggtgccgaccgcaatgcgaggaatgtggtggccacgcgatggagctggccggaggacaggtcaggtgagggggccgacccctgcggggctcagggctccttccattctaaccttgagccacagtgtcactcttcagggctctgctcctggctctattttgttaaggtgtcatcagccttcaacctccatttatatatttttataatgttaagccactgaccaactttttcatagaaacaactatcagatttgagggctccctttgtccccctgacctgggcacaggcatgggccatggctccctcttcccagaatctgcggggaactggggcaaggcccatctgtctgcaaggctggtagctctctccctcggcttccagagtccacggcagttgcaaggtaaccagtgtggatctgctgagtcaccccaggcaccagacttaccccaggagcatgggccactgtccatggggccttccttgagaccttcccttggggctggcgggcggcggcttaccagctgggtcagtcccatctcgcccctctgtgcctatgccctggcgttgccaggcttaaccttcccctgtatcttactcatcccagaattattactggccatttctaaatagacaaaaactaccctaaaatgtggagatttactccttttgaaaagtctgtttcaaaaagtgtggcctcagctctggaggccacccccaggaaggagtttgaggttcattgtcattatggccacagtttggtgcttgtgcacgggactcaaagggcagcgtcgaagctggggttaggtgtagggttgtgagcaaagctcccctgtttgtggccacaccttccctttccaaaaaggctattaattctactcacccactatttggggggatgtaaattttgcccacagactttgccacccaggtgaggtgctgtgttcatgcacggaactgatgtcattagacaccatccaaggatgggcagcctgcagtgtggccggcgactgccatccagagaaaaggcaccttgtgccacagggcggggccgacaccctgagctcacaggtggcccctgcattcaggtggatgtccatccttgaaacagcctcttctgggaacacagcactggaggtctccaggcatcagggttggccggcagggtgccctgcagcttacataaaggtcgtggcaatgtttcaatgttaaactaaactattgccttcctcttacttttcctaaaatgattttctaatgggaacagtcacttcaagttcatgacatagtttgaaggaggataattcattttttcctggttgtcactgtcttcttatccccttggtgggctgggttcatactgtgaaataaactaaaatgaaaccaaaacgttcctgccgtaaatacgtggcacagcactgcagaaaaagcagtcacctctattcgtgagtccccaagccatagcagggcgtctgtaaaagaagggaaactgcacccaggaagtggtgggcgtcagacgcatcctttcgcccgtagttcatgaaatagttccggctttggtcttccagaaaatctcaacttcaccgtgcacaagtgttaccgggtctttttagtgtagccatggaagatactttcaaaaggacatcttcagatcataagtcttaggaccaaaggtgtttttaatgagataatctttttgattttctaacaagaaaggaaatattcactttacattttaacatcaacttttaagtgatattcagaattaattgaccatggtgatacgttgtaaaatgttttcatattaagaatgtaattatttccttattgtattttttaaaagctaaagtcatatttaaaattctctttgaaagaaacaggcaaagaaacagcaaagatttttttaaattaaatatgttagtagtgcccacttcaaatgactgtaaatatattttcactgtttctcaatgtatttaattcataaagtaaaaattttatgaaaagaaacttgcaaggaaaatcctagttttcagtccactcgccccactttgtagtagcttcactgaatttcctgctttcctggttgaattttctactgtttcacgtggtgtaaccctagactggcgcccttggcgtgcccctttgtgtatgaataaacttctctcccccagccccggtgtcttcactgcccttggtgtgtgctgcacactgagaagtggctgcttttcctgaagtccttgctgtcaggtgggtgggggtctctcgctgacatttggccacctaccggggagagaggggtcaggagtgacacatgaagggaggacgtaggcagatgaaggagccgtggtttatattaaaaagtagcttcgagtccacagacctgaacatccagttcaagagacgttttgcgcacctgctgtgaggccaactctgtgccaggtgctagaaatagaaatgggtcagctacaactcctgccctcagggagcttgctccaggcaagacgacatggaaagagatcctggatgcgccttttgtgtagaggactgtacgcagatttctggaatcacagagctcctaagtttgaggctgttgggtggggtttttgcagaggagtgggggttatttgaactaggttctcatgtttaaataggagttctgcaaggagagaagtcattttccaagcgccctcggcctgccctttgacactgtgagcagcgtgtcctcccaggcagcgtctgagaaggctgagcgtcccctgctgcaccgttaattgttccctggtgggcggttagtcttgctgggaaagtctggttaaagcttttaataggccatttttaaagtaacgctccttgttggcttttgaacagaggtcatgccctggtaggctgccaaatggaaaggaagggcctctaatttccttttgaacttagggagaggacaccgggactcctggctttgctttttaacaccatggagagtgctcagcgatattcatcatgtgagttataattttgggaacaggcgacacgaagcctcaagaacataaatcaggagcccagctccttaatgggaagcagggaaaacatgagctgatgtctgtgatccagaaattttatgatggaaacttcatctgttttatgaggctgttaaaagtggctatcctttcatacaaagggaccgattggaaagtagggcaggagacctggcaggacgaaggaaggagtcaggcgtacccacctcctgcacagggggcgggggcggggccgcgggcacgttcagaccgtcccctgcactcagagggtctggtgcatctggaaccctctctgaggtcaggggctcctcacagctgagccactgcctccttctttggggcaccaacctgcctcggagggctgcccataacatctttttttcctgatgctttaacttaggacaccttgctgaccctggagggacggcccctcccagggctggccagttcctagagatagtaacccctagcctggcgcacaccttacagaaaaaccaagcagtctagagccacacccgccctcactatcgggggcttggggatctcacactccagcccactacaccccggccctaatcaccccagggccaggcagcagaccacaagacacagccaatgtcaggagcccacagaagtgattcaggccacccagccccaagccctcttccctggcctcagctgttccttcccgcagaaaccacagcaaaggttcctggatttgcccgtactttccccttgctcccccggcctctcagctggcctgcacttccctgtgtggcctggcatggcctagtgtggtgtggcgtggcgtggcgtgaccagtcctactgagaaccttaacaaactagcttgtcagcgacagtagggcctcgccatacctgaaggttaattgaacggatgtttccaaacgccccagtcctgtggaaaggacacggaccttggcaccagcctgtctcaggcctacatcctgcctgctctcccataggacagataatgacaactcgcaggctgttctgagaattcagggagccgcatgaaatacccaacatgagcctggccccgacgggcaggtgcgagtcaccccacgtgggatgcggcccggctcctcggcgcagtccccgaaggcactgggatgacagccctgccgccactctgctctcagggccgtcctgattgtgcacagaccaagccaaccttctcgccctcaggtcgattgtgcacagaccaagcccaccttctggccctcgggtcgatggtgcacagaccaagcccaccttctggccctcgggtcgatggtgcacagaccaagcccaccttctggccctcgggtcaattgtgcacagaccaagccaaccttctggccctcgggtcgatggtgcacagaccaagccaatctcctggccctcgggtgagatcctaagtcgcagcaggagggcagcacgcagccgactgcccccaggggaagtaagtgcctcagagcaagaccaagagcaagcacaattgcctcttcctgctgctccactcctcctggggcagctttgtgcaggacctactgcccgggacaactgcgacagacaagtttgacagcaaagcgcaggccgaaagctgctggggcctgctgtggaaagcacgggtgccgtggctgccgtgggtgccgtggcccctggggtcactgggctccctccctccacgggtcctgacccgccaaccccagaaggaggagctgggggagcaggtgctgcattttgctgttacagttttaggccctgacattattctgaaaatcactacacaaatgattcccaagccccttctagctgtcaggccccggagcacaaaaatgaattccacctgctctgccctcgagttcacagccaagcaatgaccatttagagcaagagagcacatttattcactcagcaaacattgacggagcaccttctctgtgctgagaacgttctgtgtgaccttcacacgtgtaaaacagcgctctggcgactccccagaggaggcgccgggaagtcagcgggacccgggcatcccccccaggcagagtccccgctctcccagcccctaccctctgacgccccgagcatggctcctccaacccccactcctggcacccccctgccaggacggtctcatccattcccagggcttcactgtgtggctcctgctgagccatgcaggggacagagcccatccggagccacgcaccaattgccccttcccaggaaggtgactgcagggcacagctccttctttaagccctgatgctgagctgggaagcggccctgggctgtgcaagcctgagcttccatcagggtgctgcccaacaggagggaaggcatttgggaactggggtggctgttgaaggcaggaagccaacgctgttggcagagggcagagagagcaggagccggggaagcaggggtgaggcctgcagggtgggcataagccggcctgggatgggagctgctgtggggcctgggctgttggctttggtgggtttccccaactcccaggtgtaacctcacagtaaaaccctattcctaggcacaacccaagaagtccagtgaggccaggctccagcccatgtccacccagacctctctcttccttcaccccaagccgggcatctgcaggtgccctccgcagagctcatcaggaatcccctccccttgccactgcccaatgcagaactccccatctacctccccctccagcccccaccctgccgcccctgctggcctccttgccacccccagccaggccctggccacctgggagtcagccttcaacatcctctccctcaccgcggtcggccgagtcccgctcagctcgcctcctcctcatctccagcctctgtccactctcccatccccaccgccattcccaggttcaggctcctggtcccctacccacttcactgccccagtctctccagggtgacccagcctcgcagggaagcccttggcagtttctgaaacccaaatctgaccatgttcctggcgtgctccccattccgtgggggatgagggccacgtctgcagccacgttcaccagcccggctttacctctctccttccaccctccacacctgcccctcctcctgccttatgtctgtcagcagatctagacgccttggggacggttctgaccctaccagccctgtgcctcctgggagaggcgtctgggcctttacagtgggtgggactcactgtgctgtgcagaccactactcccatggcgcccgtgggcctttgcatcccacctgtaatgaggcaccttggggaggaccagaccaggtggtcctccatgttaaagaaacagtggaaagagtgacacttcccctcccaacctcctcaccttcctcttgggcctaacagttttcctgcccagggccctgcgcacagcagcccccctcctgcactgtctcggagctctccagacactgcccgtgaaatgggggtaatgctcctggttggtattaccctcgggggatgcattgccaggattcactgtgtgtccccttccttttttgcttttaccaagaatcagccgggacagccctgcttcccaagtgtgccgcacagctgcttggcccaattcctcctgtattagtttgttttcacgctgctgataaagacataccccagactgggaagaaaataaaggcttaactggacttacagttgcacatggctggggaggcctcagaatcatggcgggaggcgaaagacacttcttacgtggcagcagcaaaagaaaacgaggaagcagcaaaagcaggaacccttgataaaccctccaggtatcgtgagacttactcactatcacgagaataacggggaagaccagcccccatgattcaattaccttcccctgggtccctcccacaatgcatgggaattctgggaaatataattcaagctgagatttggatggggatacagccaaaccatatcacctccttccctgcctctctaatgcctctctccctgcacaggtgtgtgtcccaatgcctctctcttcctgcacaggtgcgtgttctgatgcttatctccctgcacaggtgcgtgttctgatgcttctctccctgcacaggtctgcttcttctgcaatcaatatgcacaatgctttcaggtcccatcgctctggatgaatccatcaggagaatcctttccttgcacttttcctatgatattacccctggttttaagcctgtttcacattcccagagactgggaactctttgggggcaggcgctggctgcctgtttctgccttgttgctgtctagcactggcttggcccaggaagcttttcagaaacactcatttaaccgcagcagcagcggcggatcctctcacggcgtccgctctgtgccaggctttgttccaggtgctttccatgagtcagctcaccggccgagcattcaaggtctgtttttctttttttagacggagtttcgctcttgttgcccaggctggagtgcaatggcgtgatctcggctcacaccaacctccgcctcccggcttcaagccattctcctgcctcagcctctggagtagctggattacaggcacctgccaccacgcccggctaattttgtatttgtagtagagacaggtttctccatgttggccaggctggtctcgaactccggacctcaggtgatccgcctgcctcagcctcccaaagtgctgggattacaggcgtgagccactgcacccggcccaaggtctgttttacactcgtcaagtattgggcacgtactgatccgtgacttatcccacgacacccgtaagactttaatcgagcagaaatcctttctctgtgggttatcttttcagctttagagactgtcccattttctttgactaatcattcaattataagtcatggagaggatatagaggacttgggcttctggctgtggcggattgcaaagtgaagcaggcctcccatgggcacatggggaggaaaccgtcaggcatgggggggatgggcgtgtcacgtgggtctggtggtcatgtgctgcagcctcaccctctgtgtcatcatgcacttgcagggcccagaggacactccattggctaaggtgttgggaggcgtccactggttccaagatctttcttgaaaagctctatgatgactgctttttcaactcagagctgagaacaggagccatccccactgaaactgggttctcgcattccataggtataatggcagctcttaatttccagagacaaagtgggcttgtgtattgggatgggaaacaagagctcagccataatcatcatggttgaacccacagagtgtcagtggtgatgaagggatcagggtgtctctgggattgaggtccccacacaggccactaaggtcttcccttgatctgcacaaagcaaacagagaaacaaagatgccctatctggctctgggaattagagaccctgcttgagtcaccgagaaacttagggcccttatcaatccatccccagacctgagccaggtggcagacccgaaggcccttgaatacggggggatgttatagccccttaggcatggtcctggcatgaatttataacaaagatttcctcctaaccttccccaaagacacttactggagtgatgtgcaccaaggaagactcctcacagttttgggggagtgaatggacgctgtctctgacctcgagcaaattccttgggcaaccagaccatgtggctcaccaatcatagcaagggtttgtggtggtcaggatattgatggggttttggcccctgttcgagttacagtgggcctggcatgttactgaaccaccttgtgatcattccctcctgcctgaatgtgtaggtgggacacacacatggtaacaggcagaatccctgcatgatttccagacccaacggctcatcatggtagaaagggccaagcggaaggcccctgcaaagtcttctacctactaaaacagtaaacaaaagcaatgtggcatgatcaggagaactgcagagattagtgccatgatccaagcaaggcctgaaggatgcaggggtggtgatctggtttggatctgtggccccacccaaatctcatgttcagttgtaatctcccatgttggaagtggggcctggtgggaggtgactggatcatttggtacgtccttgtgataatcagtgagttcttgtgaaatctgattaaaagtgtgcagcacctccccaccccctctctcttgctcttttttttctccatgtgacgtgcctgctccccgttagcttctgccatgattagaagcttcctgagccctccccagaagcagaggccaccatgctttctgtatagcctgcagaaccgtgagcccattaaacctctttcttataagttacacagtctcaggtatttcttcatagtaatgtgagaacggcctaatacaggtggtggtttctattgcatctccataaacacttctgttttccctaggtaaaagattgagcttgtgaattttgaaggtggtgattacaatggcagcttcagtttcagattcaatttcactgaaataaacacagttcctagtgcctggtgtgcagatcatctggtgaacaccttttaaggtgtttggtggtaatgaagtatgattctctacctattagtaaggacaccataagcaagttgctttcacctggcaggaatagcagtgcacctttacagctcctcctcaggtcaatgtcattgctccagctctttcagtctccagggatgcttgtctcactgttacacagaacatgatgctgacccactacctccatgatatgacatcaattgggcctggtgaggagaaaattgcagattctctagaagccttggtaagagacaaatgtgctaaatcccaaatactaggtcagtcagctttggtcaggaatctagaagctgctgtggttattccaactaggaaagacttaataaagggaattcaaggcttatgcaccattgcaagggccggtgaagtgaagggctggagagctgccatgaaaatcctgttcactcatgggggtggctcccaacaactttgccagaaggggctgcaaatctcaggaactgcttggaaatttccaggagccagttcagtttgtaactgcaaagtaaatggctcacaagggctctcctgggagctgcgtccacccttgctcctgcccacatgcctaactgaactgcctctgtgaacagcggcctctccttcctgtctgctgttggcatccacatcggtgcctcttatttggttgattttactcctgaaacacggggaagtcggttctgggaaataaaattttcggggtctcctttccattaagagaacttcagaggagacataagtaatgctgagttgacaacagacaccacagcttgtgcggtgagaaataaataaatgaccagcaaccctgcagtcatcctttggggatttctggtcagaagccatgtggaatcgatgtaattacccaaatctcatcttgcagttgtctcaaaacaaataccaaacctctctttggttttcagagccgtgcacagggatttttaacttttactctattttacttccacatttatttaggtgaacactgtttagcagtgttgatgctactacaatcctttcataccctccaaatgccccattactgaagtgcttgcgtttgaatcgccgcttgatggataaggggatatctttgaggattttttttctttcttgaaaggtgcatgaatcacacattttcaaatacctacaaatccttctgtttgctttacaagtgagtaacagagactgaaactgagccacagacttttcctctccatatccctctacagttgtcttctggcaattcagaaccgtggaggaccctcagccctaccttctattccctcgtaagcattctgtttattctgctgagaagcctgtagattttttaatctttatctttcaaatgccagaatgtttataggatggactttcgcctattaccgtgtaagcctctttgatctgcaagcaggtatttttcagctcagtttgtgttgacttattccccaggaatgcctggttttcactgctgagcttatgcagtcttttatgtatcttttactttctctgttcctcactcctctgctcttcttagagacatttcatcagtcttatttgatggtgacacagttttgcctcatcctctgtggtctctttcatgcacaattttttttttttttttgagatggagtctcgctctgtcaccagggtggagtgcagtggcgcaatcttggctgactgcaagctccgcctcccgggttcacgccattctcctgcctcagcctcccgagtagctgggactacaggcgcccgccaccatgcctggctaatttctttttgtatttttagtagagacggggtttcaccttgttagccaggatggtctcgatctcctgacctcgtgatccgcccgcctcggcctcccaaagtgctgggattacaggcgtgagccactgcgcctagccttttcatgcacattttaattctgctcatacatcagcactttccttgctcctcttacttcaaagactttcctttctactcagcctgcagatttgtacaatcttgtttcaaagagggcatattttcttacattttacatcaaggcaaaatgcatatcatttccaaaattctctccggctgcctttaataaactcttccatacagcataccttttctccgaatccacggggcagacttccagctgccttagactgtggggttgtttttccggcccctcggtactgtggttgtttctcgtttgagttacttatccccgaatgaggagggctcccttcagaccaggtgttttccagttcatgagctgtgtcctgtctcctgcctgctgcattcttagagctgatcaagcccttctttcctgcattcatcttggaggcagcctggcgtgcaaggccccccgacaaacctctgtatccagcaggccattgccctgcatctacctctgggattaagaaggggtcgtccccgatcccaccgtctgattttaaacccatgccacccgagacctccaggattgagacagagtcgtctggggacgactgattttaaaatccca

SEQ ID NO: 1634 - DNA, 7252 bp, Homo sapiens
caatggaagagttaatagttgaacttcgtctctttcttgaactcctggaccatgaatatctaacctcaactgtcagggagaaaaaggcagtgataaccaacattctgctaagaatacagtcatccaaaggttttgatgtgaaggaccatgctcagaagcaggagaccgctaacagcctgccagcccctcctcagatgcccctgccggagatccctcagccctggctgcctcctgacagtgggcctccaccattgccaacatcctccctcccagaaggttattatgaggaagctgtgccgctgagccccggaaaagctccggaatacatcacatcaaattatgattccgatgcgatgagcagctcttatgagtcgtatgatgaagaggaggaggatgggaaggggaagaaaacccggcaccagtggccctccgaggaggcctccatggacctggtcaaggatgccaaaatctgcgccttcctgctgcggaagaagcggttcggccagtggaccaagttgctctgcgtcatcaaagacaccaaactgctgtgctataaaagttccaaggaccagcagcctcagatggaactgccactccaaggctgtaacattacgtacatcccgaaagacagcaaaaagaagaagcacgagctgaagattactcagcagggcacggacccgcttgttctcgccgtccagagcaaggaacaggccgagcagtggctgaaggtgatcaaagaagcctacagtggttgtagtggccccgtggattcagagtgtcctcctccaccaagctccccggtgcacaaggcagaactggagaagaaactgtcttcagagagacccagctcagatggggagggtgttgtggaaaatggaattaccacatgtaatggaaaggagcaagtgaagaggaagaaaagttccaaatcagaggccaagggcactgtgtcgaaagtcactgggaaaaaaatcaccaagatcatcagtctgggaaagaaaaagccgtccacagacgagcagacctcctcagctgaggaagatgttcccacctgcggctatctgaacgtgctctccaacagccgctggcgagagcgctggtgccgagtgaaagataacaagctcattttccacaaggacaggaccgacctgaagacccatattgtgtctattccgctccgtggctgcgaggtgatcccgggtttggattctaaacatcctctgacgttccggctgctgcgcaacggccaggaggttgcagtattggaggcatcttcttctgaagacatgggcaggtggattgggattttactcgcagagacgggatcgtccacagacccggaggctctgcactatgactacattgatgtggagatgtctgcaagtgtcattcagacagccaaacagaccttctgtttcatgaacaggcgtgttatatctgctaacccatatctagggggcacctccaacggctatgcccaccccagcgggacggcacttcattatgacgatgtcccgtgcatcaacggctcgctcaagggtaaaaagccccccgtggcgtctaatggggtcacaggaaaagggaagactctgagcagtcagccaaagaaagcggatcccgcggctgttgtgaaaaggacgggttcgaatgctgcccagtacaagtatggcaagaaccgggtagaagcagatgccaagcggctacagaccaaagaggaggagctgctgaagaggaaagaggccctgcggaataggctggcccagctccgcaaggaaagaaaagaccttcgagcggctattgaagtgaacgccggcaggaagccgcaggcgatcctggaggagaagctgaagcagctggaggaggagtgccggcagaaggaggcggagcgtgtcagcctggagctggagctgacggaggtcaaggagagcctgaagaaagcgctggcgggcggagtcaccctggggctggccatcgagcccaagtcagggacatcgagtccacagtctccagtgttccggcaccggaccctggaaaactcgcccatctccagctgtgacaccagtgacaccgagggccccgtgccggtgaacagcgcggccgtcttgaagaagagccaggctgccccgggcagctccccctgccgagggcatgtgctgcggaaggccaaggaatgggaattgaagaacgggacctaggggacagcagcaccactccagcctcagagactgcacacccccttgcctgtatcctcatctgtgtgacggcaggaagctctgcccagagtggcctcagctgcacgactccagaggctccacgactgagctctgaggccagtgcctgtcccccaggcccacttgtattctttctactgtaaaatggcgcctttaaaaaagatgtaagactttggttcccaactttgttaaaaaacaaaaaaagtgatggaaaggtgtttgaaaggatgctatcaggcgaagtgacatctttctaaccagataggccattgctttcaccgattccaacccagccctggactgaggatggatggttccatgagcccccagatgaaaacctggattcgacagggaagagcttggatccccggctgccccgggcatgagtgtggctggccatgggcactgggctcgccttgcacgcccaccaggagggccaggggcatacgcagtcctgacgtggactttgtgtcttggcgtaccctctccacgtgcccgtccccctcgtcatcagaggtaaaggcatgagaaaatcgcgctgtgaaacgttttttaccttttattattattttttggacagatgcttttgtcaccaagacatgaaaagctgccattcttcttaacctgttttttaagaatgtctttttactgtgtgtcacacttagatcaaggagttttcagaggttccttattttattaattaattatttgtgctgcttttgacaggtagcagagggttttaatacttcactaacagtacaccctcctcccccttgggctagcatccccagcccttaatccacgtcggagccggcaggtgcttctcacaccaggagcctctgggggcaggggctggctcctcgccgctgtacaggacgtttactgctgcttggggccagggcagtcctttgaaagggaagcaagttccggaatttgttccctcatggaactataacaccttagagcaagaggcaggaattccagggcctcctgcccctccccttcctccagcttgtcaagttaaaccactaatgtgttggtgggcctggccgtgctgcctctcctgagtagggtgggtgcaagtagggcctctttcccagctttcttgcttgccttctgtgcaatatttcttggagaatttggatgcctaaggcataaaggaaaaaaacagagttcatagtttgagctggtatttaccccctgggtttaaaaatcagattaacttcttggtctcccggaggctgctgtcaggaattctccagtacgggaagatgcagtcacttatgacgaaataagtcacccctgaacgcctccgcaggcagattcatggagaccagtcccagtagcaaccgccccttccccaagcatagaatacagaggtgccatacttggtgtaagccttccttctgtccactgtccagaatgtcctttttcacacagaggaagagatggcgggaaaacactgactgactccttgggtttcccccagacatactttcagagcgctagctgtgtggtgcacgggactttacagttaggattcatgtttaaggtggtggcgcttgaggcctgcaagggccacgttggattactgaagcggaaagcggtctcccatgtataagaaaaagttttacaacacgaattggaagctgcttgagtccacctgaacttgaattgattgcaaagccatctgccgggaacggttttgggttcctgagccatcagccagcctttctttcccctctgatgcacgttcctcccggcctagtccgtggaggcccatcacaccagcatccgtgacgccagcttcccactaggacatccaggcaggtcgggcggggacgccacacgcctcagggccgtccgctgcactgccatagaggagccctccctccagtggtcacttcccaccattgcaggcagacttcccaccattgcaggcagctgggcccacttcatatcacacaaaatgaattttctataaagggaaaaaagtttgctcctccatagatttttgctgccttcgggtcaaatagtttccctggttgacgctcttgggccactctgattggcagcctgctttgccaaagagaactgtgtgaggttttggtggttagtaagagaagggggagatggccagcctgaagtcacggtcctggcccagcacaggtgggcagcagcgagctggcaggtgaagtgtgagcagcacgcaaagtgtcacgtgggccttagccgtcacccaccagcttcctcaccaggcaaggaggccccggagccttagcagggacttgcccgacggcacagctgattggtgctcgactcccagcatgcatattttgttgtaaaaacccaggtttgtaattcacatccacaaccctaagccttttaaagcggaggcaaacgttaacgaaccccatcgtggtccatggagcctttcaaaatgggtgccctggaggggcctgacagtgggttccttccatggcggatactcccttgaaatttcacattccatcaaagtttaaagcatttacttcagaataagttatttatgtgtatatgttcaataaatatagtttttaatttatatctgtacatattagacacacgcgagccatcttgccagaattctgacagtgatgtcattttattcccctcccaaaacatgccccaggaacaagcaccccttgcctctgtggcagctgcgagtgtgtctgatttcataacgaagccaggctgagggcaagaggcccgacaggcaggccagggtccccggagaagccggatttcttcgcaatgtcactggtacttagcagatggtcgtgttcacaggggctagccacctgtactacggtgccgaccgcaatgcgaggaatgtggtggccacgcgatggagctggccggaggacaggtcaggtgagggggccgacccctgcggggctcagggctccttccattctaaccttgagccacagtgtcactcttcagggctctgctcctggctctattttgttaaggtgtcatcagccttcaacctccatttatatatttttataatgttaagccactgaccaactttttcatagaaacaactatcagatttgagggctccctttgtccccctgacctgggcacaggcatgggccatggctccctcttcccagaatctgcggggaactggggcaaggcccatctgtctgcaaggctggtagctctctccctcggcttccagagtccacggcagttgcaaggtaaccagtgtggatctgctgagtcaccccaggcaccagacttaccccaggagcatgggccactgtccatggggccttccttgagaccttcccttggggctggcgggcggcggcttaccagctgggtcagtcccatctcgcccctctgtgcctatgccctggcgttgccaggcttaaccttcccctgtatcttactcatcccagaattattactggccatttctaaatagacaaaaactaccctaaaatgtggagatttactccttttgaaaagtctgtttcaaaaagtgtggcctcagctctggaggccacccccaggaaggagtttgaggttcattgtcattatggccacagtttggtgcttgtgcacgggactcaaagggcagcgtcgaagctggggttaggtgtagggttgtgagcaaagctcccctgtttgtggccacaccttccctttccaaaaaggctattaattctactcacccactatttggggggatgtaaattttgcccacagactttgccacccaggtgaggtgctgtgttcatgcacggaactgatgtcattagacaccatccaaggatgggcagcctgcagtgtggccggcgactgccatccagagaaaaggcaccttgtgccacagggcggggccgacaccctgagctcacaggtggcccctgcattcaggtggatgtccatccttgaaacagcctcttctgggaacacagcactggaggtctccaggcatcagggttggccggcagggtgccctgcagcttacataaaggtcgtggcaatgtttcaatgttaaactaaactattgccttcctcttacttttcctaaaatgattttctaatgggaacagtcacttcaagttcatgacatagtttgaaggaggataattcattttttcctggttgtcactgtcttcttatccccttggtgggctgggttcatactgtgaaataaactaaaatgaaaccaaaacgttcctgccgtaaatacgtggcacagcactgcagaaaaagcagtcacctctattcgtgagtccccaagccatagcagggcgtctgtaaaagaagggaaactgcacccaggaagtggtgggcgtcagacgcatcctttcgcccgtagttcatgaaatagttccggctttggtcttccagaaaatctcaacttcaccgtgcacaagtgttaccgggtctttttagtgtagccatggaagatactttcaaaaggacatcttcagatcataagtcttaggaccaaaggtgtttttaatgagataatctttttgattttctaacaagaaaggaaatattcactttacattttaacatcaacttttaagtgatattcagaattaattgaccatggtgatacgttgtaaaatgttttcatattaagaatgtaattatttccttattgtattttttaaaagctaaagtcatatttaaaattctctttgaaagaaacaggcaaagaaacagcaaagatttttttaaattaaatatgttagtagtgcccacttcaaatgactgtaaatatattttcactgtttctcaatgtatttaattcataaagtaaaaattttatgaaaagaaacttgcaaggaaaatcctagttttcagtccactcgccccactttgtagtagcttcactgaatttcctgctttcctggttgaattttctactgtttcacgtggtgtaaccctagactggcgcccttggcgtgcccctttgtgtatgaataaacttctctcccccagccccg

SEQ ID NO: 1635 - protein, 722 aa, Homo sapiens
MEELIVELRLFLELLDHEYLTSTVREKKAVITNILLRIQSSKGFDVKDHAQKQETANSLPAPPQMPLPEIPQPWLPPDSGPPPLPTSSLPEGYYEEAVPLSPGKAPEYITSNYDSDAMSSSYESYDEEEEDGKGKKTRHQWPSEEASMDLVKDAKICAFLLRKKRFGQWTKLLCVIKDTKLLCYKSSKDQQPQMELPLQGCNITYIPKDSKKKKHELKITQQGTDPLVLAVQSKEQAEQWLKVIKEAYSGCSGPVDSECPPPPSSPVHKAELEKKLSSPSSDGEGVVENGITTCNGKEQVKRKKSSKSEAKGTVSKVTGKKITKIISLGKKKPSTDEQTSSAEEDVPTCGYLNVLSNSRWRERWCRVKDNKLIFHKDRTDLKTHIVSIPLRGCEVIPGLDSKHPLTFRLLRNGQEVAVLEASSSEDMGRWIGILLAETGSSTDPEALHYDYIDVEMSASVIQTAKQTFCFMNRRVISANPYLGGTSNGYAHPSGTALHYDDVPCINGSLKGKKPPVNGVTGKGKTLSSQPKKADPAAVVKRTGSNAAQYKYGKNRVEADAKRLQTKEEELLKRKEALRNRLAQLRKERKDLRAAIEVNAGRKPQAIEKLKQLEEECRQKEAERVSLELELTEVKESLKKAGGVTLGLAIEPKSGTSSPQSPVFRHRTLENSPISSCDTSDTEGPVPVNSAAVLKKSQAAPGSSPCRGHVLRKAKEWELKNGT

SEQ ID NO: 1636 - DNA, 7522 bp, Homo sapiens
ggcgcccggctccgctgggggcgggacggcgggcggcgggcggggccgtgtgcgcctgcgtggtgtctgtcccggccgcagccccacgccggctgcagctccgcgagccgagccggatctcgagcggggtacacgggctgaggcggcggcggcggccccgccccggggctccattgttaaggcggctgcggctctgtcggctgttcagctgcgctccagtcggcccaggcgccgcggcgaggagcgagcgctgcgaggtggcggcctgagcaatggaagagttaatagttgaacttcgtctctttcttgaactcctggaccatgaatatctaacctcaactgtcagggagaaaaaggcagtgataaccaacattctgctaagaatacagtcatccaaaggttttgatgtgaaggaccatgctcagaagcaggagaccgctaacagcctgccagcccctcctcagatgcccctgccggagatccctcagccctggctgcctcctgacagtgggcctccaccattgccaacatcctccctcccagaaggttattatgaggaagctgtgccgctgagccccggaaaagctccggaatacatcacatcaaattatgattccgatgcgatgagcagctcttatgagtcgtatgatgaagaggaggaggatgggaaggggaagaaaacccggcaccagtggccctccgaggaggcctccatggacctggtcaaggatgccaaaatctgcgccttcctgctgcggaagaagcggttcggccagtggaccaagttgctctgcgtcatcaaagacaccaaactgctgtgctataaaagttccaaggaccagcagcctcagatggaactgccactccaaggctgtaacattacgtacatcccgaaagacagcaaaaagaagaagcacgagctgaagattactcagcagggcacggacccgcttgttctcgccgtccagagcaaggaacaggccgagcagtggctgaaggtgatcaaagaagcctacagtggttgtagtggccccgtggattcagagtgtcctcctccaccaagctccccggtgcacaaggcagaactggagaagaaactgtcttcagagagacccagctcagatggggagggtgttgtggaaaatggaattaccacatgtaatggaaaggagcaagtgaagaggaagaaaagttccaaatcagaggccaagggcactgtgtcgaaagtcactgggaaaaaaatcaccaagatcatcagtctgggaaagaaaaagccgtccacagacgagcagacctcctcagctgaggaagatgttcccacctgcggctatctgaacgtgctctccaacagccgctggcgagagcgctggtgccgagtgaaagataacaagctcattttccacaaggacaggaccgacctgaagacccatattgtgtctattccgctccgtggctgcgaggtgatcccgggtttggattctaaacatcctctgacgttccggctgctgcgcaacggccaggaggttgcagtattggaggcatcttcttctgaagacatgggcaggtggattgggattttactcgcagagacgggatcgtccacagacccggaggctctgcactatgactacattgatgtggagatgtctgcaagtgtcattcagacagccaaacagaccttctgtttcatgaacaggcgtgttatatctgctaacccatatctagggggcacctccaacggctatgcccaccccagcgggacggcacttcattatgacgatgtcccgtgcatcaacggctcgctcaagggtaaaaagccccccgtggcgtctaatggggtcacaggaaaagggaagactctgagcagtcagccaaagaaagcggatcccgcggctgttgtgaaaaggacgggttcgaatgctgcccagtacaagtatggcaagaaccgggtagaagcagatgccaagcggctacagaccaaagaggaggagctgctgaagaggaaagaggccctgcggaataggctggcccagctccgcaaggaaagaaaagaccttcgagcggctattgaagtgaacgccggcaggaagccgcaggcgatcctggaggagaagctgaagcagctggaggaggagtgccggcagaaggaggcggagcgtgtcagcctggagctggagctgacggaggtcaaggagagcctgaagaaagcgctggcgggcggagtcaccctggggctggccatcgagcccaagtcagggacatcgagtccacagtctccagtgttccggcaccggaccctggaaaactcgcccatctccagctgtgacaccagtgacaccgagggccccgtgccggtgaacagcgcggccgtcttgaagaagagccaggctgccccgggcagctccccctgccgagggcatgtgctgcggaaggccaaggaatgggaattgaagaacgggacctaggggacagcagcaccactccagcctcagagactgcacacccccttgcctgtatcctcatctgtgtgacggcaggaagctctgcccagagtggcctcagctgcacgactccagaggctccacgactgagctctgaggccagtgcctgtcccccaggcccacttgtattctttctactgtaaaatggcgcctttaaaaaagatgtaagactttggttcccaactttgttaaaaaacaaaaaaagtgatggaaaggtgtttgaaaggatgctatcaggcgaagtgacatctttctaaccagataggccattgctttcaccgattccaacccagccctggactgaggatggatggttccatgagcccccagatgaaaacctggattcgacagggaagagcttggatccccggctgccccgggcatgagtgtggctggccatgggcactgggctcgccttgcacgcccaccaggagggccaggggcatacgcagtcctgacgtggactttgtgtcttggcgtaccctctccacgtgcccgtccccctcgtcatcagaggtaaaggcatgagaaaatcgcgctgtgaaacgttttttaccttttattattattttttggacagatgcttttgtcaccaagacatgaaaagctgccattcttcttaacctgttttttaagaatgtctttttactgtgtgtcacacttagatcaaggagttttcagaggttccttattttattaattaattatttgtgctgcttttgacaggtagcagagggttttaatacttcactaacagtacaccctcctcccccttgggctagcatccccagcccttaatccacgtcggagccggcaggtgcttctcacaccaggagcctctgggggcaggggctggctcctcgccgctgtacaggacgtttactgctgcttggggccagggcagtcctttgaaagggaagcaagttccggaatttgttccctcatggaactataacaccttagagcaagaggcaggaattccagggcctcctgcccctccccttcctccagcttgtcaagttaaaccactaatgtgttggtgggcctggccgtgctgcctctcctgagtagggtgggtgcaagtagggcctctttcccagctttcttgcttgccttctgtgcaatatttcttggagaatttggatgcctaaggcataaaggaaaaaaacagagttcatagtttgagctggtatttaccccctgggtttaaaaatcagattaacttcttggtctcccggaggctgctgtcaggaattctccagtacgggaagatgcagtcacttatgacgaaataagtcacccctgaacgcctccgcaggcagattcatggagaccagtcccagtagcaaccgccccttccccaagcatagaatacagaggtgccatacttggtgtaagccttccttctgtccactgtccagaatgtcctttttcacacagaggaagagatggcgggaaaacactgactgactccttgggtttcccccagacatactttcagagcgctagctgtgtggtgcacgggactttacagttaggattcatgtttaaggtggtggcgcttgaggcctgcaagggccacgttggattactgaagcggaaagcggtctcccatgtataagaaaaagttttacaacacgaattggaagctgcttgagtccacctgaacttgaattgattgcaaagccatctgccgggaacggttttgggttcctgagccatcagccagcctttctttcccctctgatgcacgttcctcccggcctagtccgtggaggcccatcacaccagcatccgtgacgccagcttcccactaggacatccaggcaggtcgggcggggacgccacacgcctcagggccgtccgctgcactgccatagaggagccctccctccagtggtcacttcccaccattgcaggcagacttcccaccattgcaggcagctgggcccacttcatatcacacaaaatgaattttctataaagggaaaaaagtttgctcctccatagatttttgctgccttcgggtcaaatagtttccctggttgacgctcttgggccactctgattggcagcctgctttgccaaagagaactgtgtgaggttttggtggttagtaagagaagggggagatggccagcctgaagtcacggtcctggcccagcacaggtgggcagcagcgagctggcaggtgaagtgtgagcagcacgcaaagtgtcacgtgggccttagccgtcacccaccagcttcctcaccaggcaaggaggccccggagccttagcagggacttgcccgacggcacagctgattggtgctcgactcccagcatgcatattttgttgtaaaaacccaggtttgtaattcacatccacaaccctaagccttttaaagcggaggcaaacgttaacgaaccccatcgtggtccatggagcctttcaaaatgggtgccctggaggggcctgacagtgggttccttccatggcggatactcccttgaaatttcacattccatcaaagtttaaagcatttacttcagaataagttatttatgtgtatatgttcaataaatatagtttttaatttatatctgtacatattagacacacgcgagccatcttgccagaattctgacagtgatgtcattttattcccctcccaaaacatgccccaggaacaagcaccccttgcctctgtggcagctgcgagtgtgtctgatttcataacgaagccaggctgagggcaagaggcccgacaggcaggccagggtccccggagaagccggatttcttcgcaatgtcactggtacttagcagatggtcgtgttcacaggggctagccacctgtactacggtgccgaccgcaatgcgaggaatgtggtggccacgcgatggagctggccggaggacaggtcaggtgagggggccgacccctgcggggctcagggctccttccattctaaccttgagccacagtgtcactcttcagggctctgctcctggctctattttgttaaggtgtcatcagccttcaacctccatttatatatttttataatgttaagccactgaccaactttttcatagaaacaactatcagatttgagggctccctttgtccccctgacctgggcacaggcatgggccatggctccctcttcccagaatctgcggggaactggggcaaggcccatctgtctgcaaggctggtagctctctccctcggcttccagagtccacggcagttgcaaggtaaccagtgtggatctgctgagtcaccccaggcaccagacttaccccaggagcatgggccactgtccatggggccttccttgagaccttcccttggggctggcgggcggcggcttaccagctgggtcagtcccatctcgcccctctgtgcctatgccctggcgttgccaggcttaaccttcccctgtatcttactcatcccagaattattactggccatttctaaatagacaaaaactaccctaaaatgtggagatttactccttttgaaaagtctgtttcaaaaagtgtggcctcagctctggaggccacccccaggaaggagtttgaggttcattgtcattatggccacagtttggtgcttgtgcacgggactcaaagggcagcgtcgaagctggggttaggtgtagggttgtgagcaaagctcccctgtttgtggccacaccttccctttccaaaaaggctattaattctactcacccactatttggggggatgtaaattttgcccacagactttgccacccaggtgaggtgctgtgttcatgcacggaactgatgtcattagacaccatccaaggatgggcagcctgcagtgtggccggcgactgccatccagagaaaaggcaccttgtgccacagggcggggccgacaccctgagctcacaggtggcccctgcattcaggtggatgtccatccttgaaacagcctcttctgggaacacagcactggaggtctccaggcatcagggttggccggcagggtgccctgcagcttacataaaggtcgtggcaatgtttcaatgttaaactaaactattgccttcctcttacttttcctaaaatgattttctaatgggaacagtcacttcaagttcatgacatagtttgaaggaggataattcattttttcctggttgtcactgtcttcttatccccttggtgggctgggttcatactgtgaaataaactaaaatgaaaccaaaacgttcctgccgtaaatacgtggcacagcactgcagaaaaagcagtcacctctattcgtgagtccccaagccatagcagggcgtctgtaaaagaagggaaactgcacccaggaagtggtgggcgtcagacgcatcctttcgcccgtagttcatgaaatagttccggctttggtcttccagaaaatctcaacttcaccgtgcacaagtgttaccgggtctttttagtgtagccatggaagatactttcaaaaggacatcttcagatcataagtcttaggaccaaaggtgtttttaatgagataatctttttgattttctaacaagaaaggaaatattcactttacattttaacatcaacttttaagtgatattcagaattaattgaccatggtgatacgttgtaaaatgttttcatattaagaatgtaattatttccttattgtattttttaaaagctaaagtcatatttaaaattctctttgaaagaaacaggcaaagaaacagcaaagatttttttaaattaaatatgttagtagtgcccacttcaaatgactgtaaatatattttcactgtttctcaatgtatttaattcataaagtaaaaattttatgaaaagaaacttgcaaggaaaatcctagttttcagtccactcgccccactttgtagtagcttcactgaatttcctgctttcctggttgaattttctactgtttcacgtggtgtaaccctagactggcgcccttggcgtgcccctttgtgtatgaataaacttctctcccccagccccg

SEQ ID NO: 1637 - protein, 722 aa, Homo sapiens; identical to SEQ ID NO: 1635

SEQ ID NO: 1638 - DNA, 71388 bp, Mus musculus
  misc_feature (1)...(71388): n = A, C, G or T/U
acaggccaacccaatgtagacaactgtcactaacactagcttcccaggtggctctgggttgtgttaacaaagataaccattaaagagggtttattgtgactcatagttccacagtactgcgtatcattgcagagaatgcacggcaccagcagtgtgaggcagctgtccctagtacatcagcagagaaacagaaagcagtgcttgctcgtgttcagcttattttcccatttttattcatctcagcacttcaatccaggggatggtgatgattgaggatgtttggggagggatctccccacttagacaagcctagagctttttctcctagctacttcaagatcctgtcaagtggagccaatattagccgtcacagctcagaagactttcaactgactcataacatggtgagaaagtacgttcattcatatgcacattctcacgagagatggagacagacagagaggaaaagaaggtagggtgtccacaatagcagggcacactgtctaggtagatgcatgaccctggacatgagagcatcaccctaatatcctaatcactacataaaggctccactcttatgactgttactatggcaataaaattccaacatgacttcttggaagggacagttaagacatagcaaccaactgtagcttatgaattgtccgtcttgcatttcctgtatcacacaatgggccacaaacccaaggcaaaaatcctagaattttccttaaagtttcttctccttccttccttcctctctctaactcaccccactcccttttctggctaagtctcccagtgggtggtgtcttccccattcctactgctgcctaggtgatctttactttgttccaactgcagcctcctaactggtcatactggttcactgaactctttcaaaccactcagcaaaggaaagagatcttcctaaatcacaaccagggtccaggaccttcctgggttccctgatatttgcagctcccggcttgcatggcccctcctgatatttacagctccatcctaagtcacacacaccaccacagagaagctgcagctctccttgggtttcaaacttgagcctgctctgactcggacatgcttcaccctcgactctccttcctgacgctctcactccaaggccttgaaccctgtcctcacaatgcctgctcattcatcacaaattattatacagttgcctattttcttgtctgtccctcctttaaagtctttaggacatggccatggcctattcaccttcatgttcttggtagcaagtacagtaaacaatacttacaattacccacgagccatagggctctgtatacatgctgagttgatgaacggaagttatttcatcttgaccacaatcctgcataacaggtatcattatcctcatttaaagaagctcaaagaagttaattggttccaatccccagggcaggtaaggagacagagtcgtcctctgttagtgcagtgaagatgtgcatattctttctagtccattgccctgtacctttcaatggagtgcaattaaaaaaacaaaaacagagcaaaaaacaaaaacaaaacaaacaaacaaacaaaaaacccaaaaaccagatatggcattgagaattgtattagttaattttctcgttgctgtggcaagacatcagagtgacaaactttattggaagagttttctttggctcccagtttgaggctggcgagggcagtctcaggagtttgaggcaactgctcgcattgcatcagcagacaagaggcagagagcagtgaacgctggtatttggcttgctttctccttttcaggctgggccccggaccacggaaagatgttacagaatgggtcttctgcatgaattaacccactctagaacccccatcacagacatgcgccatagtttttctcctgggtgactctaggtcctgtcaagttgacaatgttaataaccaaaagagtcaacagggaagagaatcatttttgacaaaatgccatgcagcgcagtctcaggttgccagaggcggaaaatagttataaacagaagcaagcgagcaataggaggaatgctggtaagagatggctgcgggggcttaacaacttaggaagacatggatggccgaggttggaagagaagtctggcaaggcatagaaaatacatcgtttctttatacattggccactttatcaagataatagagaaattagtattcttggtgcagcatagatgacaactctgctcatgccaatattttgacatctgaaaacactgagatgattaatatataagagcataaatgccagccaggctgagttctcagaaatcctgtgcagtacactgagaatatcttttttggatgctgccagagtcctcaagacaggccattatgaacgtatttcttcatgtcttgtgcttcatcaacacattctattgtgttccaagtgctaattaaaattgcatgccaattgccaaagtgaaagcaaaagcacttacgttataacaagtgtctaaattaaatggatcaaaacagagcatctcatgccaagctgacatacactcatcctacctgtgaaattctggggagaggacagacacgcagactgaaaatcagatagcatctccccccaacctggaatttatagttattcagaatcttctagaacttcaaatttcacacaagcagcttcatgagccattaccctcttctgcctcttcagtgactaaaatgctttgatttggaattcagggaaaggtgatgctatgatgtcacaaacacacagctgttagcaaaatgtctttctgtccctttcaagaaatcccattcttagtttgtggttaccttcctgccagataaagacaatctttgaaatatttaccccacaaatggtaccctagcttctcgtgaagaaaaaagaagtcagaggctggtaaattctcctaactattggactcgatattgagagtaaaactcagaccaccacagatccttaattaaaacaatactctttcttgtcatagccagctgttgtggacagaagtgcaagcaaatctcaaacctacgagcatcctgagactattcttcagcctgtgaaggtcaggctgtttctcctcatcctgtttctcgccattcttctacctacccagagcatccctattactactattcatctactccttcacagcatcctttaggattagctacgcacagaaacttcaagtccaactcaaagagtgttatgccttcctttccgtctccctctgcccatttgccttctgtaggtctttggatgccttcctcaaccccattttctgcttggcaagctcatctttgcaaatccagtcagcaaccacttcccttaagtcattctgactctctcaaagtatagttagtcagtctctccttagcactatcaggatacctcatcgactgccctttgtgtcagcacccctgcccccccccccatgtgtgtgtgtgtgtgtgtgtgtgtgtctgtctgtctgtctatgtgcatctgtctatgcttactacatccattcatagtatacacttatgggtgggaagtgcctctcattgatcttgtcaggctagggctttgtacaatacctactcataaaagaataaaagaacgccaacattgtttactggaaaagagcactccattctgatgactgaaagcaggccattcaaactaaacatcacaactgacaatggtcccatagaagaaaaataatattaaagtgaatgcaaagttaccacttagtgacagcctaaaataatgcagagagtagtaaaatcacacagttgtagaatagaaggaaatttcttgagactctattttgtcctttcctacatgatttaagacaataaggtcaacaagcacgtggcacgtctcatgaccttctaccaggcctcccaaccccacgttaggagcttgatctgccatattctaccattttttctggagaacacttcttgctatcactggaaattccatcctctgttctagtctcaatcatctattttgcacacttacatgtgtgcgtgtgcgcgcgcacacacacacacatgtcctaggaattgttttgagaaaaccatctgtcagctaagacacatgcttgcataggtcctctcgtgttaacttgcatccctgaggactaatggatgctgtctcagtacaacagtgtggctaattatttgtgattcactaaagcaaaaacaaaacaaaacaaaacaaaaaacaaaaacaaaaacaaaactcctgatacaaagttttcaaggtagaagccaattttgcagcctataggacaccactgtcagccacatcagtgggctctttccatgaggcgtgattagatgttagaaatgaatgcagatcaaaggaaaactttaagttctagtccgttccaaagccaatggagtcactctattttagttcctttaactccatatgtgactggcttttacggccacagtaagataaaccagacaccatgtttctatcaagcttataaaaataaaaaccaatattcacaaaacagtgttcagaagaggagcatctagtcagctgtcagctcatacacacgagcaccataataaacaccagaattaactatttaaaatggtttgccgcactataaatacatttctactcacacacttagtgatacttaactagatatatagatgaaggtcagactgagcactcggacagtgaataatgatcagtgtctggcttcaccttcattttttttttcacgatcagaaatttatgtctgaatcatattgaaacactttgaacctagcatgcatctgtcaccagaggacatgtgctcaagaaaacaggaaatgtttgtatcaccttagacagagcatagtaaagaatacaaattatcctcaaacactgtttggctaaagccacactaaatagccaaacagtgtttgaggacagtttgtgtatatatgtatatgtatgtgtatgtatgtgtgtgtgtgtatatatatatatatatatatatatatatataatattattgctgtttgaataacttaaccaccacactgttctcttctgtgagactacattcctagattgtaatatgaaagggaggcaagtggttagttatttgaaagtggaccagaacaagaaatgtcaagaaagagcaggagcattttaccaatacaagctcaatcctggaaagggagagccagaactggaaatcccaacctctgttctagtctcaaacaactattttgcccactttcactcacacacacacacacacacacacacacacacacacacacacacaccaggggttgttttgagaaaaccatttgtcagctaaaacacatgcctgtaaaaggacaattggagatcagatggatctctaaaaccagaaaggcacaaaccaaaaggattgttttgagaatttgtaattttattatgtatttctaatgctttgttataaccaagggagaagtggtaggtaaacagttgggttacctaggtcttagctagagagcacagtccctttcagtacctcagaagccaggggcaatggatagaatacaggacaaactgaggactgagcagaatgagagacccaggtacaggagcaggatcacagcccagagaactttaaaagagggagaagaaaacaaatacttagttaccaaacccatggaacttcaattagaaacactaggaaaaggtaaactatttatccaaatagtgtacaaagctcactattaccaactaccgcttgatgagcagcccagcccagcaataaacagttcaccacggaggaacagaggaacaaagcacccgtaaggctagcaacagggactgggagaccttaagatctgtctaccttctgaatcttaacgtatgcttggtagaaataaagagaatgttaagaaatagcaaaaaaggctggagagatggcttagcggttaaggtgcactggctgctcttccagaggtcccgagttcagttcccagcaatcacatactggctcacaatcatctgtaatgggatctgatgccctcttctggtgtgtctgaagacagtgactgtgtactcatatacataaaataaataaatattttttaaaaaaaagaaatagcaataaatataagggaagatatgagtttctcccataagcataaatgttaattaggtgattaaaaaatagttctaaatgtgacattatttttttttcaattgtgatgagaaataccttttcacctcaaagagaaaaatttagaatgaggaactggtaagtcatttcctaggtccctttcatcagtattttagaattttccagaaacttaaatgcctatatggaatcaatatatctgatggtaagctgaaaatactgttaactaacagaatatgaattatgttcacacttttgtcacataagcagaacctgccatgcggtgatggcgatacatgccatcatgtcctaagtccagcactcaaggaaggcaggcagatctttgagttcaagaccagcctggtctacggaaaatgttccaagacagccagggctatacagacaaaccctacctcaagtaagtaaataagtaaataagcaaagcctacctttcagaactcactatctttgtccaaatatctcttttagcaaaggattattagaacagaatgtttcgtataattttcagagtttgaattactgtgatctcagtcaaatatcctcatgctgagcaaatacataggaataagattttgctggttactgttaagttgaaatgggcatattacaatcaaaggcatattcagtggggttatttcttctaaaaataaacaaagttaatttctatggagcaaacccagagaggataaaacaccatgagactcagttatagggggagaaaagattggcaaaggtagaagacactactgaagcccagaaatacaatgaacccccaccaattcgctgcaagccttactatagacacaatagtatatttttatttctaaccttacagtgaagctgtttagattttttaaaaaaggcctcaactcttaagcgtatctataataccagcacttgggaggatgaggttggaggatcattgagtttaaggccaatctggcctaagtgaaactttacctccaaaacaaacaaacattcaaaagcaggagaggtggctcagcagtgaaaaactcttgcagaaatcctgggttcagtttctagcacccacataatagcttacaaccatctgttaattctcgttttaggggatccaatgtcctcttctgggctccaggcacataccacacatacatgcacacaggcaaaacacccatatccacataaaataaatctttaaaaaaaaagtatcatcaccaccaagaaatatacaactttttctctgaagataaaacagcaaatgaattaaactcagggctacagcttcagaaggaaatactgacttccatgttgcccgaaacagaagccatgcatcgtcagagcagatttctggtggagtcccacgggcttcactagccatgtgacttctgcctctgcagctacatgactgaaacacactccagccatctcttccagtcctaacatttcagccaccctcaaataacaccggggagtagtgtcctttggaacactcactggaataatcttagaagcttgcttgctcctggagaacctgaggctggagtagcaaaccacagcttagagcccagaagtccagcctacatccaccagttagttctcccacatcaacaaataaaggagtgcagagaaaagaaagagggcacatagagctatggaaatctttgatgtgttatcagtacagttattgtgctttcatttctttttttcaagttttagaccaggtacaaagtgactctagttaaggatttcatacatttcctataaatcttgataatatcaacaggctaatctagctttttaaactacattgcacaaggatctaaaatggggaatgcatacactttggcatagttgtgatggtttaagaggtccttgcagtctggcccaaatgtgatttcatggtaggggaaatagagcagaaagaggctcacctctgctcatttggtcaaacactgaaagtcagagagtccaggtctttccacaatgacggatgttttcattagagtttttgtttattttgtttttgtttttactcaagaaaagtgagaggcactcatttcaaacaacctagggttaaaagatatgctgcatgtgctatcaagagattaattcacttaatagtggcaaactaaaaacatcataaagtattccagcttgtcacaaaagagaaatagtacccttttgccctataatatatccatgccaaagtcacaaaactaaacgttctgtactatgtaaggtgtttgcatcttaaggttatttgtaacctaacttcaagctttctggatgcttccttattttggggtttgatagtatcgaaccaggaaaatctctgaggaacatataaatagcaaccaaatataatctttataaaggaaagacatagtcttaggtttctagcaatatcattttaaaacaggagtttttaaatagcaaccctgacagggcccctctcccttctttgactatttaagatttggaacacagataataaacttaggttggaggaaaccttacagtatataaaactctgtgtcttttgattttcatgatgctggagctttgtcaagggcactgtttttaagatccagttttaccaaataaaaccaaactgactttaaataatattctctgcagtgtttggttttccacaatgtaaagtttacattgaattgggattgggatttcttggactttgcaagttcctctttaaccctcctatcccttcatcccgccctactgtcaaatggccttgctgcagtacagtacagaaaagttgcggagtttgcaatcgggtatctagctttccatctctaaggctctcctggatgttctaggcctgctccatcgcttctcggcttaagtgtagggcagtttagagagtgaagaggtatttgctatgcttctactcatttaaaaagttgccacaatgcaggttaattccgaagtgggcatgaaggcaatccaggggccaccgcgtgcgttacaggagcgcacagcaagaatgtaggaatcccaggtgaaggtcttccaaggctgaggcggattcatttgcacccagcgagcatccgttggtctcagcgcggctatccgtgactaccagtgagggggtaagggtcacaagtctcacggcaagcggtgacaatctgacagaaccaggccgccttggctgccacccgcagtcacataaccctattcccgaaaggcaacccagaatgtccccggcgctttaggcgcatcgagcactttgcccgtcgggccgagtcccccacctgttggcacgctcccccgagctaggctttggacactgtccacggacagggaatgtgacagacgatcataaatatgcaggagagatgcagccaagacagcagagccaccgggtcggcgccggcgggagccacagagctggagcccggccccagtcgccgtgcagccaaggccaggcgggtcgcgccggcgcactccggccaccgcacgggcacaaggggctccggccgcgcggacaaccacgccgagccccgctgccgcccaccgtcccccaccgcgcgacccggcggcatggagcccggcgcggcgccccggtccgcagagcccgccgcgcgccacggcgacggcaggaagaagatggcggcggccgtggcggcggccaccgcggcctcccacgcgccnnnnnnnnnnnnnnnnnnnnnnnnnnnnnnnnnnnnnnnnnnnnnnnnnnnnnnnnnnnnnnnnnnnnnnnnnnnnnnnnnnnnnnnnnnnnnnnnnnnnnnnnnnnnnnnnnnnnnnnnnnnnnnnnnnnnnnnnnnnnnnnnnnnnnnnnnnnnnnnnnnnngacgcggccgccccgggagaaggcggcggtggcggcgcggacggccccgagcggaccggccgcggcgaggcggagcagccgggtggtggcggccatgggcccgcgccccaacacaccgagacgctgggcttctacgagagcgaccggcggcgggagaagcgccgcggccgcgcaggtgaggcgagcgagcgagcgggcgggcgggcggcactaggccgcggcgggctaccgaggggccgaccgggctgtggtggcggggacgccagcgccttccctctgcgcgcggagcggccgcggctccggtggctcccatgtccccacggccggtgacagctaccccggcggctagtgcgcgcggcccgacgttcccgcagccatccccgagccaggtgcgcccgggagatcgtcggtccccggtccccgagagttcgcgaccggcctcaacagtgacaggcatctcccacatccgaaggaggtcaaaaatgggaaacgcagggctttctaggcgatgtcaatgccgaggtgactcttccccctatggttttatgcgaagttgagtctcggaaacctgttaacttgcccgccgaatccatttttcgtagactcagctgacagtgtggtcgtgaccgtgaagttcagcagttttctctcaaacagaaatgtgcggcaccccttaaaatgttacatgtggagttttcctaaactaaaacttaagccagaagaaacagtttgtcacacaagaaaatacgtaccacttttaagccctactgtccataagctctgaagcatactgttaaaatattacaatcccctgtgttcaaggatcttattaagaacttttaacagctttggtatttacactgaagcgttctattaagcccggaagcaaaagggaaagttttggcttggccgtttcattgggtataatagtgattgcattttaattcttgcatcgtagatccaagatcttggacagcaacttgatgacatttcttccaacttattctgagctaatgcagtggaataaggtcctgcagcttatataaatactcgttcaagttataaggttgactccattcactatgggtattgaaattataggagtcctaaaagtctgtaagactggtggatagatcctgatagacttgctaattctcagaattggacatagagttttgcatcagtctccatatctttgaaaactcaggcaccagctgtgtgccttgtttgtttggttttttttttccccctttattttctatttggtttagttgtcagttaaacacttgcttgcaggaatgtttgctttctaaattggcaatacctaagtaaaccaaagtcttcaatctctcagccgcttgttcacttagacttgactagggcaagcaaatagatgcgaccaggtttcactacggtttctttgaaatcttttcaagcttcaggaaagcctttatgttgtttgcatgaagaaagacaatgaagctgtgcagagcctttggtgaacacagaccttgaacttctgaagtgaagtgcatttattcttccctggtactaacacagaccttgaacttttgaagtagtgagcacccctgggctgagctggatacttggacttgtataaatttaacatcatagcacacactcattcatcacagaggcagtgcactgagcatcatatacttaacaggtttaaacctggattttcaacctgcagtggcagaaagtccttactagggagccggcatgaagccgtggctattggggtggccctccttgtttccatcagtcttgtatgagggaaaagatagtggttactcccgctttggtagatggcattagggatctaggcaggcatcccaggaacatttcagaagtaccagccagtggttttcctgtgtggactcggtgtgaaccaccttcttctgacccctggtgtctgttctaagagccaggaagctctcactgttgctgatgcatgtctacctgtgactgggtctgcagttggccacggcatccccactcacttagaaatccaggcgttctttttgttcacccccaagtgcttctctcttctgctctgttttctttctttgcctccttaccaagaaatagaaaacgggttgtctgggccagagggcaccacctagtgtcagactggaaacatctttctcagtcatttatgtcactaaggtattaatcgtccattctctgtaaaggttcctgtgtacttgccctgtcgtcccctctgcaagctggggcagtctgtgccgttccttttggaagtcataatcttagtgtcttgatggccttaaccatcacttagttccaatgtcccttttatcattttccccaaggcgttcagagctcctttataagacatttattggtgggtcctagcagtttagtattctctttacatgagcatagagtaaggtacttatccacacttggagtaaaataaaatgctgtagtgtttaatgttcatcctaatttatctgctgaggaaaatatgtaaatattttatatttatacagctatacatacgacatgtattcatctatatcagttatatttgctttttgtttctttgcagactgctatcatttgatcctcagcagcattttttttaatgcatgaattgtgtgacaaatactagtactttcaccttaacacagttagagctggatgccggttcatcccggtgtgtggtgactgagctggaactctgggaagagtgctcgccaagaactgcgctctcaccgtgctcttaacattactgccatgtcacgttgcatttttcgacatagaccagattaagcaatgcctgtcatccggttcctgcgttttcccctcttgactcgtctgcagggttctaggtgaaagattctgcatagccatgtatagctctagcagtcaatgaggagcaagtccatgtcggactaagaatacggaactctgtcttcttaacttggttctgttgttgaacttcgtagactgcttgcttaatccacttggctctgcttcatcgagccagtactaaataagtctctaacttagttgtcttcctctccgtggagaccttggtgtaagataagcatgacatcttcccatgagcatgaaacagctccctgtaaggcaagcgcaggaggtgagcagataagcattgcttgtaaagtgagaggcctgatgtcaggtgtggccaccgtgctgtttgtggtggaacaatgccgtcactattgttctctttgtaatgatgacttgacttctggaactcaactcttgtctgatttgtttctctccttgcctttacacatcttgctgtatctccaggagaagaaagaaaacctgaaacccagaaaagctaactggttttctgttggcagttcccacagagattgtcaatggaattcagacaattcctattccttgcattctactgtctgtggatttgaaattttaagccagctggaggattattgacacatcacactgttaatcctttgctttgttagcgttaagatgtgccttccatttggagaccttcttctgtctctaagcgtatgactgctctgctctttactatcctaaaggagaccataaatggtttttaaagggtgggaggcagaagtaagaagatcctgagttcaaggccagcctgggctacatggaaagcccatgtctccaaaacaacccagcaaagaaaccaacaaaaagcctcaagaagctgaatatagtatgcaaaatggctctttttcttacatttgacttagaaaggcaaaactcctattgtattgtctcctagaaaagttaattcctagtttccctgtgtaaaagtatgcctgttacgtgtaagaaaggctcatttactattttagataccttgttaaactttgtaaacacttcttttccttaaggccagagacaagcttgtttcatggtttcttagcagtcaaccagtattcctttccaatttggttttttaatgtgcagtgctattttaagaaagatatatttagacatattgctgaatatataaatatatgtatgattactcactacttttaataaatagtttttgatcctagcttctgatttctaaagtaagctgtctcggatgagtaagactaatagttcttatttcaggagtaaaggaaaagaatttatactcttatttctcaattaaaggtaaaggattacagaatgtttctgtggtagatgaatattgattttatactggtggaattgatttacacttatgatggatattattttacttttattaatgttcacattcttctaatagacacacttataattcagtagtaaaatccttctgttttcagaagactatacccgaagtcacaggacaagtaaagtcagataagtctatagaataccagagaaagtttagcaaagccaccatgcactggtgtgctgaatatctcattaggaagtacagagttctccagggtgtaacaggagcgagagggggcatccatacaaacagcaagatcgcttgacaggtcaggcccaaggcagtggaagccccttcatgtggcatgattgaaaagcatattccagccaggtctttttctctaaaataacagtgggtgactgggtgtaattatagtgagagaagagcacagcacatttcacaggtcagttctggtctttactctgacatttgtccttttaaatgagtttcgactgggtctgttaattttctcagtttcttcatttgtattatgtgaatatcttttttgtgcctcctttttagttgtaattgttattagagttatataaaggaatgaacactagaactttgtaaactgcctcagagtgcaaggatcccatctgttaaatctggtcttatctctatgaattgttgatatggaagcaagcaaaggctttgagatagtttatcctgtgaagcttgggcttttggtcattattattttactgtacctttaaaaaccgttctgtgctctattagcatggggttggttgtgtgcagagacagtgttacactagagcttactcagagatgggcattggaaaaataagatacatggtacttggttcatggtcttatagcagagtctgctattagggtggctgcatagaacccaggttcggtggaagtgcagagagcggggactgatggaatactaaacatttcagaaaatgtgcagatatctgtttttaaaagtacttagtgctgggcatagtttctcatgtctgtaattctggtactgtggaaacagaggcaggaggatcactgtaaacttgaggccaaccagatctatataggccagccaagactccatagcaagttcttgcttcaagaaagaacagcagtggaatatataatctagcggtgaaaagcacccacttggctagaacttggaatctgctctactgcttactcttggtgttgccttagagacgatgtcctctgcctctctgtgacttggagacagccatagctatagaatctgttttatagttttgagtgtttgtacttaaagagtacactttcattgtttactattataccaagaactgaacgtggtgaggcaggcgagatggctcagcagttaagaatctaacttgtgtttaacaccaagattcttgcctttctagaggtagttttctcacacagtccttttttgtatttataatattactgaaacatttttgtttatatcataacctatttatgaaatctaatataattttggttatatccttagttaaatgtatttgtgatgctttccaccatagaacccagatggcagaaacagcatttatagatttaagtgacaaccaactggttaattttaccgttaacatacagaaaggaactggagttcatgacaccacatcatgccctgtggttttcatcggctttcacacaaacactgtcaagtgcctcaaggatctgtgtggaaggcaagtcggaaacaggtgttagagaactggcagaaggttccgttcccctctgaaaacaagagacctgtgtctcgaccatcttttttttttttttttttttccgagacagggtttctctgtgtagccccggctgtcctgaactcactctgtagaccagactggcctctaactcagaaatctgcctgcctctgccccccaagtgctgggattaaaagcgtgtgccacctcacctggcgtgacttgaccgtcgtaggcctaaaagctgagagcgctggtgatgctaaagcccctttagcgccaattgaccccacattgtttttgtggacctgtgaaccaaaacaccaattacagcaaaaactggccttggcagacaccactgttaaagagaatttgcccaataaacaaggtgcatccaggccttttagtttgctttttaaactataaaagtactatgtaatgacctgactgtgtgtctctttaacacagaagacagactcccgttctgcccaagcgtctgtctcttgttaggaacaggaagcctcccatccttgcagtggctgctctcaggggttagacccagggcccttgggctgttatttataattatgatcagtggggaccatgggtggaagcccgactgccttcattccctgctaactccccagtctcagaagagtgccagctctagcacccagcagctcttctcttgtagagattcgccttctcttttgactgctgagttatcttgtaaaagtgtatccttggtatttattaagtagttgcaccaatgctgaacactgggattaatcctactttctctgtccatataggtcatccttaagtagagttggcagtaaataagattggatggcaagtgccagaagttggcactgacctgagtatccacagaactttctctggtggcagcgtttggttctcttctgcagcatagcatgcagagcttcccttgtctcttcaggtggtggtgtagtattagaaagcccagttttactctctgtggataagatcatatcatcaccttcaagactgaacatctgttaatataagcagtagcatttgtagcttgtacctatttcacccatgacttaactataatctgagaaaggagggcaggttcccacggtgcaccgtgaccctgtgtgccttgtgccaagcaataatggggaaatggtggcatttctccccaggaaggcttaccttcccccagttcactcccagatacttctcagtacagttctgcaaatgcattatcagtcccacgaatacaggtgtgtgtttatgtgtatgtgtgagtacgtacatagaacatactacttaagcaaaagtaagcatgtgatgtgatgtgatgtgaaactcctggagctagggagtcattgccgtgctgacagaagtaagcactttaaggtatgctgtccaggcccttggcttctgccttcctaatggcttttgagggttcattttgtctatcccctcttggtagtgctttggtacatttgttagagaaatcacagagtaagcttagaaattagtttggaaacttttgcgatcctggaaaaaagttgagcctcatacagcctcatgcaggtgttggttgggtaaggcgtttggttggagagatggctgagatgatggggctaggagaagcatggcatcccagaaagaactgaggtcaggcaccttcacctccgtttatgaagtcccgcaatgtggaacgcatatcagctactttagccttgccttcctccactgatataaatggaagggatgaatttacaccagagaagcagaggcagtgtggacacgtggacaagccctatgaaagaaaggttctgctttgtgtagctagtcacttcgtggcattgggaaactttcatttagcaggagtaaacttttataaggagaagtgccattgctggctggcttctgcaggatatccaggcttacccaagcagaaggcagctgacctgtgtctgaatggctggcatagtcatgggctgaaaacagtgctttccagggccctgggctgcctttggactcctggaatgtgtaatcaatggagccgttacagctgctcctctctatcccctatctctgcagtctaggcttatagcaccgtgagacttgggactggtcagaaaggtgttcttcggctccttcggttctcagcagccatcctttccatactcggatggggttttcaacatgcaacaaccgcagttcctaacaccactctccagtcatctggtttccctttcttgtgggcacagaactatagactgtatatcccccctttgttttctatgtgttttacctatggctccagcctgtgagttcttgataaacacttctttttcttttgtgtcatttctttttcctgtagaactgtcattattgaggttcctcagtgctgaactgacaagagggtacttccttgaacataatgaagccaagtatacagagcgaagagaaagggtgtacacttgtatgcgaataccaagagaattggaaaaggtactctttttttttttttcatttccgaacatcatttgaaagtgttaattatgaaaaaacttgtgaacaacttccaatgactttttaaaatgttggaaataacatggtaagtgattgagtgtgtttggggatatagggttgctttgtagaaagtgagttataaaagctggttttagtacgaagaacattaccaaatctcttcacgccttcactctggtacacatttgcggcttagccaatcggctttaactcaggatttcctctccatctccgaggtctctggctccctgcagttgtgtgcttctagaatatcactttctctttttctttctttcttttttctccacttaaggtatttaatttcaaccttttctgaggtttcagtttcttagaatagccatatgtgacagaccctcaaggaagaaaatgacttgtttaatcttgtcacagaaaggctcctattaaaggtaaacccagaaaaaaacaacaccaggtcctccgtctcttgttgcagggttgggcagaggacaggaaagcccttttccctctaatgcggctggagttaggagtcctgtgagagtccagatcttattacaagaaagatgtgtgagctagctcacaggtctttatggtagctgcttcctcagaactgtgctttctactagagtggctgtgggcagcctcggtgcattgggaagaagggatgtggcaggcggtgggaggctgcctcccagcctccatggctgagaagaagcgacttgactttatgtaggttcttggtagtgctacctgctgaagtgtgagggagtttatactggagtaagactcaaactgctgcggaggaggcaggggtaatgtgcctgcctgggatcctcactaaggaggagcctgagggactaatggctgaggagcagtgaaagacaggctctgcagtgttccttcctcaacaccagaggagctgcgttttttcttcagagatttagctagcattgggtctggagctggtcaggtgagacagatgtttgtaatgggaagtaagtagaaaaaagacgaagccaaaaaaaaaaaaaaaagaaaaaaaaagaaaaaaagatgaagccaattcttatgttgggaagcactgttaggttgctttttttttttttttaattttcttggtgtgtaataaactgtgctgtagatgtgtttagacatctacatttacatttacagtgcagagtaagggtgaagataatctcctaatgctaagtttgtctgagataataccaacatacttaacctatacccacccagccttagccctccctccctataaggaaagtttctctcttggtgatcaatcctggatgccatttttctctgaaaatactggaatttacctgcaaacacagccagacttcctgaatgcacccagctctccttgcactgaatgtaatccctttgaaccgtctcttagttctgtcaacaggcccagtgcatacatgcattttccttcattgcaactttgaagtggcaagcagatgttgtgtttcatggtgaggaagtgcccacaggtctttataagacttaatacaatgctcttaaactaaggtccactgtgagaccactattgggctaagtaatatatgtggtgtgttgtcatcaggatttgccttctaaaagaaagaaacaacaaagtatcaaagagcactgctgtgtcaggagttaactgtttataaagctgcaattatttgtatgaaggttaaatgcataacatcccagattagttagcgttcacctctcggtgatttttgccttcggtgaaagggaccgctgctgtgggtctttgagggacgtaagagtgcttcaaaagggggtgaggtttttcagttagctgcccttctcctagactgctagcatagaagcagggcttcacttacagcctaggaaacgatttagcatccaggttaatctaaattatttaactgtctcccttttagtgaacattgtcaataccaacatatgatatcctattggctggtttcttggtaaatactgtattttcacataacatcatctggaaacagtacttgaaaattcagagctctgtgcttttctgaagtctgcaaggactacaaacattgatgctcatactttcaggtcaggaaactgagctcagtgtcttaccaaagctgtggactaatgtggagcagaatagcagtatgtcactgcgtggaatggcagtggatcagcagccttacttgacactgtgctctgtgcttcagcagtgccatcagctttccttttcaaacttcttcccctggcatgaagccctgacatcttagactacttccttagtctgggtaggggtgaatttcttcttttatacaaacctctcagtcctgcctagctctggcacttccacagtctgctactgagtgcttatggtccacttttggagtgttctgtctcccgtaaacctgaggagactggcttctctggtgattgcagtgggaagcagagagaattgcattggctcttgggcaggctgcgggcctcagatctcagtcccactgctgttacccctggcttgttcccgctccttcctgtgctagggtctcctgcttgtggatcagctatatttgaactctgtagaaatgttgtaagtctttaacagcctcactttagccccttttgaggagtgtcctgctatggaacaaggtacatttcttcatccatgggtttcattcctaagctttcaggacacagcagcagatgcttgggagaggccaggttccaaggctcccctggtctcttctttatctcctgctttgccttaattaaacatgactttgccaaccctgcaagagatgtctgagtggcagcctttctcagattgctaaccacacatagaaagagaccctagggaaggtttgtttcctctttcctttaaccaggctttcttgaggtaaacctgatcttgctcatgaaggatttactatacaggaacactaggtgacatagcctacagttgactcatagctcttggcttttagagtttacctttagtgggctgcagctgggcactagttgaggacagagacccctgtcctctggcctgtgagacagttcctattgctgacttccagactgagttcacaccccaccatattttggtggatggaagtactagggaatgattttctatgtgtcagataagtaattatctcttgtccaaagctaattgtgttgactttgtgaatctaaaattataataattttgcaaaaattaaaattttacaaaacataaaattgaaaaaaaaactgtccatcataacattttctaaaaccccctgattagtttatatgctaatttaaggagggagataaagataacatactgactgctctgttctgtcttaagtacttatggtatatcctaagcatttgtaacatggaagtacatagtctcagattttagcatgatgaattatattaatatactagtatattaatatttagcaatattgagttataatagaagatacagaatggtaagtgccattaagcaaaatatgtaaaatgctgctaagaatttccagaagggccaggtgctggtggcgcacacctttgatcctagcacttgggaggcagaggcagaggcaggtggatttctgagtttgggatcagcctggtctatagagtgaattccaagacagccagagctacacagagaaaccctgtctcgaaaaaaaaaagaggaaaaataaataaataaaaggagcagggtgggtggggaaggtttgcttagaaggcgagctgcagaaatagtcaagggtggggcctgagaagaaaatatgtggcacagataggaaaaggtagattgtgaacaggcatcatagggcatgtgtgcatacaccaggtggtgtgggggaagggactgaaagatccaaggatggggatttgagtgtgaacaaggagcaataaggactgaaagatgggccaggtctaggtttgactcctggtcaaggtgaacagttaagaactcaggcttcaggatgagactacacagtgtatattccttaggagtgctctagccgtgtaggacagacagtgagcctagcagaggcctgcttggacagtttcctctccttttgagcaaatgtaataagggaggtctgagttagtccagcaggctagtgacctgccgtggcccaagaccttgtttctcccagtcttgatcacttagctttggttctcctgcctaatgattttaaatagaaaattgacaactagaagctattgaatcttcattgtaatcaggaaagaaaaaaaaaaaaatagagcagttgggtagtgcctccttttgactgaccttcatgtagaattaaagctttcccagaactgccagaaagaactctcacttgtgtcttactggctaaataaactcatggtcaacccctgctgtagcacaggagactaagagagtgaaggctgagctttagcaacagaggaatggcttaggaacagttactgtggtagcttcagagccctgcttctgaaaaactaggacagcagcagtcagtgtgaaggggaaatgagcaaagaaagcccgcacccttccttatgtcacacgcctctctctaagcagcttgacgtagttgtctcctatgtcctttattcccgctgttagacaggtataggttacaataaatattattttacatttacatacaaatgtaaatgatataaaaatagttatattattttataaaaatcacttgtttatgaaccttgcctgtcaccaaaagttaagctacaatgaaattgtatccttaccttgtaatgcgcgctttgggcagtcatttatttcatatttaccatacattgtacattatacttttaaaatacattttatgaaaactaagctgcacactgtttagtcttaaatatagctactgttttttagagaatcttatcaattacttatttatttattatttatttattttgtcatactaaggactaaacatgggggtgaaatatgaggcatgtttctgcaattgaatccccaagtcctgttcttgtcacctgaaaacagatctcactaaattgcttacttattgtgtagcctaggctagcctcaaaatagagattttttttttttctgcctctagcacatctcacaaattttaatgagtcttaaatgtattaggttggaggttataaggaatgataagtatttgtgttggtcagatttttgacacagacataagcaactaaggatgacaacatttacatgcacatactatttcagaggttcacgtacgtaggccttggcttgtgcttctgagatgctagagaagcagaacctagtgattcgagtagtgtcagaggcatccctccctccctccccagactttgcctcctaaaagtctcaggatctcccaattgagtggcatcaactgggaaccaaatgctcagcacatgagcctttttaattcatccccaagatatgtggagttgtgttattactaagcatgaactgttaaccaaggggagagggcttccctgaacactagaatcatgtggtccagcatcactgcctgctcatttgagtctccttaggacttgcctttcttcatctaagatgagaaggttgacagagccatctcaagaggcctaatgcaatatgaacttgtcttagttacgtttctactgctgtgaagaaacactataaccatgaccaagacaacttatgaaaggaagcatttaattgggagcttgcttacagactcagagggttagcatgtgaccatcatggggtgtggaggatggtagcaagcaagcaagcaagcatggccctggagcagtaagtagctcagacctatgtcttacctacaagttggaggctgacacagggacagagactgggcctggcgtggacttttgaaacagatctcacccccagtgacctcttccaaggccacgtctaaaacttccccagacagtttcaccaaccagggaaccaaggattcaaatacgtgagtctatagaagctattctcattctaactaccacagactattttatgaatttgcttttgaggaactgagaaaatgaatggtgacagacaacttctaagaaagggaagatttcagtatctaataggagaacttaaccctttccccttttgagggtaaacggggtcagtgtttgacagaatggttcaaaagtttgttttgtaggaatgaacttagtttgccatcatataaggctggtttgttttattacaagacatgaaaggaaaacatagtagctattgggtcgctttatttcagtgaaacagttcctagtgttattgtgaaactgacatactgtttactcagaccgctgtttgtgtcagggacttctcagtcatcctcttggtttctaattccatgagaatacatttatagaaacatccttctaaatgcatcttgggatgtagactttgtctaggactctaccttgcctgcattccccagttacagcgccactgggaaaaaggcaggccagtgtagtctgactgaacgtcagcacgttgggcattcctccccttctctccagttcctatccctgcctgcagcagcagtgacaacaccagcagcctctccagaaataaggcttgatgtgatgggacagcagcagtgaactcccagctgccttgccttgtgagaatgctgttgcctgttgggcacataagaccatccagcaaagtaaaagatagctgtttgtaaacttacaacttgagagccgtttgttggaaacttttttctgtcttgttggctttggatgtcttatgtcacatcattatgatcccttactcaggccattttgactcttaattgccctgactacttaactgccagcctgatgaggctgatctcttcctgaaaatcagatctaagcctaaaaagatgtcatcttgcattgactgcctttacctgcagaacctgtgaagacctcaagtattagggtaactgtcaccttattgcagggctttaaggacacttatggtcctgcatctagccagcctctcagcaggatcttctactgctgcaagatatttgatcacaccctgaaccccaaacttgtgttatttactgaaaatacctgtttctagttgtggtgtggcttagcggggagcacacacctttaatccttctggctggaatacagacatgctcttagtgcacacctttaatccaaaacaagttagtaggcaaagttagaaggtaaagttattgtgtagaaggaagcgcccatgtttgaaagtgatgtctaattgaaaggcagacaaaaaagtgatgtcaaagaaagatttgacagaataggatatgcccaactgtcacaagaaaagagaagaaagggaagcaacttgaggggcagaaagagaaagagcagagcagacatttttactgggacagttgtacaaagacaggttgcaaagagagaacaagctagacacagatgaagaaggactgagccagagaccaagaaagaagccagactcaatcagttagcttggagaggagtttgagccagaatagctgagttgaaccggccagtgagagagataagaaagaactggaaagagtgaacttattcagcagtaagtctcagagctggaaagcattctaggcctacacacgcttgtacagaagctagaagcttccaggactaggcctcagttagcagactaaggtagtaaaccttggagatgataattacttcagatgagtaaaagatacttttaccctgtggccctgtctatcccattaagtaacaagtactaatcccaccttgtgtaccgtgaagagtcctaaccaagttagcgtaagcgggttgcctaggattaccggcatgtaagagaggccagaaaacagtagggtcattctttctacataattgttcaacaaaccaattctccaatgtatttacctttcaagaactatgtctactgttaactgtggccgtacgtagatatagactatgtgtcagatgtagagtatgatgatggcgatgcattgattgagattcgtctgctctctgtgggtacagatgtgtacgtaacccacccagcacagaagaacccgactcagcaacccctttgttgaccatctcctagggtatagacttcttagggacatgaatatttgagttcaggtacataaaaaatatttatagaatgcgcagcaattgctttcaaaatcagattcctacatgtgagtttcttgaaagctactggataagaagttgagctccttagctgttaaccgaagatggccttgtcatgcttacataactgtcttcacagcttacacccaacagtgcagcaaggacatttttctctgtagaattgtggtcctctttcctttgccctgcaaggtctagtctgagtgtttgttgtctcttctgcgaagacagcattgtcttgtctgagacaagacagctttcctgactcttgggcatatgcctcaatgcactccacaaactcccaacactaacactgcacaaagctgagctttccaaagtaaatagttattttagaatttaattcgtagagagattatacataatgagtgatcccggggttgtgtggcctcttttactattatgttgaacattgttatatcccaggcctccatcataccaacttgcttaagactccgccttagctaaccactcactatgctggcgctcactgcactgttttcttccagtccccaagattcttaacaccttgtggagcctttgtcccagggacctcttagccgaagaacaggaccagacctttataggcagtggtgtaaggggctggagacgggctcttctaggccctttactcgcatttcccaggagctttccaggctgcagtgcctcgcccgccacagtagatgatgcttgctggccccagcagaggaaatagatggtgctcagaatttcaaatgagcattgaagaaatacattccacaaccattttagctttttttaagacatggagttttatgtattttgaaatttcaaatgacattaaggaaaaggctctggagattttttttttccaacttaaaattctaatggatagaaactggtatttttgttttgagacaagtatttttcaaatggctaagaacaatttagtaggttctgtggaaatgcttacaagcaacttagaccttttcacaagtatttgatgtgtattgccctgcagtgctgcagatgtattactgctctataatatcctcaaaagagaatatcagatgttaaaagcctacagtgaatcttcttttagtatagaagactgggaattcagcagtgagtctgagtatggaactggtgcagtttccatcagctctaccatgtctctactgctcgagaatgtgttctcactgtcactgcagaggtaggtgcagtagcctgcctgtaaggtggcagtaagaagaaactgcacctgtagaggccttagaacaagatctctcagagtcagaccagcaggtacctctggcttttggctgttttcacctcaggaatttctggggctgcctcattaatttaagccggcgattatatttgaagtcatcgcttttatacacatttgatgagtctgtgttctgagaataaaagttaagagactatttgagaatagagtgtctgctgtttgttccatgtaactcacctttataggaagaacttcccactgtgctccagcactgtctccatgctgcgctttctgctccccttcagaggctctgagtttcactctgagagtcagcatggatcagtgcctccgggactcattgagaaagaacactgtttgagttggtgctaaggattggaggtggcatgttttaaaaggggaaataaaaatcatcatactgtatatacctggtacctgtggcccagaagagggtggcaggtccctggaactggatttataaatggttgtgaacatctttgtgggtgctgggagtggaatccagcgtagcctgataactgctgagctgtctctccaggcccagctttgaccatcttagtgcaataaacactgtttgggccttttgattgtgcttgctctttgttttccccatttgttttcccaaggaggtattttgatttagtgggtttttttttttttcttttttgttaatatatagcccaagctgacttggaattcaccatgtagcccaggctggttctacacctcctcccttactctcctgagtgttgtgtataggtgtgtacctctgcctggccataagcatgtattttattcagttgtcaaaatatctgcctggacaaagctctacagtgtttgattaaggaaggattaccctaaagagtgacctggctcagggaaggtactcagccaagactggtgtcaccttttgtctttcttccctgggaaaacatgagtgcagctgaatacaaagaggtacaacccagaactcctgtgtgtgtgggttttttgttttttttttatagattgcctttacattctgctttttggagctatttttctactgtgtttttatctcatatgcaagtgtatgcagatggcatatgtgttgtaaaggccttctgtgtggagatgagagataggtaaagtaagagtccctattctcgaagataggcgaggtgacgtggaccagcagcagtgggcctgaagagaggagtttgctgtgcatcctgtgagcatccactagtccaacagactgtcttaggggcacactcagaatcacggctgctttggtgtcacagcagtgcatgtgttctgaaatttgaagtgagtgttaaaagaagacaggagacttttgtgtctcaaaagaatctgtgtgtcactggtgtcattattttatagtcacatgttgtatgctagagaagaaattcaaatttatagttactaatggacagccaaataatttatagttatttagtctaaataaaaagaaatagaaattgcttgccttctcaagatccacactaagatttgaaagtatacattattcttattgatgcattctcaaagcttttagtttgtaacgtattttaaagctaaaagccagtctaaatatttgattcattaaattcttacttttttttttaagacagtaagcagattgcaagataagctagccaaaagaaaagccaccataactcatgaaacaagtagacatagtggaggtggactgttgaactatgctaaaggtcgggaaccggacctctgtctgagcagacagacttgctacttcctttgctcatgcatatccgtgggccagcattcatctctcacatccacagcttcctaatgtgtcaagcagaggtgaagggttcctcaaagagctgctaggagcatcaagtgcttaatacctagcacttgcctggagcactgcagacactgtcaagagacctcagcatcctgagtcacgtgcacacgaaggggatggtggacagcaaatgttctgcacagggctaagctcacactccatacgtgtctagtctcttaactttgtaagtcgttcagaagaatgctgtttaggagaatgtaatgccagaacgaacggcaaggacagtcctgcttccacagttccaaattaacaggcctttctgttgcttttcctctacattttgtattttcacacttttgagtatttaccctcactcagctgaaatgggtttaaattgcagccacatgctctcctctctgtggtgaggtctgttgccagctccagtggtccagttacagggcctgcagagtgtaagaaagattgcccctctgctggtttatgtgacagactgaaatgtgaaaggaaggccattagactttgtggatactaacacaaaatctgcagagcagcagaaagagtttgatccttcccatccttactgcccagctctgtggtcttgccagtacctcacaaccatggaggccttcttcctatcctctatgccaggctatcttctgctcagcccatcttctgtgtgtggcacatgctcatctcagaagttatttaagtgcttattctaagtctctccagggtggcttggccattgtatcttccatgtccctgcacactcaggtctgcccatgtagctgttagccctacccagacatgactgcttccctctctgatagttacaagcttcctgacagggctaccacatcctgctcctgctcctgctccctttgtacctgccggactgagcatgttacatgccccagccacagcttcagggctgtgggctagaggaatacagtgttcatcccagcaggagctcacgaagagatagacacactcctcttcctagcattttgtgttcccatgtagacatagccaagattcttcttggaatttgtaggcaggaaagggttctcaagggcaggagagtcataaataaggactactgctcagactttagtgctcctttgcataacttgaaaacatgaatgaaaactagccctttacaccaccagcatcacggtggctgtcgtggagggaagacttaaactgtgggcttgcacgtgacttaggctcacaccgtgctttcattgttgttcatgagtcgagaatgttgaaggagcttcatagtcacattaagaagtctgacatagttatcatttatttcttagatttttgtcaaaattaataaaatatgggctttcatttcctttgccacccataacaaagtattccacactgggcagtttaagcagcagggatgcagaagggggaagcctgacatcgaagaatcagctttgtcctgaagcctttctcattggcttatggacagccgccttctccagaggtcctcacctggtcatccctttgcctgcctgtgtcctaatcccctctcttacaagagaccagtgtgggctagagagctagctcaaccatggaggctgtggctcacaaccggcatctccagggcagcaggcatattgggttgggtcaggacctctttatcccaatgacaattttcactcaaatcaccattttaaagacctgtgtcctagaagttacaactgtcttgtgagttctgtgagaaactattttgcttatagaagtgtgaatttaggtaatacgtgcaggtgggacagttaatgcctaaggctatgtagatattatggtgataacatagccatcagaccatgtttggatgttaggcatacatctccactaagtagcagagtttggtaagctatgaaaagatctatctcactctcttcttaggagctatactgctaaatttattggtgaaaatggaaagtataaatcagtaagaaactggggaaaggttaaagaaaatagtaattacttctgaaactaatcagaataaggccttccaagtatagcagttgcctatttgtgtaaaattatgttaaacttaatcagtctacaaaaaaataaattaaaaaaaactgttttcaaactaaaactgtctattccagtcttctgatgaacaggaaatggaaaggatggggttaaaggtaagaagcttgtcttaccttaagaagatgttacttagcctgtctggtttaagaagtgccagaaagtcacaaaagttgagtctgaacaaccatcttttgaggagctacttctagggatggtaaacagaaaactctggaagagtcatagaggactaatgtccagtttcttaaacttaaggagtcaggaaacagtttctcataatgtctgaagttatatctacaactacctaaagaatctctctctttttcgttctctcccaatgtagctcatgttctttggaatatttttgtgcctcgatgcctttctgtatgtgttcaccctgcttcctttaagagtctttctggcgctattcaggctcctcactctgccttgctatggcttaaggtaagtttagatcttcgactatttttagtgtctaaacggttttattacttttataacttgtagagttgttagaataaagatgatgcatatgatttcattcatactttggtttttgatgcatacactgcctatctgttcaatttgtattatataatatatgttttatatatgcatttttttccagagaggttttgaaccaaaactctgctttagctggtaaactgacactgttgtggaggccatgggttgaatagaagaggaacagggctagaagtagaaactgacagaccatgttcttaaccggcttggactagggctgggaggcgtcctggcttgcttcatctgtgagaagttcaggttctaatcgcctaaggagccggctctactacaggcttcctcctccaggtcacttgtgttagtggcctatgaagctgttgtcatagacttctggttggtggcagttgatcactctgtaatggcatcattctgatagaaaatatcagtcagcccaaaccaacttggagagctagtgtattgtaataagtgtctgcctcccctaagcttgtttcatatctgcaaaagaagatattgagagctcagtacctgtcccccaaaacctggagatagaaaaagtatatcagtggagtgcatgacacacactcactccttatgctggcagagtgcctgcctacagcagcccacagtgccagcagatgcctgcctacagctccgagtaataaataccagtttcttgcatttctgttctagcaaactggaaagatggaatgcagtacttactgtgcatttgtccttggggaacaggaagtttgatttgagaggtggccttcttgacagtcgtgtcagcaggcccctgctttacatggtctccctgtacgagctactgcttagctttagcattgtagtttgagttacaattctaaaatgtgtgccgtttgtaaatatttttaaaacatttcagtttgaaaatgtaaaatgctgaaatgggtaataatttatgagactccatttagtgaccattcagtggaatataacacttggagttatagcttcatcaatgaagttgctaaaaaattactggtccatattcaaaactgtaagttctgtttaaaagactaaagtcacaaagatgtttgttttgaaatagaaaatgaaacgcagccctttcaaatgagccttaatccattttgataagaaatgcttctaatgtaaatagaaataatcaataatataatgattaggttgtgaaaggaataaaagttacgatgagcgagattgcagagaatatacagttttaagaattcagcctccctcagtgctataaaagttattatttgtatctaaaatctttctcatcttgcagaatgatatgaattatggcacgtttaattaatcataagttaaccgggtgagattctttttaggcatttaagcaccaattttaggatctgccaagtacttcctttactttgaggagggtttaaaagggttgctctcattagtcaggcttttcaaagaccttggtggtgttctcctactaaagctggttgctctactgtgggctcagtgagatgacattttagttaccttttcagaaggtgggggtgggggtggggaatcttcctgtgtggctgcatagagaagttgaatacagggaaattagattaacccagtgtaacagcctgacataaagtaactaagagcttgcagggattttcacacatattttgtgagctaggttaccttttagttattccaggatcagcagtgttaaacaggttcatatcccaccaatggcatgttctgatcagttgttggcaccctgggagaaagcttaagagggtttataacctagaaactcttccttctggactagaccttttctgtgtggttagtatataggtgacatacaattcatgataatgggtcttgaggctcttgagtatggaagtcatcttatctgacgatgcatctccttcttcagacattgaatactgctttatgctcagagtcatttctgtttctctgtcacttggagaagcaggacatgtaagcagcatatagcataccctttccattctgagtattaagtattgcagaaaataggaattcttaaaccatctactgtagtttgcttcacataaatgattgttgcttcctaaagctaacatttctataatagtttacatttttagtgcaaaaaagatgcttgctttaaaattgtattttgaagcattttcaatctaaattatcttcagtgtcatttaaaaagtgctttctattttcatggttttatagctaaaaggactctagggggcagcctgttataaacaacttgtaatattctatctgcaatattggttaactgaagttacattttatgttgtcatttatatgataaatgaaacatgaggatgcagttaaaattgtgcactcaaatttcaaccttgaatcctctgtatgagagcaagcaatattacagaaaatatgaagtactgcttttaatgtcttagtaccttcagtgttctgtatctgagttaagcaatgtgttactgggagccacatttattttctctgaaccatgaaaacaatgtctctgtgattctttttttaaacatggaactgaaaatatagtacacttaaaaagtgactgaacaaaaaatactgttaatattttgcccaagggcatttaggtatttgtagaatacccaaaaaacattttatcgttatggaattatttagaaatagctaaatgccgctgtcctacagcttcccttctattgttctctacttctgttaaaggttattagatttgtattgcctacagctgcttcatgttccatctctctccaaaaagcaaaggtgctcttccttcagtctgacttgaaacctgcacagaggccaattgtctgctttcctcagccgttatcattctcatctcttctgtttcagccatattttttttctagtctcaatttttttttctaaaaagagaagaaaagtgtgtctgttaattaaaccctgacatggaaacagtgtctccccgcagcagggtcagcagcagcaagacagcactgcctttgtcatccttgcgtgagtgtcgtctcctcctctgccagacactctttgctgcagcatctctgggaggcttttaaagcaatccaaactttctgctttgaagctattgctagatcttcctctatcttgatgtgttttcagctctggtttgaggtttaggttgtgttgccacttgtaacaattgggtgaattggatgaacagggatgtcacctttcatgaaggatgataagcaggaagattttgtagcctgttcagtaacttagtcctcatcctgactgcccagttatcagaccattttaaccaatttcttttcttttcttttctttttttttttaagacttatttatttcacgtatatgaatacattgtcactgtctttagacagaccaaaagagggcatcagatcccattacagatggttgtaagccaccatgtggttgctgggaattgaactcaggacctctgaaagagcagtcagtactcttaaccactgagccatctctccatcccccattttgccaattttcaagcagctaagattgtgttcctttggagctgttggcaggtgctactgtgcaatggtggggtgcactgctacaaaggatgctgcagtgctcctgtagaaagttgataccacttctcagtgatctcagaaagacttggttgaacctatttctgatgaattagcagtcctaacccctgctgcccagtgtttaatgaggaaggaaggaaaaaaggaaggcatctagggccctggaaagctggttcgttctttttctagataaggtaagatagcttctaaattttagagaaaattaggatgatattttaattgaagatagaaacagaattagattgtgattcattatgagttatctgtgcttgatagctacaggtatctttctaagttcatctatgggatcgattaaaaatactgagcatgtggtagtttacgtggtatcagtgtgaatactgtctcttcctagaatttccattattttgtgctttagattctgtcacacttaagtcatacattgaatgagattacagaggaaaatggtaaaatctagaagccagagctgatagctagaagtaaagaaagcacttttgaacattatatggtgctaagtaagctgactggatttaggaatgctggagtgtttttcttttgctattagagtaaataaaattcaggcaagcacgtttcctgatcccttgtcttggttttagacatagctctcattgaagacgtcattgactttttttcttgttttaggttaggaatatcttttcttttgaccctgtaagagagttcttatctcccaaaagaactatgaatttcaaattcttaagtttcttaacttgttgacttttccttcatgtgccttaaatttagttgtgctcaaactaactttatttgtgctgtataaataggcttttctttccccacacgaagttaagcatttgattctggcctgagtaattaatgccaccacaagaacatgagtgtaggagagctcttagtgtctttgtcagggaaacaaggatgtccattctttcctctgaccaaggctgatgtgtgccacaccagtggggagagagagagagtacatggttatggagaaagccttcatagcatcatcaggttttgtcatcccatgttccccaccatgacgctcaaagtagcgtagcaacattccaaccttctttctttctttctctcttgtaaatcagaccgaagggaggagcactttcacttcctttataggatggagtgtggtggcacagggactccttgtggtgagtaaaccctgatttttccttttatactcttggccagattgacctcagtaccaaagcataggcaccagcatagccacataaccatttgaggatgggacaaactgaggaagatgtgccgcccagccttcagtagcatcctcacttggtcttaagccttatccatgtctattccagtgtttgaccacactgtcaccatgaaagtcaccatgagatattctctaatgacacctcagtcctcaccttagggctaagcccagctcacttgttcctagaaccactgtttactttgtgttattccaaacataaatggcgcttcataaatcagccacttcattctaattaattaatttaatgtacaaaagaaggtgttagcaatcgagtgaaaagtattaagtgattattttttactcagtgtcagacttaaatgatgagtttctcagttcaggaaagcatcttggtcctaatcctttgttccagttaacttaagaccataaagggacttctcttaaaaatatgaaccacatgaaatacacattttcaaactttcaatagtatgtacgtgtcccctccagccctcagttatacatacttttcagtgaaatgaggcatgctcactcctggcctccgtccatggcttgaaatgaactggcaggagggctctgcttgccattgttgcctcctcttccttcttgatcttgccagtcccacttctttttatcagtagagtatcaaggcgtggggacgcctcacagggagcatctttctctgctgcatagttctacttgcatgactctatgagcactttaaacagctcagagatgtataatagtaagacatatgacatgaaattatcatttgtaattactatgaaagtatagtagaagtatttgtaggggttaaaaggtaaaatttagaaatgtagagagtctgcttctatatagatatttttaacttgaatatcttttaagttgtgttaaatgtcttatttttattggaagttctattgaatgtcttatttaatcttatcttgagtggcatgtaataaaactattagtctaaactaggttagactaatgtgggtttttgttgttgttgttgtttatttggttggttggttgctttggttggttggctggttggttggtttgttattttgtccagcattctcttgagatctccagcatttactaaaggaactgcctataattggctctttaacagacatcatacctaggacttgagcctgaaagattatctaggtgtcgctctgggttggttggcagcactgtagataagcttcttatggagtttgtagtgattactgatagtcatctaaaaataccctacagaataggggcaagtgctgtggttggttcacgtcgttttaattaggcaaactcacttgtggttagatcttggagaagctgcgatacaaataagcactgtgtacaatgctactcgggaaggggagggtgtgttgttttggttttgctgctttccttttttattaatgggcacatgtggaaagaaaatccttgttttatagacgttgtaaaacaagttttatgttgtgttggaatagtagtcctccactctgaaaacctgtaactgctgtagcagacagtaagatgttaaggcagtgatagagagctgaggacccagagcaagtacatttgttctgttttccactgtgtattttaaaaattaataaagtgagaggtatgtttgtttcttaacataataattttccatatgataggttatatatgagtttggaggttttgacagtcagtgtttgtaaacagccatgcctgcattgatgcctttcattgtgctccctggctatcagtgggataatgcccgtctatagtccagggatgcaggaccttctagcgtttctcctcttgatatctaaattagaaatgtttgctcttgacagaagaaccactgttcccagtcccagcctcatatagagtatagggcatgaagtctcctcgatcatcagttagcccttggcagggaagtgtgatctcagctgggtgtgagggaaggaaagaaaaaaaatgtaccctgctttccatggaaaatcaggaagaaagtaatgatggaggtagtgctaggtgcacttcagctcaaagctctagcttgagctgcaaagaaaaagcaatcagcatcccacatcttttggagggcttgggatctgactagcaaagccaggcctgtcttgataagctcactacatggcttcccacctgctttttttttttttttttaagatttatttatttatttatttatttattttatgtatatgagaacactatagctgtacagatggttgtgagccttcatgtggttttgggaattgaattttggacctctgctcgttctggtcaactctgcttgctcagtccctacttgctccagcccaaagatttatttattattatatgtaagtaataatagctgtagctgccttcagacacaccagaagaggacatcagatctcattacaggtggttgtgagctaccatgtggttgctgggatttgaactcaggaccttcggaagagcagttagtgctcttaactgctgagccatcttaccagcctaacttcccacctactatcaccctttctgaatgtgtctcttttcagacttgcagtatcccatattgagtccaaatggatgtatcaaacttactaataacctgtagaaagcaagaatgcagcctgtgacagctactctcagagctggtcccacagcctagttacaggaacagtttaaaaaacgtacacattatgctcttgtggacaggctgagaaggagctgaacagactaaatagccaagaaactcctaagaggtaggtgtgtgtgtggctctgaggccagggacacagtagcaaatgagttcagcccacaccacagcttgaagtagtcactgctggtaaagataaagaggccatagctcctaacggaagctcccactcctaacagttgagtgtataagtaaaaacctgccaaaacagaagcctgagcagggatctgcaccttgtcactgtatcattgaggaataggcctgctgtagactccagcgtattcgttcttgtcatgcaaatgtcatgtccaataaaagggaatcctaaagttcttcttttctgtttgttttctccatcttattgcttccatccctgacttaagcttcagtttttatgctatactctcagaaagaagaatcaactaattttttaattctgaaaaatttaagtaatgtttcaaagaacaaacttctacagaaaaggagttatcccacaaaccactaacccacctcaggaaggaaggaaggaaggaaggaaggaaggaaggaaggaaggaaggaaggaaggaaggaaggaaggaagaaaaaaagagaggaggaggagaagaagatatgaggaaaggactcattggaaatttaaatctttttttttttttttttttttttctgatttttcgagacagggtttctctgtatagccctggctgtcctggaactcactctatagaccagattggcctcgaactcagaaatccgcctgcctctgcctcccaagtgctgggattaaaggcgtgcgccaccacgtccagcttaaataaatcttgaatgcgtgaaagagtctttcagagttagacctggtagcacaagcctgtgttccacgctgtttgggaggctgggcaaggagattgcaacctcagggccttctcagagcatgaataagacttggctcaaattttttttttaattattttaaatggatgtatgattcaatggcagagtgcttggctaacattagcaaggccctcagcagtatttacacccagaaccaactgaggtaaattgacatcagattatactgggttctctttctcaccagtgcaaagattcaagcaaagatgtaggagttagtcatgtgttattttgatgcttgtgaccatagccttctcaatatgctgctagcaggagtgtaagttgacacaaacccttcagaggcccatattggctatttttaccaaaatgtcaagagtgaatgcaactgtgcacctagaattgtaggattttacagtacagatacacttttacttatgagccatgtacatagtgctagcttatagttggaaagcagtagaaatttgtcaataatgggttggaaattttgtggtatgtattcatggggaaaactacatagccataaagatccgagggtccttttaaaccactatgaaagatctggagttaggtgtgcctgtgatcccagcagtggcctgactttctatgtggccagcagggctgttgggaaatagggtggacaaggtgcagagtggtgtgcatagagcacctactgggtgggcagctgacccagtggccatgagtatagtaaggtctgccacacacacacacacacacacacacacacacacacacacaaagctgctgcctgcacactctcttcagttctgattcacctttagtctaacatctttttaatatttgatttttttaaggtttatttatttatatgagtacactgtagctgtcatcagacacactagaagagggcatcagatcccattacagttggttgtgagccaccatgtggttgctgggaattgaactcagggcctctggaagagcagtcagtgctcttaacgtctgagtctaacatctttatagtctgtatgcaagcagaaaagatccagttacgcagtcattttagtgaccacccttgttaaagtttgtaaaacttcagcctgacgttcattgtgaccttgatatgctattaacggtgacttgttttgttttgagaacacatagagtaaaactcctgtctccattacttgtatgtttcagggaccgacgtctgcttcagcccgcacaggtgtgtgacattttgaagggcgtcatcttggtaatctgctatttcatgatgcactatgttgactactccatgatgtaccacctgataagaggccagtctgtcatcaagctctatatcatctacaacatgctagaggtaaggcctcttgctccccacatcttagtctgacccggctgcctgcagcatggcccgcactcaagtcctacagagggatgagagaagggcgttggctgtggcttctgggaagccattaatgaacgtgttcactcaccagaggatcttggtcagatctagagagaattgggggctgagtttatcgaggtgcctcctgagccactggtgctgggtcatacttaaagggaaagttcctccaaaccaggtgtgccctccagttaaagcagtgattctcaatgtgtgggtcaagagccctctgggggtcagcagactttcacaggggtcacacatcaaacgtcctgcataccacttatttacattatgattcataaaagcagcaaaactacagttataagatagcaatgaaataattttatggtggggagtaaccacaagatgaggccctgtattacagggagggtcacagcgttaggaaggctgggagcactaagttaaaggacagattcccactgcttgcacaattctgaggatatatgctgtcaaattgcaagcttactgggaacccatggatgcagtgggttttgttgtttttgcaagaattgtgaggattccacataacttaattatgtgtgcttagtatactaaataaaatgactttgaactttttgcatcacattttgcaattttttctgttttgtttgtttgctttgtttttacaaatggctaattcaacaatcccactatggttccataaatgtattgcatcctcagcacgcaccagggagcacatacagagtgtaagcagccagccctttgcccttcctcagcttcccttccaggactgcaagcctcaagtctgactgctagtaaactactaacaggagcagctgagaaagcagctcgttcccactgtttctctctgcaggtagctgatcgtctgttctcctcgtttggacaagatatcttagatgctctctactggacagccacagagccgaaagaaaggaaaagagcacacattggagtcattcctcacttcttcatggctgttctctatgtctgtatccttctaggcttagagggcacaccagcaacccgcgccgctttgtttgcccatccctgcacagaatggggtgtgcgtatggagggggccttgatattccatcactcgggtaaccaaggaaaccaactccagacttacttccatgttcacttttaaaactttgaattattataatacagatgtatatctctcagtcgtcttcatcatttgccatagtttcttctgtttttaattaacacctcttttgagggcctacttctgttttttattggtggtggtggtggttttgggtttttttgtttggttggtttttgagacagggtttctctgagtagcccaggctgccttggagctcactctgtagaccaggctggcctcaaactcagaaatccgcccgcctctgcctccctgtgctgggatcaaaggtgtgcgccaccatggcctgatgagagcctaactgtgccaactaccagaggtacagttctaattttccaatgttcagatttcctctctgcttctgcttctttcatgtagagtacatagagcatttcaagttgatatcaactaggtaataaggaaattgtgacaataagaaactatgtgttaggcagatttgatttagaaaatatggtcatttcccccattttttttttaccttcaaaattgtatgatattgtattaatgattgtgaaaccagtgttttctttgacttgctcttagttctacatgcaattcttatcatggttcaagcaacaactctcaatgtagcttttaactctcacaacaagtcactgcttactatcatgatgtctaataatgtaagtatgaggccacacttggcattggaagtttgggaaggggacagtaatgctgggcatggaaggggttcttagttacctgttgctctaagaagccttttgtgcagagacttgattctacaactgttaaagtgttaaagttttatatatatatatatatttttttttaataaatatttttaaagtgacaaagatggtatttctgttgctatttcagtttgttgaaattaaaggaagtgtattcaagaagtttgaaaagaataatctctttcagatgtcaaatagtggtaagttgttcaattttgattgtagctctagttaacattcattaaaagtgactcattaccataagcaaatgttgagtaataacattttaattaaaagtaatagtggttactggtaggcattttctctccctcagtcacaaagatatagggcagattagagcagattaaaggtagataaagtcaggtttactaggaggcagctctcaggtgtgttcacctttctcagagatagaggtcagtgaagtcacacatcctggctaaagcaagaagggttatagagtttaggtggggagtgatgatgtgtcagctaggagctgggatggtgcccatacatggtcaaaagctgagcccctgggcagcactcttgggtggattgtcagaaacaggagacgaggagtgatgacaagctggagttttttccaagcagatgggggattttctctgtttaggtggggttggaggaaggagggcagacagggtttcccagctcgtgcagactgagcaggggctccagcctaacagttatatctggaagaaaagttaaatgaaagacctttgatccctgtctcctcccagaatgttaaatcaaaataatctattgccataagtgtaagtgctacatcttaaatttttaaaaatatagaagaaaatattcacaaggtttgtttagtggaacatctttagagactactcaaattactaaccttaagaacaatatataaatcgattttcaaaattgtaaaaaatccatgctgattaaaaataaaatgaaaaggtactggaaagggggctcagatcgcacagagaaatgaagtctcgaaaaccaaacaaacaaaaacaaaataaaaccacgactaccaccatcggacattaagagctctgggctccttcagaggacctgtgtctgcagctctagtcccaggagctctaacgtccctcctggtctccctgggtactgaagggactcataacacaaatatgcttacaggcaaaacactcatacacataaaataaaaaatgaagagaaaatactttttaaaaaagatttatatatttattatttgttaatacacttgtggctgtcttcagacacaccagaagagggcatcgtatctcattacagatggttgtgagccaccatgtgcttcctgggatttgaactcaggaccttaggaagagcagtcagtgctctcaactgctgagtcatctctccagcccaaaaataatttttttaatgaacatgcagatcacatataagttatgagaaaatagttgaaggtatatatatctgagaaagaacattaccattcctgaatacatattgaaaaattggccaattatgaaagtgatatgacttagagtagcagaattggatttgaacatgaaaatgtatgaatgaccaataagttcacacgcatcattaaggagattcaaaggcaaggcaatgggacgtcactgcattacctcccagaatgtgctgtgaggggatgaacattccaccccctctacaaagccttgggacagctttccttgtggctccatcatacacagaagcccacttggctgacttcagtgatgggctccttttccttctaacgattgcgttaagacccagatttgccgtatgcagccattctcagtaggattgttatgcatacatttccctgttaactttctttatgaaaattagaaaggcaagagtgcacataccgagacagatttgtgaataactgtatgaaattccagctaaacatcagaaaaacaattccgtctctaactaagtacagagaatatttcctcccttcggtctgactttgctaggagtgatgctaggacatactttaagttacatccccttggaatcatgtgaaagaatatacacacgtgttggggagctagtcagaatatgcacttgaaaaccctacatatgcttttccaggaagtgtttctgtgttctgtacctcaaaatcagttgtttatgtaccttgcacatggtattgtgtaaggattcgtgctcgggtttcactgatagcgcagcacttgtgcccactgaaagtacagttcagatccgctacaagtgagaagcttggcagctctaaaggggaaggaaggtgccagaaaggggaaagaaggggaactcttctgactggaagagttcaacaatttaaggcaggtacagacagtaaaggtagcttacctagaggggatttgcaatgaaaagaaagtccactcctgttctagagcaacaagaacaggaagtggagaagcaaagtcggtcccacagaggatggtgaggtgaaattgagctgcagggtgctgacaggtgtgccacagtcaggtggagagcaagctgtgctgtgtgagtgacagctcccagccttacacagacacacacagtgcacactcactgtcacacgtaatttacttcatgactacatggtatcttagactcctaaaagaaaataacaactaaaaaaaataaaatacataaactgtctttgacgtgactttagttttctattttcacaaattcattccaattaatcaactagttaataacttagaacaaacaccactgtgaaacctaatcctgcatacatacacacacacacattctctacataccaccaaggaaagctatgacaatgccggtattctcttgggtaagaaattacatgctccttccttaccaggttagatatttcctggaagtgcagaagaattattttacccaaagtcttatattttattctctgattttatttcccttcttctataaaattaaaacagttgtcatattcccaaagactgttggaggcatttaatgaccaaatttgaacaactttaattttttaagtttccatactagaaatatgttggaaaattaagtaatggcttacacacatgtgtatgtgtgcatacacacacacataggcgtgtacaccacacacacacacacacacacacacacacacacacacacacacacgagtcggcagttagccctatgtgtctgcgctctctgcctacatggttatggctgcaggaaccacatctgtattgaatgtggacagacattgtctgctccctacataatgcagtaaaatagctatactctttgcttttaagttgtgtcaagtcctatgagagatctagaactgattgagcgtatgacagaaggtgacaggtgaggtacagatgatgcagcatttacataagagacctgagcactgtgaactttagtgcctaaaatggaaccccatgggttccaaaaatcactaattttttacagttgttttaatagaatttccctacttagtacactttatcacttaatggtcaatcttgctctttttgttttttagatattaaggagcgattcacaaattacgtgcttttgttaatagtgtgcttaagaaacatggagcagttttcttggaatccaggtaactctctctggaatcaaatatggtatcctggtttactcttgagacaactcagggctgagcattggtagcacaagtctttgatctcagttcttagaaggcaaaggcaggtagatctctgagttcaaggccagcctggtctgtagaaggatttctaagagaaccagggctgttattcagaaaaaccctgtctccgacaaacaaacaaacaaacaaacaaaacaaaacaaaaacaaaaaccaaacaacagatcatcctctcacatggagtgaagtcagggctggaatgaccaaatgtaccacggaccagtctgtgattggaaatggctcttccaggagaacggatgtatcgtcccctgcaggccgggatgctggcatttctcataagacccacagcgcctctgcaggtgttgtggtgaataagcatattccaccaagcaagcagctcagggcttctgttggagctgtggctggtgcggttactctgggtaccattaggctagagccctgctcttcatcacactgaccattttcaaatggaggtggatttagaaatggagtgaatctgggctgacagaagcttgtcagattccacgagtgttcacagttccatgctgctgtgccccgtccacgtgtgagaagagctaaggagtgtgcaggactgtaagctgctgaggtagaaggcgatcacagtgcagagtgaggtgggaggcgagcgctgctcaggtagctccctctgctcattgacaagctagatttcttgatgtacagttttgatcttaatggaacaggcagtgtcttatgctccttgtgttaccgccagcatggaggatgctctcagtgtctgaggcctcttgctaacagtggtttgtggcttattttcaggaacatctgaagagttggaatcacttataaagtgatactgagtttggaaacacatttccagaagttacctttttacaaaacctgtaaggtcaaatggtagatcttatcagttgtgatcagaatagatccaaaggccacttgacttgtggcaaagctactattgccacacacctgactttgtgttagctagatgctttcaaaacaattagtttaacacttacacatatgtgtgcatgtgtctgtgtgctcatgcctgtgcatgtgcatgctcacacactcaagcaaaggttgaagaacaacttgtgacagttgctttactcctttgacaatgacagttctgggacatgaactcaagtggtcaggctttggcagcaagtgccttttacccattgagccatttctctgactggatgctgttggtgcatagttgccaagatcagctaacaagtttccacaaaagacagagtgggcatgtatcacactgtgtcccagatgggatcagtcccacaggaatggaattgttatgccaaaggaagccctgcgcctcctgaggactggatttgtgaactcctgtaatcgtaccttaagtctccttcatcactactgtgcagtgacagaacaccatgcttggatgctttcactgttttgaacatcatgctttcccattgtgccctggttaactaacaccaaaaagactattttgtatggaaagtacactgttgcataccaatatctccattaaatcttagagtaatgagatgtagacatttctatagtcttagtttgtagatgaggaaactagaatttagatcttagaaaatttgtgtaagaaccctgcaggaggtggctgcacttggttttaagagttcggggagtctcaaagcttcagcgagttgccagactcagaaatgctgccctgtgttgtccatgtaggcagccctgcccttcagttgtccatgctgaggtgttgtaagctatgtctgtgtggctgtgagataaatgaaccttaggttcttttccgtcatagtggccagggagggaagagcatcagcctagcagctgtgtgtttactgtcacagtgaggcagtcatggcttttctaaagaacttcttacccatgtcacctctctggtgtctagacttgtcagaggcagggttctgctaggcactggcctgcaattgaagtgatactaggacagtcctgaataaataatatcctgaacttggtgaagtgtgactccagcagtgaaggttgcaattgatagagtgctacttatccactctgagttgacaatgctggagtgtgcccttttggaggtcccaggctgctgggagcttgacatgcagggtctgcttagtaaagaattctaactgtgtttcttccatgcttatagatcatctctgggtgttgtttcctgacgtctgtatggtgattgcatccgaaattgctgtggatattgtaaagcatgcctttatcaccaaattcaatgacatcactgcagatgtaggtatttctagtaattcctgttcaatgtttcattcatttcttatatcataaaggggtagcccttggtttattattttatgaaaatgagttattaaaatcatactgagtctatttttaaaatagaaccatcaaaaccttgacaagtttgtaagttggcaaactttcaaagtttaaaagttggctttttttatttttggtatttagagacagggtttctctgtataaaccctgggtgtcctggaactcactctgtaaaccaggctgaccagatctgcctgcctctgcccacaacgtgctgggattatacatacagatgtctaaattccaggagatgagctgtacattttacttgaagaagctatgagggatttgttttatggtgtaccattttctgtagtatctttagaactaggtctgaggcagtgaatcacatgcagatacagtgaaggtggggtggcctgtacagcctccccctcagttccggaatggagaactagccatcagctttctagatagttccttattgtttagctcatagatttaaaattgagtgtggtgtcagttggagagttgtgtttctgctttgctgaatgcttgaagcatctcgtctgtcccttcaggacagcctgagtggagagtgagcgagcgagctaacccttttctctcttggcttccttcctgcaggaaccttctcttcatagggtctttttctcagtaactgaaactaaaattaaaggcttggtttgggtagttcatggcatttttagtaagatgcagttgtcaaagcgccctaggggctgctacaagggctctaatgaggcccagccctagtttctgattctcactgtcagcatccttcttgggtaaggttttattgttgtggttaaatacacagtcataatacttagttgtgcagtcaaaatttcagaattcattttcccgtatacagcactgcttaaaacagccccatttccttaaattctaaactctgggactgagaatcattggctgttacttgtctttaaagtaaaccttttataagcccatgaatgtagcagctcaggggagcttagacttcctcaggctgtgggtgtctggttgctaattaattagcattagtgtaattaggaagctttttctctacaaagtctaagccttcccactgcatgtatttgctctggtctacatcatccttttttcttatttgccttcaggtctacagtgaatatagagccagccttgcttttgaccttgttagcagccgacagaaaaatgtaagcattccattaaaggtgttgtctgaaattaactcaccagtggataaatgtgctacagataaaactaaagacttgaccctgccttcttctagaccttaaatgcttaaatagaatgtgtttctgcagcatcgtagagctttttacttgaaactcatgtcgccatctgcatccttctgttcagtcacatggcaggttctgggttctcttcggatcctaaggcacctgttgagagcgtttgctgacagtgagtagtgctttctagatgctgagtaaccagtgagccctttctcctttgcatgcaggcatacacagactacagtgactcggtggcacggaggatggggtttattcctctcccgctagctgtcttagtaagtccatgcttctctcttcttgtcaggacatggccatcctaaaacaccaggaactttgtttcagcttaatttaagaattgataagtaaccagaaagaaaagtttgtcttaagttctaaatgcatcctttcagttttgagcttcgcagagggaaagtgccatcatgggactgcttgtccaggtagctttcctaacatggaggctgctctcttgcctattcactgggcaaacaattgtcttctctaatgggtaatcccagaggtggccattgtgttgtggtgcctggagcatggaggtggccaaataactgatgctgtttctagagggtacttcaagactgatgtgctagatgccatgagtcctgtgctgaggaagtcaatgcagagggcacagtgagtggtgagccaaaccgagcattgcagtgtgcttaaggagggtctgactgcccctctacactacaggattcagccccaaaacaagtagagctgtttttatcagaaggcctgaaagcaagtgtgtacaggtcagctaatatatgtacaagaaagctagaagtcacagcaagtatgtttagattggtttgcccaacagttttagatggtgaatggtgataggcttaatgtaaaatttcagcagcttaacaaatagtataccctaaacattgttatggttttagtcacttattatatagcaatacagatttcttttctttaggaaaaggctacctaaaattttgaagaaacttagattttaaaggttatctagtaaaagttaaactgaaaaaaatagaatgtcaagtttttctacttgtttttcctggtattagaaaaatgatgaaggtaaatccagactgttcaactaacttttaatagaagggtgagttagatggtagtggctattgtgcaagagtagctttctgtgctagaggctgtgctacagctgagggctttctggtacttttctcacagtgagattggactaagcatatgacagtccattcccatatctcacttctgttgttgttcttatttgtagcattcaattatattcaaggaaccacagtagaattttgacactactagatgaggcagccagttacctctgcttcatttccgtgtagccactcatgtagctgtcatgtgtaaattgttctctcagctgctcccaccagactcattcaacaggcttccagggataacactactcggcctatatttctgttacataagaaatggagtgccagccataggtaaccaaaaagacagaagttcatggctttcaagtaattaactgtgtgcttagtttcttaaagagtgtaagtctttcaaggttccctttgctctatgctccctacaagttattggggcctcttaaagaattcgaacagtggacaggaaaaaccaggaacgagaaaacctgctcaaactggttttatctctagcaagacctggatgagcgccttcagagcttacagaatgagtttctactttacaaatggcagctgctgtgtgcctctgtgagatgtaagtagaagtgccgtcaatgagataggctgctggggcttcccggagtgggcaggcaacagcaggccttgcctgagcaaacccagtccaccacagatgactgaagaagtgttttgtgttaggaagtctagagccagcctcttggacctagatgcaggtatgctctaaaatgttaaactaagagagagacagttttaaatatcagctaataactctatggctctgttgtgtctctgtgtttgtgtgttgtgtgttgtgtgttgtgctttgttcctggctagctcatcagagttgtaacaagctcaattaaagtgcaaggaatcctgtcctacgcctgtgtcatactcttctattttgggtaagatcaactattcttgattatgttttgactttactgtaaagtatgtattgactgcaagatgtaatagaagctaattgcatccaatggtagttttcctattctgtgtacttgagtttgaatctttaatcaaaagtttatagtaaggtctttttgctcaagatttatagttcatccatacttgattctttttaggaaaagtctttcattagagtcaagtttccatatttaacaacacctttggttttcctttgtacttgccatgctaatagtcagtacaccgggcttggttcacattaacctaactgatacaaaaatgtagtttttgtggctatagccaactgaaacttttgaaaatttggtcccaactagcttacatacctgtctggttgtgaaatacaagcagtaagtaagcagtttaagtaatttatgataatcataaatgataacaagaaaatgatgtcaaatgttactttgccactttttgatttttcaaaaagtgaaataaagtaaggagcctacctgagttttgatgtctttgcccaaaggggaattgggaacccatgactgatctggtttatacatgctgggatacatgggcatgggtttgaggagtgctggtctgtgggagaggacagccctgagcaccaccagaggaaaaggctgtggcgcgctaacttcctgtagaacctggtttccaaagccatctgtggttccagtttcacatttgagtgttatgtgtatcttcctggaacccacactgctgggcacgtggcaggcacccaagactcctctgtacaagcagctgagacacagtcactcctgtgggctgcacttgatatcccttgtgtattgcaagtcatgagtgtttcacagtgcctgtctcagccctcctccagagctgtgtttgttcaggtgactgattgagtgctgagattgcaggtgtttgcactaccatacctggtgtgtgctgtgttgagcattgtcttgggactctctgcatgctaagcacatattctgctaactgaactacgtctccagtgcacaccttttgttgtttttgagacaggatctcgaatagctcagactggctttgagctcactgtataccaaaggctggttttgaactcctgattctccttcctctgcctcctgagtgctgggattactggcagcatgccaccatacacagctctcttaaatttgacattaagttttttatattaaattatacaatattagaaattttactgtatgctttcttttccaggtaggagttaaaacttccatctcagaaaattgacttttatttttatgttctggactcttccagtctttttgagtattttccctgagctgtttcttcctttgactggagtcacactggccttttgttctttctccttttcttttactaatatgccaaagatgttccaactgcacactgaagacaatgttaaaattttaaactatgtgttgtttttgagggtcaatatttagggaaatttctttgtacttagactgcataacaatagatattaaaatatttcttaacaacaaaataaaccatgatgctccttccgtagtgcaggctcccacaccctgcctgttgatgttcttagcatagtttccttttttctacttgctctggtctttgtttaactttgttctcatagtttgaacataagtcaggaaagtaatgctttcatatggcatacatgaaagaaaacctttctgcatagttctccggagaggatgtgtgcctgtcagctgtagggggaaagacgagcccaccactgcccttccccatctattcagcagccttggctgccaggttccagactgctgtagggattgaccagaaagaagacagacaagttttgtcccttggtatctctgaagttgtagcatgcaaatagacaggagatatattctctagagacttttggtagtgagcagtgtgaagaaaaatgtggaggtgtcaggagatgaagagtgacagatggtggcttttgagcacagcagaaagcaagcagagttgagtacagagtgtaagcctagacagtgggctgtgtgaaggcccctggcaggggaggtagctccagagtctcacaagaaggctttttgtaagagccactcagctcccgtgtgaaggacagtctggagtgtgacaagaggatcagtgagtcaggaagcagtgggcaccgccagggaaaggtgaccaaggctggaatggcagtgctcgaagtaggaggacaggacgtgtcaggtggatgcacactgcctgtgcacgaagtataaaggagcaacttcagatacggctgcagaacctgggctcaagcagggaaggcaatagagttgtcacttactgtgacagaagcaacattttaggggtggggagagaaggtcctggggtagggatgactggaattggggattggtttggtaagtttggaaaccccggaaacaggggaggaagaagggtatagtttggggagacctggaactgacagcagatttgcacccgtgttccatggagccatctgtgctgtgctctgagcccctagtgaaaggcctgaggaccaggcaagaatcctcgtgtgtctcctgcattgactcacaagttgagccactgatgatgctcactggcttgtaattccatgttcctgacagtctcatctcaggcaccaaatacaacctctattccctcatgttacggctgtccgtcagggcccatggtgtgtgagaagatgggactgggatgctgtgctctctaaattgtctcgccataattatagcagatgctttacagtattagtttttggcctagaatttccatgactgtaattataggtattagcagtttattttaacaaagtacaagattaagctaacttttcttaattacaaactttttaatagaagcaaaatgttagaaataatccagatgtccagaaatgggagctcttacaagtaagtttttgttatatagcccataccacaaagcattcgtaagataacttaggaacagtaatggacaagaaaaaatatttgtaaaactatgtattatgtatggtgtgtgtgtatgtatgtatgtgtgtgtgtgtgtgtgtgtgtgtgtgtgtgtatgtatgtgtatgtgtgtgtatgtatgtatgtattatataactatcagctgtgaagaatttttcccagaaccacaaagaactctacttacacactgaggccatacccctcctctaattcccactttacctccactacagccttgtaaatcgaccccatttctgtacagggggaaggtacaaatgacgtgctcagagcaaatgactaataatatatgggtgccacacagggaactgtctcttattttttgtccatctgaatctacctattttatagaacagaatatatgttggattatctatattaggaaaagctgctggctgataggatttgttatgaagtagagtgtatcagaagtcttcctttatgctaaagagcctcaggaaactcaagctttgtacaaggagctcatgttgcacagcccggggcctctgactcctgggcccccctcaacctgacccacattctcagaagccaggctaagaccttggcccacatcttgacttagatcacttcctccaactttgcttcttttcttaggttgatctccttgaaaatacttaatagcattgtgctgttgggaaagtcctgtcaatacgtgaaggaagccaaaatggaagagaagctatttaatcctcctccagccagcacacccggaaaaccctccagcaaatcccagagcaagggcaagccctctcaaggtacgtgggcttcagggttcatcgtctgaattcttcctggtaaatcactgctcagccaaggtcagtggtgcttagtgatggtttccttctacttcactctgggtcctttacgttctaggacagatacacctgacccagcactgttattccatttgctaatgcactgtcctgtaggacctattacatgtcgggaccatgggatataatggggggagaaaagggccttgtccctgctctggtaaacctgatgtgatctgttggggagaggggaagaatagtaagtggagcatgtgtccggctgcagtaagtgaagtcaggagagagaagatggactgggcagaggctttaggtgtttggaaggatagcagccaggtggtactgtggtaggataggactgacttcgtctgaggcctagaactctacctccccgtaccccagggcccggtcactcttgcaaggctcttggcttagaattgaaagggagaggaggccagtgcatctggacagcacccagctgtgctggagagtgaaaatcttgttctgaacagggcaaaggaacctggtccaaggtctaagccaagctggtgctcctgtgtgttttctcagaagctaaagtagaagctcagatggtacttcgctgtataacatgaagatgctgttagtgatgcaaagattgcaagtgtgtcagcacatgttctcttacattaagaaattagtaaatgtctatcttactttcaagttggcctagtctactagaggatagccaccagatcatggatcatgtcatgtcatgtcatgtcatgtgaagtatatttaaaatgagtgcctgaaggatgccctagaggtctagagactacaagctagagatgattccggagggtgttgaagtcaggccctgaggggtgccagtcacactgaagacagtgttagctcttcactttctcagagtcacagaagaccactaggtctcagcaagagtggacatggcaatttatctacaactcactgtggtttaaagtttccttaaggatcaaattgtggggagaggatactgaatgaggttgacaatgttggctccatggttgaacacttaacctagcaagcagaaagtactagatttagtccccagcactgggaagggaaggggaagagagtggatttataattcagaggtcagtgggtcctaatatgctctggtgcctccactgccagcctcctagattcctgggcaggggtgaacgggtcagggtgccttctagttggacttcctgctgatgatgctactagtctgagtctagccaaaatgtatagacaagaagtcaacacggtaagtctgcctagctcttcccagaggtcagggtaaagagccagtgctattttctactcaggcagtagtcctgagagattgtggtcacgtgggaggggactgcaaaatcagaggcaggctctttccagaatcaggtggtagtgttacctatgggatgggtaatatttttggataaacagtgtgtgactagcttctaaatttattgtaaatgacagcttatacagtatgcttttaattttcatatggtgtatctaagaggaaagatgacagatactttccagtactctgaagacataagtagtttgatgagtttttgctgtgactgaagagaaattatctccttttccacaggcctttccacagaagaaaacctgtctgcctccgtcaccagccagcctggtcatcagaaagaaaacgtcatacctttactcgtgactagcaattctgatcagttcctgacaaccccagatggtgatgagaaggacataacacaggaaaattctgagttaaagcacagatcctcaaagaaagacttgttagaaatagacaggttcacaatttgcgggaaccggattgactgagtttgtgactaatgagatgaagatgtcaggccccgggccacaaattctgggtgccaggacacttgctaaaaatggcacttaaatatttatttaaaaacttaaattattaatggcaagcaaatcttagtatctttcttccagtaatgtggccttgcagaagggcagatcacggagcagcggtggcctctggccctgactctggatgctgacacttgaacacttcctcctgcgtggccaacagcagtgctgcttccagcacctggccaagcactgcagaagctcctttccttcgtcagcctgggcttccagatcgtcgggttctcctcaaggcctcttcaggataaggacacacctgggaaactgtgacgcttctaccatgagttccctttccagcctcagactgtctccacacactctttccagacttgactccatctgccaaagcattgacaagttgctacatctaagtccagatgacgttcttaccaccagagtcatccttggcaatacatctgagctagtcagaacagaaggccacttaactacaacgtggtgaatagcagcgtcctatgagaaacagtgagctcttggcccagtcatttactttataaaggtcatgtgtcactgagaaatgcttcctgctgcctcggttactcagggcagagtgtgagctgtgtgacacgggcccagtgacagtaaaaggcacagagcaatgtcaacagagtaaaaggcacaagtgcagtgtgacctggctttgctttaaggctaattgcttcattggttattccaagttaaaggatttggtgttgaattggcgaatagccattgcatagctgttgctagtgccaggctcgtttgttgggttttgttttggtttgagtaacagttttaaagtattcccagcagattgagcagtgtcaccttgctgggcttgtaaaatgcatttgtctgcctgtgggtctgttctgtgtggggaggaaaccctcacatgaccgaccgaccgtaagtagagtgtttgggacactgtaactagcaaccaaaaggtgctctggggttttcatctgagataaagatgttattcctgcttcattactacctattagcatcccaggacaaattctcgacaccctactttatcttaagagtctgttctgcacttctcttagacagaaagttgaccatttctgatctgaactgtctaaaagatggtactcttaacttcatttcctatgctgtcttctgaaactcagctctcatgcaaatatttgggcacagatggcaaattttaaatggtttgctgtatcctggataagtataaaactagtttggatgctttggcttatgcatttgagattcaggagggtttctaatgttttgcactaacagaatctaaagatagctgttggagatactatatatttatgccttgtaaagccaggaagcaattttaagtttaaaatgaacatttttattcttttgtgtatgttttagtggggccccacttttaaactattctttttaccgaaagagagtgtccatggaaaccaggagccgtgtggaaaaagctttgccaaacgcagccctggtcagaacaagagcacgacctaggtgtatctttctgttccgcttgagttttctgtttccgcgctgttctctgaagattgcatttcctttgcagatgctcttgggagtgtggatgatactcacttctgtcataatggcattcagtactaattttataagtgcatcttgtgtgaaactcaataaattcaattttataatcttttttaaaaaggtcactgaatttcttgtggcaacgattactattatatttgttggaatggatatctcattgagagatttcttatttaagcagaacttatttctagtttacaaataatagggttgtgttaagtatgtttagttactcttgccctaaatgataaaaaaaaaaattgctcttttgtctttgaaagaatagcctgcatgttggtcatagaccatttagtatctcttatcacatgacaacatttgcattctatggtgcatcttgatgtcacagtgtcttcttgtcataatatgggagtcacagtcaagacaatactttggtttttaaatagtcttagtatggtgcacggtacatcagacccattttagcttttcctacaggtcaaagtaccaaatgctattgatgaatgtatcttggctccctgtggtcttgtgccagcatttgaaaaaagtatgcttgaatcagcttctcagcatctgcctcacccactctgtgccacctgccctgccacctctgctagctcagcagagatgagttcacaagattgccttaaagtactttattttcatatgcctcagctctaagtgtttttcccacagtgatttcttagttgtttcctctgtcaggaactgcccagagcaagggatagcaggagacagcaaggtctctgcctgctggacacaactggacattggtcgagtatgtatggcagaccaaggatagcacagttcacgtcgtggtgtcaggctgatctttccctgtgctgtgtgcttaaggtcatctggtagcagtttcccagagctttctaaaaaggggtgaagagagaggaaaagaattttcaccaaatactgctagttgcctgccagactctggccttcctgcatgctgtgtacaggactgcagccaagcttcatggcctctcactgtgagtctagaggttaatatgccattttcaagtctatgcccatcatactgtaagtcaccttcgagtctgtccacttcgcacccttggaaccccgagaagctggtagctatccctagccatgtatattgcacagcaccccagagtagcagagtcaaggtcctgaggcccaggatgcctgtgaaaaggaatatggctgattggcttagaatactcaagactctaatgaaagagaaagaaattcggaaacacctgtgttctcagcctctgataggcaggtctgtggcaacattaggaaaaggagatgagcgtcagacccctctgatactccggctgcggcaacactccctgtggacagtagagtccctgtttaccgtgagtcagtagaggaaacaggaagggccgttactccctgtatttcagagctgacacccctcatgccctggagatgaacattaaagtctgatttgttcacagacttagtgagcaggtatttcttgccctttatgtcaggaaagaatgtgtaagagtttacatataaggagccagcaagatggctcagcgggtaaacgcacttgctgcgaagcctgacaatatgaattcaatccccagactccacactgtggaagaagtgaaacaactcacacaagttgatcgctgacctacaaacacacatacacacacacacacacacacacacacgggggggggggggggagggggtgcgcagggcacagcaagaagtagaatgttaatgagccaagaaagcggtaaaaaaatatctcagaagccaaggatgccatgccagtggttgtcgaaaatagtcctgtggtacagttcagtgtggtatgtggtattcattaaatgcctcagacatccagggtgttttagagcagtggttctcagccttcaaaatgttacaaccctttatacagtttaattcagttcttcatgttgtggtaactacaaccataaaattatttttgttgctacttcagaactataatttttgctagtgttctgaattgtaatataaatagctatgttttccagtggtcttaggtgacccccgtgaaaaggtcacttgacccccccccctccaaaggggttgggccccacaggttgagacccactgatttagagtgttttcttttaaaacacctagtgagggaaggagtgtcagtgatgagggaggtgtgagttactcaggagaaatcggcatggtgagaaggtttcagtgattctcaaatgtttgtttcaaggatggggaacggtgagttcctaggggctggtgaacaaacaagacatgactgattaaacatgagcaaggtagtgagggatggggtcttctgccggccggtgaggctgctcttgagatgtcgttaccggaagagaagagtgagcatcagttggtagagttttgctttgaacatacaacctcatctagcaatgaggaaaccaaggagttcatgagggtcctgtcatcacaggaacgtacatactgggaaagtcagagatgctgttctagcgagttaacaaggccagtgcaatgcagacaggaaagctcgtaggcattactgtcccagttactttgaggcacgaaaatgaacaagtgctgctgtgtggttgtgagtggatcttgtctagtgggtaagggaagtggcagctaaatgcacacctgacaacgagacactcttgtccctgtctgcagacactgatcacaggagaccaccttagatggtgctgcatcccttgtccctcagctcctgatagagaccaacagtactgcttgcaagaatttaaaaagagccactgtgagggacgtgcacttaaatttaagatgccttgttagattagggctgagggtaaggggaggaagggcaaggtagttgtcactgaagagggaagagcacacagtatgtctacagcacagccttggcccctatacacacataaacacacgctgtgtgtgtgtgtgtgtgtgtgtgtgtgtgtgtatgtgtatgtgtgttgagagccagccactactgaaaccacagagaggaaggcagttctggttggaggtggcagggactctatatggagacagggcttgagagctcttagtgcctggctgaggattctgcccctgattccgctcagaggctggacagaggcgagctcctgtgggatgttaagttcacgtatacagaggataagtgaagaagctactttggacactttcaagtactatgattaggtcaatgtgttaagaaaggcaggctgctgacctcccaaaggactgatacctgatagctgttggaggtttgtgtgaaggcacagtgtggttctcagctgctacatcttcatccccttacggagtgcatgctgtcgttcccatcctacagctaggaacgcaatctggaaaggaagagtaatgtgtgcccaccacacaggagacagagcaggaccttgaacccctttctacagtcttgccctgtgccatcagctatgttctacaagagaagggttgggaaaaggaggccctgtatggaaactgctggggacatccacaccagcctaaggaccagagaagctaagatactgttggtgtgggtacccagtgcagtgccaagggatcaaggaggctagtgggttgtctgcatggaatgcaatgggctcatgcagacctggagccatactatggcagtgtcgactccagactgctctgaagtcctgtgccttccaatatcccttgagaactccaaaaagaggatcctgaccccagacttggtccatttacttcagcgctgacaccatgtggaaagccaaacttttatctgattttgtttctcattgttgagcacatgatgaaccctcttcaaatctgccgtgctccaggagtgactccagggtcaagctggccttgctcacgggccatagtggaggacaaacatttctatgagaccaaagaaagactatggtctgtgaaccccatgctgaacaccagaatgagctgagcagaaggctgggttgctaaagctttggtaagatgaaataaaaccaaagcagttcaggttccacccagagtgctcagctggctacttttacagaggatacctcagtccagaatgcaaaggttttcttagcttcaagtttacatatcccaatccatggtcaattttccctattgctttgggcctgtagtgaagcagctcctgatggcaggaacatgaggcaaagcaaggctgcttacctaacaatcagagagctaaaactaagaggaaaaggcatatgagtttcacagtcactttcaagggcctgcctccaaaataccgtgcatctccaagtacaacacacctcccacaaagatccacattcccaacaacagcaccaactggggaccaggccttcgagagatatctgagagtcaaggccatactaccaccttgaattgaaaagtacaaaaatatggcctcctttcccttgctgtgtgattcattttgcccacaaacataagcttagagactacttaagctttgagctggtggaagttccactgttgaagcacctctcacaaaacatccaactcttctctgaggtaaacatcttcccagtacctctcatcacttgtctcctagctttgtcttgcagggttagtcatgatgtttaagccagtacttactagacttctactacagccaccacgcaaggctcctgtaatccagtccctcatttcttctgcacggtgtccctgcaaagcctcctcccctgcccctgccattttgcagaaagtccttctctcaagccgctgaggttagagccaagctttcacagggtctacctgcttccagagtgggctagacattcggacaaccctgtataaaagtctgtgtgagaacttcccccagcacacattaaccgttctccaacaaacacatgcccagttaagtggctttccatcccttgtattttccggtcagtttacatttctgactttcgcatgatccaaattctccatagatggtctttgcaacatgttagttttagaattggattaggaatggattgttcccgttattctgcttatacagttgaagtgtcttttttctctctaaggaatcattaaatggagagcagaatatcataaacttaggtgatgttagtattttttaagtggactctctctttgacttctcttttgacactgcaggatgtgtccaatagggctgatgaagctctggtccaatagatgctatggccggcctggggaggatgggcgccacaaaagcctggtgctgcttgctataaaggacttccagttcatgggcagactatgctcagcactgctgtcttcatgctgaggatgaactggggagagagtgagctctttctagctcaagcaaatttcagacagtttaaaggtattattagttcagatcctcaagtaatagtgatttagtatagataaatacctaagaccattttttaaaagtagggtaaatagagagatagatagcttcatggttagaagtatctattgatcttccagaggacccaaggacccaagttgttctgagcacccatattaggtggcacataaccatttgtaactccagtttcaggggaactgatgcccacttctggactccacaagcactatactcgcctgcacgcatgcacgcgcgcacacacacacacatttaaaaagaaaagaaagaattgtagagacagtgagaggaatacttacagcttcaccatctagcttaaagtctgtttctccaaactgttactggtaatacatgcataggtggaggtgttcacatataaatatatcacaacaggaatctatcatgtatgctggcttatagaatgttccttgtattttacaacaaattttgtggtggacattcatctatgccaataagtattttcaatagctgtatagaattccatgtacagccagatcataatttgtttgaaaagttcctttactctggtctttttttttttttttttttttttttttttttttttgattatttccttgaggtccttccctaaatctggaattccttctacaagtaagttctgacttacaaggtggtagctgcctacataccttacacaagcagcaagggtctgggtatgccccgagcccacactctcagcagccctgggatgcatgattggcctactaactcttgctagctttgaaacaggagacctggctttagcagtatgtttaaatattttaatagatgtcctatgtgtagtagatgcttttcgtttctttcatatcacttaatactgtcataaagtgacacttttaaaagtatccttaaaaagatttgtttttattattttttgtgtatatgagtgtgtatatgcaaaagcacatgtacgtggatatctacagaggcagaagaggatggcagatttccaggacttggagttatcagcctaatgtcggtactaggaaccaaacactggtcctctacaagaagagccagtgctctgaactactgagccatccctctagctccccgcttcattatgcaattgtttttcttctcactattaacattttttacttattaaaaaaattgatgaagtttcaactcagcttttagggcatcaaaatgaattgacacaggtagaagttccttgccccacccaaggtaagtcaggccctcaatggtacctatcaatcagtgtgtacccttgaaataggctattaacaaaaatggggaaatgttaacatgttaaatgcaagagctttggtaggaagcttaagagtagattcatgaagtctctctcatgtggcatgtctctgaggaaaacctgctcaggatggaaaagagtaagtgctaagcaagagctctggatgaagatggggcaggggagagggaaagccaggctgtggtggtaatgcacactttcagtcccagcattcaggaggcagaggcaagcagatctctgagatcagggccagcctggtctacagagtgagttccaggatagcctgagctacacagagaaaccctgtctcaaaaaaaaaaaaaaaaacaaacaaacaaacaaagacaaacaaagaagacaaggaggaaaaggaagaggaggaggagagaaaggaggctaggggaaaaaacagattctgaagaagcaaaactggagagcactggagggcttcctggctatattaaacttctgctctctctctgcagcaagcatagaagctcccacagccttagctagttagctaacctgaagattcccccagcttgctgttctatggtaatgcaaatttcacttgcctccacccagctccccacttaataattacatagttattaaatatatgttaaatataaatgattaattattaaatagtaaaaattaaatgacttcagtgggtataacttgagatacccagtgaactctgtgtttttagacagcaagccaagtgaagccatggcacatacttcagaaaagagaaataatcaaagagaaagggatgaaccaattccctggctccttcccaacccctggactcctagaagccaccagctttcatcccgacaatcactgacggtagagctctcagggaaatatgtcccccaatttacactctcttggaggctttctgaagtcctggacatcctttctaagtagtaactcagaaaataagagcttggtcttttctcaaaagcaagtcgttttgttttgttttgttttgttttgttttgttttgttttgttttgttttgttttgtttttctggaagggtgcttgctgaaggcagtgaaacaagctgggctttaaaatcaaaaagacccgagtctgatgaccagcactgtcacatctaccccagtgaagaatgtaggtcaagcaccccacctatctgaggcttcttccctcataagcttagtagaaatagcacccaccttcagcatggctgcccgtttaagtgatgtagtgagacacaaggatgctactgagtaatatttctttgctctcctgtcttccagtctaagatacaaatggcctgtcttgcctgttttgtcaaattcacctaacaagtatttatctgcagagctcttactgccttggggaatgatgtggcgtgacaccgatgaataaaatatgtcactgtggctgtagatacagagtcacaacaggaagaacctccagacacagggagagtaagtggccgggctaaacacagtgggctacaccctgtgaaaaaatggcatttaaggctgaactcttgcacagctgcatgtggtagctgaggaaactcctgcagtttttagcaagcagtcagtcgggacagcgtgtctcacacagggagaagtttcatggctgtctggccacactggttacagagctgacagtgaccctgttggtctcaaggtggttgctgcatctcaaagcatcacactcacgttaaagatgaagcaaagaagaggcagatggcatgctaacccatgcctgtcctctaaccaggaaggcaacaacagttccctagatacttcatctgcagctggaaacgttcctcacactaactagaaatactatggttacgcttaacacgaggagctaggaaattggacccaggccctatgactgtactaaaagcagcattttccaagaatgttgactgcatccataataagaaataaatttcattgcaaccctgagaaatgaatggttatatctaaaagtaaacctagatagaatacttgaatttacttgaatatgttctgtttgtaggtttcttgatgctggtcttaatgtgctaaattgatttcatactctgatgacgcggagcatgtctcatagttcaaaaaacattcatttatcctgagcataatcaatgacttggaacctaccaacgctaaataccaccagggactccttaggaaagaccaagggaggcagctatcaggaggaatcattcaacagcaaaagcaggcagtatgtatgtatgcgaaggttctgtgagtggaggcagcggctgtgcacagccaatgccaggcaagctgcactctggaatgcctgaaggtacattaggccctgccctccactgtaggccttggctactgctggagcgccctgtcaatccacgtgtaatcctagcatgtgggaggaagaggcaggagaatgaagagttcaaggctatctttggttacttgtaactccagttctaggagatctggtgccctcttctggtctcctgaagcaccaggcctgtgtgcagcttacatgcaggcaaaatgcttatatacataacataaaaataaataagtcttagagaaaagaaactgctctaattgagctggctgcagtagtaagtagtctactataatccctatattctctgctatctgccaggccaaagagggtggcttgaagccaggggttcgaaaacagcctgagaaacacagtgagaccttgtctcaatcaatcaatcaatcaatcaatcaatcaatcaatcaatcaataattctgaaactcactatggaacaatgtatatttatttctctgtgttatctgaaagacttgtggaaaataataaacaaagagaaaaacgctctcttggaaggtggggcccccagagagcaacaatgtccaacccaatacttcctggatccaatttgtattgattatgttagttagtggactgaacaggcttgattgttttctcctttgagaccagaaagataccatggggaagtccatgatctgtgctcctactcactgtacaggataaggaagctgcttctcaagagctatcaatgactgctgactccacaggtaaaaaaggagagacatggaaggactctgtgacaagcctcaccctcatccccctgggaaaaacctgacaacctaggcaagaatctacggaaggaaacttaaaaattgtggtaaggatttacttagcacttttctttaggaagatggccactgggaggttgactgtgctccagtgagtatatgggcagcataaattggacttgtttgtttggactttttttttttttttttttgtatcttttctgggaggccacgtggctgggggcagacatgggaggaca

SEQ ID NO: 1639 - DNA, 3394 bp, Mus musculus
acgcggccgccccgggagaaggcggcggtggcggcgcggacggccccgagcggaccggccgcggcgaggcggagcagccgggtggtggcggccatgggcccgcgccccaacacaccgagacgctgggcttctacgagagcgaccggcggcgggagaagcgccgcggccgcgcagaactgtcattattgaggttcctcagtgctgaactgacaagagggtacttccttgaacataatgaagccaagtatacagagcgaagagaaagggtgtacacttgtatgcgaataccaagagaattggaaaaggtgtgtgacattttgaagggcgtcatcttggtaatctgctatttcatgatgcactatgttgactactccatgatgtaccacctgataagaggccagtctgtcatcaagctctatatcatctacaacatgctagaggtagctgatcgtctgttctcctcgtttggacaagatatcttagatgctctctactggacagccacagagccgaaagaaaggaaaagagcacacattggagtcattcctcacttcttcatggctgttctctatgtctgtatccttctaggcttagagggcacaccagcaacccgcgccgctttgtttgcccatccctgcacagaatgggttctacatgcaattcttatcatggttcaagcaacaactctcaatgtagcttttaactctcacaacaagtcactgcttactatcatgatgtctaataattttgttgaaattaaaggaagtgtattcaagaagtttgaaaagaataatctctttcagatgtcaaatagtgatattaaggagcgattcacaaattacgtgcttttgttaatagtgtgcttaagaaacatggagcagttttcttggaatccagatcatctctgggtgttgtttcctgacgtctgtatggtgattgcatccgaaattgctgtggatattgtaaagcatgcctttatcaccaaattcaatgacatcactgcagatgtctacagtgaatatagagccagccttgcttttgaccttgttagcagccgacagaaaaatgcatacacagactacagtgactcggtggcacggaggatggggtttattcctctcccgctagctgtcttactcatcagagttgtaacaagctcaattaaagtgcaaggaatcctgtcctacgcctgtgtcatactcttctattttgggttgatctccttgaaaatacttaatagcattgtgctgttgggaaagtcctgtcaatacgtgaaggaagccaaaatggaagagaagctatttaatcctcctccagccagcacacccggaaaaccctccagcaaatcccagagcaagggcaagccctctcaaggcctttccacagaagaaaacctgtctgcctccgtcaccagccagcctggtcatcagaaagaaaacgtcatacctttactcgtgactagcaattctgatcagttcctgacaaccccagatggtgatgagaaggacataacacaggaaaattctgagttaaagcacagatcctcaaagaaagacttgttagaaatagacaggttcacaatttgcgggaaccggattgactgagtttgtgactaatgagatgaagatgtcaggccccgggccacaaattctgggtgccaggacacttgctaaaaatggcacttaaatatttatttaaaaacttaaattattaatggcaagcaaatcttagtatctttcttccagtaatgtggccttgcagaagggcagatcacggagcagcggtggcctctggccctgactctggatgctgacacttgaacacttcctcctgcgtggccaacagcagtgctgcttccagcacctggccaagcactgcagaagctcctttccttcgtcagcctgggcttccagatcgtcgggttctcctcaaggcctcttcaggataaggacacacctgggaaactgtgacgcttctaccatgagttccctttccagcctcagactgtctccacacactctttccagacttgactccatctgccaaagcattgacaagttgctacatctaagtccagatgacgttcttaccaccagagtcatccttggcaatacatctgagctagtcagaacagaaggccacttaactacaacgtggtgaatagcagcgtcctatgagaaacagtgagctcttggcccagtcatttactttataaaggtcatgtgtcactgagaaatgcttcctgctgcctcggttactcagggcagagtgtgagctgtgtgacacgggcccagtgacagtaaaaggcacagagcaatgtcaacagagtaaaaggcacaagtgcagtgtgacctggctttgctttaaggctaattgcttcattggttattccaagttaaaggatttggtgttgaattggcgaatagccattgcatagctgttgctagtgccaggctcgtttgttgggttttgttttggtttgagtaacagttttaaagtattcccagcagattgagcagtgtcaccttgctgggcttgtaaaatgcatttgtctgcctgtgggtctgttctgtgtggggaggaaaccctcacatgaccgaccgaccgtaagtagagtgtttgggacactgtaactagcaaccaaaaggtgctctggggttttcatctgagataaagatgttattcctgcttcattactacctattagcatcccaggacaaattctcgacaccctactttatcttaagagtctgttctgcacttctcttagacagaaagttgaccatttctgatctgaactgtctaaaagatggtactcttaacttcatttcctatgctgtcttctgaaactcagctctcatgcaaatatttgggcacagatggcaaattttaaatggtttgctgtatcctggataagtataaaactagtttggatgctttggcttatgcatttgagattcaggagggtttctaatgttttgcactaacagaatctaaagatagctgttggagatactatatatttatgccttgtaaagccaggaagcaattttaagtttaaaatgaacatttttattcttttgtgtatgttttagtggggccccacttttaaactattctttttaccgaaagagagtgtccatggaaaccaggagccgtgtggaaaaagctttgccaaacgcagccctggtcagaacaagagcacgacctaggtgtatctttctgttccgcttgagttttctgtttccgcgctgttctctgaagattgcatttcctttgcagatgctcttgggagtgtggatgatactcacttctgtcataatggcattcagtactaattttataagtgcatcttgtgtgaaactcaataaattcaattttataatctttttta

SEQ ID NO: 1640 - protein, 533 aa, Mus musculus
AAAPGEGGGGGADGPERTGRGEAEQPGGGGHGPAPQHTETLGFYESDRRREKRRGRAELSLLRFLSAELTRGYFLEHNEAKYTERRERVYTCMRIPRELEKVCDILKGVILVICYFMMHYVDYSMMYHLIRGQSVIKLYIIYNMLEVADRLFSSFGQDILDALYWTATEPKERKRAHIGVIPHFFMAVLYVCILLGLEGTPATRAALFAHPCTEWVLHAILIMVQATTLNVAFNSHNKSLLTIMMSNNFVEIKGSVFKKFEKNNLFQMSNSDIKERFTNYVLLLIVCLRNMEQFSWNPDHLWVLFPDVCMVIASEIAVDIVKHAFITKFNDITADVYSEYRASLAFDLVSSRQKNAYTDYSDSVARRMGFIPLPLAVLLIRVVTSSIKVQGILSYACVILFYFGLISLKILNSIVLLGKSCQYVKEAKMEEKLFNPPPASTPGKPSSKSQSKGKPSQGLSTEENLSASVTSQPGHQKENVIPLLVTSNSDQFLTTPDGDEKDITQENSELKHRSSKKDLLEIDRFTICGNRID

SEQ ID NO: 1641 - DNA, 533 bp, Mus musculus
cagtgctgaactgacaagagggtacttccttgaacataatgaagccaagtatacagagcgaagagaaagggtgtacacttgtatgcgaataccaagagaattggaaaagctcatgttctttggaatatttttgtgcctcgatgcctttctgtatgtgttcaccctgcttcctttaagagtctttctggcgctattcaggctcctcactctgccttgctatggcttaagaccgaagggaggagcactttcacttcctttataggatggagtgtggtggcacagggactccttgtgggaccgacgtctgcttcagcccgcacaggtgtgtgacattttgaagggcgtcatcttggtaatctgctatttcatgatgcactatgttgactactccatgatgtaccacctgataagaggccagtctgtcatcaagctctatatcatctacaacatgctagaggtagctgatcgtctgttctcctcgtttggacaagatatcttagatgctctctactggacagccacagagccgaaag

SEQ ID NO: 1642 - protein, 95 aa, Mus musculus
SQVYRAKRKGVHLYANTKRIGKAHVLWNIFVPRCLSVCVHPASFKSLSGAIQAPHSALLWLKTEGRSTFTSFIGWSVVAQGLLVGPTSASARTGV

SEQ ID NO: 1643 - DNA, 56560 bp, Homo sapiens
  misc_feature (1)...(56560): n = A, C, G or T/U
atcacagctacattacacctccctctgtgccttagacttcccatcctctccctggcttaaaggcattgcacacagttctccttctacctcagatcctgctgctttcaacctaaacctgataactcctgtgctagtgaatccttactcatcctttaagaattatgttgcaactgtctatttcctagtctttctctactaccacattataaagttcttaggataaagtcatgacttattcacctttatattcttaatagcaagtacagttacacttgcaattactgacatgtaataggacgtctccatatatttgttgaactaatgaatgcagcttatttaatcttcacaacaatcctgcatagcaggtattactattgttgttttaaagaagctcaaagaagtaacttgccccagtccccacagcaagtaaggagcagtttggatttaacctgcatcagtttataaggtgcatgttatttctattctaccatgccctgtctttcaactggatgcaaccaaaatacagatatggggacacagttcctacaaatatgggatcgagagctgacagggggagtaatgcattaaaaaacagttacaacgcagtgtggtgtgcagttgtagatgcatgaaccatgggtgtatactgaaaagaatggccatgggggaatgggaggttaaaagactgtgaggtggaatattagagctggggcttaaaagaggtggaagagcttgattggcaaagttgggaagagagtcctgggcagatgtagaaaataagttgttttcttatacatcagttactgcatcagaataagcttaggaaattaatattccttctgagtgtagcatagatgacaaagctgctaatgccaacattttgaaactctaaagtgattaaatgtataagagtataaatcatcagctaggatgatttctcagaagcattgagcattatactgaaagcatctttcttggatgctgccagagacctcgggcaggccattatgaacgtatttcttcatgtcttgtgctcatcaatgtattctactgggttccaagtgctaattaaaattgcacaccgactgccaaagaaaaagcaaaagcgcttacattaaaataatgtgtctaaattaaatggctcaaaacagagagtctgattccaaattgacatacagttcttaccctactccataactatgggggattaggctgagactcagacacaaaactgaatacataatgtcttcttcctgatatttatacttaactcacaataatctagaactttaaagtttacaaaagactgcttccaagccatcaacatcccatttcatcctttcaaaagatggaaataatttgatttgaggttttgaggctaaatatgatattttatatgtgaagaatacattgcctatcattaaaattctgtgagttgctgtcaaaaaatgttaatccttaatgatttattgtcttatagccaaacaaaacaaattaaaaaaaaaagtttgttctacaaatgttatgctgaaacaacttttcagaaaaaaaaaaagatggtaaaatgtcttaactagatactggacttggacattgagaataagacttaatgcatagtaaatgttcaataaacagattattattccaactgttcttgtgaaaattttgtagaaatgcaagcagatcacaatatataccagattaaaaatacaaacaaacaaaaaaaacggaattactcttcaacatgtggagatggccgagcggaagtgttggcaacctattaatgccctaattcctcatttcacttccaggccattcttccccactctcctcaagtcaaaatgccctatcccacccccacttatggcctactatttagccttggaaacagaaactctatcttgaagttctactcaaacaccacgcatcttcctacctctctcattctgcccgtgccccagcacccacccgtcaggcccttcagttgccgtcctcagcccagttttccatctggcaaacacatctttccagatccatccaaatgccatttccttctaagctgacctggtcatcccaaagcagaattaatctctcctctgaactaccatggcacttcattcggtcttccattgtggtacttagtgtatagcaatgtaattactcgtgggtgggaaattcatcttatttacctttgttactctaaggctttgtaccagtaccggacacataaaatctggtcaacaaatgtatgctgaataagaaatactaaagactgctgattgaaggtaagcaatttcagataaacattatcatttacaacagggtacctgagctcaccagaaggaaaatattacaaatgaatgtcagcatttaatgctagccttaaataacccaagaggcacctaaaaaatcacataactctacagctgagactttgagacaatctaacccaccttctgctacatgaattaggtaatgatggcccagagcacatccacgttccacaactagtaagtggcaagcctcctgattccaagttgatagctttctccattacattctgctactctctatgtgatgaacttttatagcctactgccatcattcaagattagtttttatggtctagtcccaaacaaatatttcacccactttggcacacaggcaaaagaacagactgttttgagaaaaccatccattagttaaaaacaaatgctcgcatgggcgaatccacctgtgtgtttatatatgtccctgaaggattaacggttgctgcctttctaaaagatttagcttaaaaaaacacacactcagaagaaaaacctttgctgataagctatttttaaaaaatactcctaattaaagaaaattatttgctttcaagggagaagccagttgtactgtccataaaacaccagtgaagaaggctaatcccaccaatgaggcatcctctgtgcaacactattaaaatatcagagcgaaacaaacgacagatttggagtggacattgcattgcccaaagtcaatggaaccaactgatttttggacctttaattacttaatacaagactgatttttgttggatgcattaattacattacattaattacattaattaattacattaatttaatttcatgtaatttgattttatttttactgtgtaaaactgtgtgtttatccagctagtaaaaataaaatcaaattacatgaaactaagtactgttcagaaaaagaatatctagccaaacatgtcagataataaatatcagaactataataaatattaaaattgagtatttaaaaatgggttgcagcactagaaatgaattatttatattaagacaattgtgttattacactgctaagtagatggatgaaaggtcagagtgtaatttaaaagatgataatgaccagcatgtgatttagtctcagttttcttagcaattgaatatttatgtgtaaattatacacgccaaatttgtaaccccagtgtatatctgtcaagagtgggcatatgcttaggagaacatgaattaacgttagtaccagcttaggcaatgtataattaggaggataaaattgtcacaagaaaataatgcttgctaaagccacaacatgttttctttttattgctatttcaaaaaattaaccacattcttctattctcctccatgaaactgtatacctaagttatagtatttattaagcatccacatggaagacaagcaggtaacagtggttcattattagaaattgatactaaattggaaaatgtcagaaacaagagaagcattttacatataaacataggcttagaactgaaaagaaaacggaatagaatagatgcatataaaagagcaatttgaaaatctaaggccttgaaatcagataaactaatttctaaaacctggaaagcagaaaccctgagatttttgagaatctgaaaatttatcgtgcatttccaataaattttggtatgaacgcaaaagagagagataaatacttgggtttgcctaaaagataacaaacaatagatccttgtaagagactgctttcgctttttaatatctcagaaacaagaggagaaagaaaaggaaaaactgtcagaatggaaacactgattaatgaacaggatgaaagctaattacaagagcaggatcacagcccaaaagagcttaaagggcatcgatgtcaagagaaaaattactcagttaccttaatccatcatagttcaactagaaacactagaaaaaagcaaaaaattatcctgaatatcatgtaaaatcttctgattaccaactactatttgatgagtggccaaacgaagcaataaataacttgccactggggaataacaaaaagaaaaaaaaaaaaaaactctgaaaggcaaaattcaaaaggactagcaacaggaactgggtgataaataaaatctcccctgcttcctgaattccaaaatgaaagcctttgctagctagaattataaaaaaggatttttgacagttatcaacacatttactagaaggtctgaatttattctgcaaaaggattcttgttaattaaccgactaaatgattaatacggtttgaaacaacctctatttattttcatcgtgataatgagaaacacttcttttttcttagagataaatctggaatggaaagtctgctgagtcattaccagggcccctttcatcagtattttgaaattttccagaaatttaaagtacagcacaaaataaattttatatctgatcatgaataaaaggccctataagccaataagccatgaaattatataggttcatacacttttattacataaacagaacctacctttaggtcttcagaacataatatccttcataaaacaccccttttagcaaagtattgttttcaaaaagtcctatttacaatggtttctgtcatatatttgcacgtcaaagaaatgcttttaaaaatgatgttgctcatgacagttttagttaaggtgtaacagttacattggaatcaaaggcacattacttaatttgtgttacatcttccagaaataaagcgaactggtgtcctttacaaatccatggaataaagcccaaagagaataaaacgtaatgagcgtcagtccaaaaatgattgccaaagatagaaaatattactactgaaactcagaaattcaaactcacattaatttagtgcaaaggcttgatctgggttcagtggtatattttatttctttagaacatcagctgcaaagctgtttagatctttcaacaacatcaactcttctttttgacgacaaaatggtgaatgagttaaattcagaactacagtttgtgaagaaacatgacatttatgattcatgaaatagaagtcatgtaatgctaaaataaagtttcaactgagaaatacagatttaattaaaactgtgctctattccgtgcttgaatccacactatgaaaatcaactgtacattgattactgagtaatcatctcaaatataacttcaggtgctgtttaatgtcaccttacagcagagttcttagactcaggtgtgcatgggtacaatactggaaatttgttcaaaatgtagaaaccctgaggcctggtgtgagaaacacagccttagagttctggaaggtcactgagaaaccatcacttctcctcatgccaaggaatgaaggactaatgcatagaacataaaggtacataaaaacttacatgtctttgttgtgttatcaacacaagtattgcatttgaactctatgcattcaaatcttagactcaattacaaagtgactctaagcatttcatatttttctacaaatgttgataatgcaggcctgtctactatttttaactcagaagggaggtgcatggagtttagcccagaattttggagctacaagggaggatcggtcattgagtccaatactctacaggtcagaaaatgaagcagaaaggggtcacctgtgctcctttggtcaaagactttagttgaagggtcagagagaatccaggccatctcctgactcgggattctttcaagttagcaaatatgtgatgtttttattactcaggaaaagtgtacagaactactttcaaaagtactttagggacaatacactagaagtgttatcaagagataaattgctttgtagttaaaaagtgaaaactacagcctaaatgaaaggaagggagaataaaaggaaaatcgttatttttttcagctttcattatacaaaagatgttgccccaatttaccaatgaaaagacactgagggccacagtggccctctgagaccctctttccagggtcacatagctgaaatatgtggccaaaacagtatctttcccaaggcttgtaactgtaggcccttgtactacactgtgctatacctggtagaaaagaatatagatatacaaactaaaaaacatcacttattttaaaacttgttatttcatgaaatggcagaccataatgatttggtgtggacattaaacaaaaagagtttatatgcctcattaagataattttctggagctctgaatccatggtttatacataatgggttcagtatattttgtttagccacaaaatcactattgttaaatctttaattactgaaatatgaagttacgcaatttatttttgaagtctgcgtatgctactcaccaaatttttgttgtttaaaaaatattgttttgcaattttcaaaatacattagcctcatagtgcatatagcaatcttaagactttatcaacctctgatttctaaacacacatccaatattcatcactttcctctgctgaaattatttcccactggtggagtactttttttctttctagtgcgatgacatgctacggcacaccatcttattgtttgtgaaatcaatacttaagttgattcaggaaaagtgtatgaaacgaatttcaaacatcttttaggggcaattcactacaattgcccctaaaaccagttataagataaaaccaggatttggataacaatgatggacaatattgtcattgtcatccaaatcttggttttatcttataacttaattcagaatgttatttgatgcctatttaatggctagggttgctatgtttcttaaatactcatattgtttttctaacggtaataccataaatctaagcctgtatttttctttttacaactgatataaagtgcattatgatattttaactatttatcttcctctgagaactgctggttcttctatgctgcataaatatctcttaaggtaatttgtaacctagtattttgaagattccaaatacacatttgaaaatactattttcctggattctaactaagttgcaatacgttgaattaactcaaagaaaacaactctccatatgcaataagctatttgattatatgattatcaacacctatacaagggaagaatagcgttaactgaaaaaattatttttactaatggttgttttttaaatgcttttttgtatgttgacttcaatatgggtttgtttgaaattgtgtagtttcacatgtcagatataataaagcagcttcagtgaaaagattcaaccgacgagaagctacaagttcctcaacttgcccacattcgcattcccacatttccaatttgttcccccgcttctttaggcagtacctagcctcggcacggctgcttcctcttcctttttttttttttttttttttttttttttggcacggctgcttcctcttcttcttttctttttttttttttttttttttttttttttttttgggacggagtctcactctgtcgcccgggctggagtccagcgacgcgatctcggttcggttcactgcaacctccgcctcccggattcaagccattctcctgcctcagcctcccgagtagctgggaatacaggcgcccgccattacgcccggctaatatttgtatctttagtagacacggggtttcactatgttggccaggctggtctggaactcctgacctcgtgattcgcccccttcggcctcccaaagtgctgggattacaggcgtgagccaccgtgccgggccctctctcttctatttaaaaggataggcacagcctttggaactgaatgtctttcctcaggcctcataatagaaaatgaggaaagtccattctgacaactggctgccttaggcaacagaatttgggattcctacccttccagctcctgttgagtcaaaggcaaaggcaataacccaataaatgtggtgagacagtaaatggaaactgacataaaaatagcaataaaagcctacttccttcttgacaatcaatacataatggaatgggtatgattttacaccataaaacatcagagaataatagaatatgggctgaagaaagctcagaagccacaacattttccccaccttttgattttcaaaacgattcttaagatttgtcgggagtatttgttttcaattgtttcagtgaggctcagttttgaccacatgcaaccaaaatagagaatttcatggaggatggtcacaggattggcttagaaaaatgtaatcctgtgagctgtcccctttcataaataataaggttccgacggctgcaccgaatgttcctcctttcaacgaggttgggccgaggttgggctcccagctgctgggacatttttagtccatcttggactctcacctctgcctcctgctcagctgtcagaatgccaggcggctctgcagcccaaagcccactccgttttaaacttgctcgtttgcaatcacgtaacccgctactgacgacagaaccctcaaggcccatttatatgcggttctcaagtttaggtctagggaagtttccaggaagcttagtgttcggggaggaattcgttttgcttttgctaatcaaagagacacaaaagcacagctgagtcccgaagctggcacacgggaaatcgaggtaccactgtcccctcaccggagcgcgcaacaatcacttggggagcggggaaaaggtttccaccttccccgagcctggggcaccttcgctcccaccgccccagctggtggtggtctcgacaccacgctcgttgcggggtcacacgccagagctggaaaggggaggtccagccccaagtaaagcgacaaagtaaggacacagtggtggccaagggctgtctcctaaccccagtcccgaaagacagtgtggaaagtccgccggcgcgccagcccttgaaactctgccggtccggccgcggcccctcccctgcgcgtccccacctgttgtgaagctgcccaagctccttcttgcccaaatgctttggaaactgccaaaggacactcagaggccagggaatgtaacaggcaagcataaatatgcagaagagatggaaccaaaatagcgggcaggcagggccggcgctcgtgggggtcggtgatctggagccgggcccccgccgccgcggccgcgccagcagtgccaagacctggcgggcggcgccggcgcactccgggcaccgagtctgcaaaagaggccctgagcggaccgccggacacctcgcagactgcgggcagcggtggtggcggccgcctctccggggctccacggccgacccgccgcccgccgccgccatccccggcccgctcctgccgggtccccgactcgagccccggaggcgcccgctctgcgggaccgcgcagcccggctgcatggagcccggcgcggtgccccggccggccgagccagccacggcgcgagaaaccgtcgcccgccacggcgagggcaggaagaagatggcggctaccgtggcggcggcggcggcggcagcggcctcacacgcgtcgctgacgccaatggctcgcgccggtcggcgggccgcggatggcggcggcggcggcggcggcggctcgggctccggcgaggggcggggcgaggcggggagggggccggccggaggcagaggctggagggaggcggcggggacagtttgttgtgctcggaacatggcgggcgtcggcgacgcggccgctccgggagaaggcggcggtggcggcgtggacggcccgcagcgggacggccgcggcgaggcggagcagccgggcggcagcggcggacaggggcccccgccggcgcctcagctcacagagacgctgggcttctacgagagcgaccggcggcgggagaggcgccggggccgcacaggtgaggcgggcggcgctaggccgtggcgggctccgaggggcggactggggaccgagggcggcgggggcgccttggaaccccggcccccgagccgcgcggccgccgttgcctcccggggctccccaggctgtgggcgcgcggagccgccgaggctgccgaggctccgcggccgttgacagttcctcgggcgggttgcgcgcgcagccccgaggcccccgcggccgcgccaggccaggtgtgccctagaaggggtctgcggccgggaaagttctgtccgggtccttgcaccgccctcggaaggtcttaggttagcgggcatctcccacgtctcggagcccaaacgtgagaagcacacggctgatttcttaattatattcatgccaaggtgactttttttgttctgtattttaagcaaacttgagccatagaaacctgttaacttgccctgcaagtagatttttcacagacagctgacggtgtggtagtgaccatgaagttcagtagttttgcccagtacagaaatatttaacactccataaaatgttgcatctgaacttttcctgaactgaaacttatgccaaaaaaattactagatgagaaaatgtgtacttatgaatcctacattcaatgaccagttttaaacgtattgttacaatgttacagtttctataagctgtaggtttttattctcattttaaaagaatttttaaaacttgcatttgtattcatattgcagttacagattagttttaaatgaaaaaaggttttgagatggatgtcttcttgaatatagagtgaacccaacgttttaattctcaagctgtaaacagcaactgaaccataactccattaaatttcttccaactaaaaaattacttctgttgtccaaaaggggctgtgttagccgttatttcctgaagttcatgcaaataactaagttgtgaggctgattacatcattgattgtacttgagtactgaaattttaaaactacttaaggggcataaagttgatcagatgcgattctaattgatttgctgattcccagaactggacgtaggttctatttgaagcagtctatatttttggaaaattacagacggtcttgtttggtctttttcaattaaccacttaaaaattctcaaccatactttatttggtttagttctcagttaaacatttgctttcaagagtatttactttcttcattggcaggatctcagtaagacaaaatagcaaatctctcaactgtctgtttacttacttagacttgaatattaaaagcactctgttgtaaatagagatagatgtagccaggcttcactatactttctttaaaacatttctcagttgcaggaaagccaccattttaaaagcctttttttgttgtttgcgtggagaggaaatgaagttgtttgaagcctattgatgagcacagatcttgagcttgcagtatcacttaacacttcttccctggctttttctgggactggatacctggacttccatggacttcattataccacgtatccattcttcaccaacatggttcaccatgtttaaggctggattttttttaacccatagttgcaggaagtcattatcagggagatgcctccaggtttagctgttggggtagtccttgttctttccccagttccattgattttgtgtgaggagatgtcagtggccactcctgctttaccaagtcacactagccttggcgatcaggatttaggtgagaattccaaattccaggagtatttcagctggagccactggccagtgttctctctgagcctccacataagcccctccttcttttcccctggtgtccctgctctgctagtcacatagctcctgccactgctagcacccagtctgtagctccgataaccatatttgttagaggtttccccactagaaacaattattttagtccttcttcaatgcccaggctgctaagtctagcgctgccctcttcccctgctctgtaatccttccttcccctccttttaagaatttttaaaaacgattccctaggagctggcctgggtcagagggcctttgagtggcagcacctagagtcatttggatagcatttctccctgaatcaaactagtcctccacggctagatgctcggacttaaggtattacttgttgatttttttatattcttgtgtgcctctgagagtctagcaccactgcccttgagatctagatccccctgcaagttaaggcaacctttggcttttctttttgaaagtcataatcttagtgtcttggtggctgaaccatcagtcagttccaaagttccctttatcatttctcacaaggaatttagggctcctacaggtaagacatttgttgatcagtcccaacagcctagaattccctaaatgaatgtacatattaggtacttatccaaactctttccatctgaataaaataaaacgtggtgtctgaggttcattttttgttttatatctctccttgttgatttatatgtttagaaactagatatgtatatttgtctgtatgaatagctgtatatgctctatattgtattatactaaacatgtgtctccattaagtctaagctttcttttcctcatcacttcgttctcagaactcccgttctgacttatatttagcctggcaataggctgaagcatgtctcagatgcgagtacttacaccttttaacatagttagaattgggaatcccactcatcattcctgtttttatttgctctctcagaatggtcattgtgtatttccttgttgcatatgtggttactggccttgaactctggatgtagtggttatcaagaactgcagattgatctcttctgtattttcttcctgtccttgaaaatactaccaacttctgttgttccttttgacataaaaccaaataatcaatgttatgtttttgtgcttgttccccacttgattcatctgcagaagtcctaggtaggagagtttctgtatagccatatttttatttaggaatctaagtacagcaaatcaactttggactaagcattaggaaatctgtgtttttggcttggttgggttgttgaattgctttgtaaactctgtgcttgcttagactgcttgcctaatcagtttggttctgtttcataatgccactactagatagttcagtatctgaagcatctaggttgcttctagtcaccatggagacttaacagaaggcttggtgtaaataagggtagcacctgtgagggtagcacaggtgaaacagtacctgtgtaatgcaggtgttggagatgcatggggataggtattgcttgtaaaacaagaaagcctgaagtcgggtataggtgaacatattgtttctactggtaacagtgccatggacccatttctttcttctttaacagtgactctggacttctaaaacttcaacttattatccatctcttttgcctctctcctctccctttaaccatggttagacctcttcttgcttcacctctgttagagattgagcagaggcaggaagaatgaaacccagaaaagtcaactgaatttttagcaataccctcaaaagatttcgagtgggacgaaggttttaactattcatattacctatgtcttattctttgtgtaactgaaaatttgtcagtttcttcttacaaatacatttttattaaaatatgttttcatttaaccagtcttcacctatatcacatagttatcccagtggccccaaacttaaccaaatggatgattaaagggtgactgattctaaaattatgatctagagccaattaatttgttcacaaagaaaaataaaaataataaaaccgggaaattacttggagtaaccacaaaccagatacaaagtaaaattagctacttctgacaaactattgctttgcttttaaaattctcacttgctttacttaattagtatatatagaccaaacgaacaatgaaaagttacttattttggtttttgatcagttcagtgtcttggcttttgacagtttttaactttaacttagtttacgctctgaaattcaatcctagcagctcatttgtgctccaatttggggactacttgcataaaagaagtctctggaaagcctatatagcattgactgtcaaattaatgatattctattctcatttgtaatcctttgctttataaccttatgaccttggaaaaagtcactcctttgtttatacctgttttccatctatacatgtgtaaatattctactctttactcctctaaatgagactataaacattttttcaaacatcttaaaaacttgaatatactgtgtgaaatggttctttacttaatgtttgacttaggaaggcagaattgctgttgtatgattgagtcccagaaaagctgattactaattggcctggtacaagagtgtgtctctgttcaataagcttatttaatattttagtgtaaccttaataaagtttactaaagttttatgttatttaagactatggagatatgcatgtttcatattttcctaacagttaaccagtattactttccaaatttttaaatgctcaatgctattttaagaaagatatatttagacatattactgaacatataaatatatttatgattactcattacttttaattaatactttttaatctttggttcttatttctaaaataagctttcttagaagataattaaacattgtgttttttcttttaggggtgaagaaaaagcaatttatactatgctttttctgaatttaagttctggatcacagagcaattctgtggtaggagatgatatcatgtaaaaatatgctggaggggctgggcgcggtggctcacgcctgtaatcccagcactttgggaggctgaggcgggtggattgcctgagctcagtagttcgagaccagtatgggcaacacggtgaaaccctgtctctactaaaatacaaaaaattagctgggcgtggaggtgtgcgcctgtaatcccagctacttggaggctgagccaggggaattgctggaacccaggaggtggaggtggtggttgcagtgagacgagatcgtgccactgcactcacgcctgggcaacaggtgacagagcaagactgtgtctccaaaaaaaaaagtatatatatatgtacgtatgtgctggaggaattgatttggatttatgattggtattattttcctcatattacatattcacagttgacggctgggcacggtagctcacacctataatcgtagcacttggagaggccaaggcgggtggattgcttgagcctaggagttcaagaccagcctaggcaacatagtgaaaccctgtctctataaaaaatacagtgagccaagattgtgccactgggctgcagcctgggcaacagagtgagaccctgtctcaaaaaaaaaagaaaattcacagttgtcaaaacatagttcttctaatgttaagcacttgtttatgctataatagtaaaatgtttctttttttttttttttgagatagagtctcgctctgtcaccaggctggagtacagtggtgcgatcttggctcactgcaacctccgcctcctgggttcaagcaattctcctacttcagcctcccaagtagctgggactgcaggcgtgcaccaccatgcccagcaaattttggtattttagtagagacggggtttcaccatgttggccaggatggtctccatctcttgacattgggatccacccgccttggcttcccccaaaagtgtctatttttaaaaaacttttactgaatgatatttcttcctggtaagattgggataaatgaactaagattaattgacatcttaaaaactgaaatcagtgttcagaaagtaaatatttggattattggaaaaatacttatttttaaaacgtagaggtagatgtttggcataacaaatgagagtgactgttttgcttagaaggaatgaaatactgcaaaagtctgacagaagttaagatgtacttagctgtcagagttcttggtgatacccataggtaaagaacagtggctttgctaaataattaaccagtcaactgtagccaaaattataggacagataagttcagataggtctatagaattctagagagcaatgtttaacaaaataaaaacaagcgaaacactgaaacgcaggtatacctcggcactggagattgagtggcgctctgggaaatgcagccttctccaggaaaaggtgggaatggtcctggcagagcagaagcagcgaggctaactcgatggctctggcagtgaggcactgtaccctcctacctccttcaccatgaatcacagccaaattataattgtcagagagatggttgatcattttgatgtaggggagagagcacgctggactaggtactattcccaatttgtcacttagcttttcaatgactttggacaagtctctcaacttctgtgaacctcagttttttcataatatgaaaatggacaaaatatggacaccattaattgctctgtttaactctcatgattgttgcaagaattgtatgaagtaatgtgtgcaagacctttgtaaactgcctcatactataaagtagaaggatcctaatccctaaaataaagccacttacgcaggagtaggtgagaaggaggtaagacaaagctttcaagatatttaccttatgaaactttgttgttgtggttagtatttctttagtgtatcatttaaaaccattccccagcctattagcatcgcgctaattgtacgcaaagtttacccttacattcagaactcaccggcagggctggacttcgagaatatagggatacatggggcctgctcttagaaagttcatggtcttgtaagggagcaactagtaaagagtgtagcttcacagaagtcagcccaagctgcagtgggagcacaggtaaaggggagggacagagggctcctaattttccagaagtaacacagtggcctgtttacaaaggcacttgaggcaataataggcaaagctatctaatggtgaaaagcacacactctagccatagactgcttgactttgaattctggcttttctgcttgcttcctgtgtgaccttggagatctccttagcctctctgggccttggtttcttcatctgcaaaatgggcataacagtagaacctgtttcatagttgtgagagctgtacactcaaaataggttatgtttttatttgactttttatattctccattgtagaatctaaactagtgtttataattaaaattcttggatatctagaggtagaatccagacattgtattgttttgtacttgtaattaaaacactcagtatttatgttgtatgataacatgtttacagaaaattacttagatgatatatgttgttaaatatacttatttgtcatattaccttttaatgatagagctaggattgcagaaataaacattagataaccaccaaaccagaactgattaatactacagtacttgtgaagttaatatgaagtagttgaagacactgcgtcatgctttgcagtttttatatactttcatacaaatactgtcttagtcctttgatgattctgtggataaggcaaacagctgacaggtattaaaaaactgctctaagcttccattttcttttcggtgaaattgacatctgtgactggagcagggtcacaggactaatgtttaagacagctggtaccaggacagccttcctctggttgctaatcccatgctcttctgtggatcataacacaactctcattatggtcaaagctgtcatctccagtcaccagagaagacaccattgtggagaataattttccaaataaacctctttttcttgagatggagtttcactcttgtcacccaggctggagtacagtacacgatctcggctcactgcagcctctgcctctgggtttcaagtgattctcctgcctcagcctcccaagtagctgggattacaggcacctgccaccacacctggctaattttttgtatttttagtagagacggggtttcgccattttggacaggctggtctcaaactcctgacctcaggtgatcctcccaccttggcctcccaaaattgatgggattacgggcgtgagccactatgcccggccccaaataaacctttttatttaatttgctttttaaaattgaaaatgattgtgcagtaatgtgtttctgtatctctttaacccagatggcattcttgtgggctgcgtaatttctttccttgcacttagtgtggacaatgaggatctccttattcccaaacccagggcactcactggctgtgactgcatcatggtaccctgttccctcagggggtttgaggttcaggtacccgttgggttacctttacagtcacttagctacacatacagagtagaggctcctgaatcagcagcagctgctaccttgagtgaagcttttcactccttccctgctaactccccaagtctcagaacaattctgtcacaatcacaagttcttttctcaagtatctggaatgctcttcttttgtcatgtctgatttttgttttatattggtacgttgttatttattaagcaattccattactattgaacattttgattaattccagttttgttttcatatagatcatctttcaatagagaaattcagcggtaaagaaaaatgagaaaataccagaaattatcatatcagaagggacaaatcacccacatgaaagtttagctcagtttgctgttcacatcacttcctcaattctttgtcggttctgttctttgctgcctgactcctaaagagactaatttggccactccgttttatgtctaattctttcttttcttagtcacttccctttccatttcatttttagcttctcactgtctgattctgtttttgttctctatgatttttcttcttctcctctgacctgtatattgttttagcaaagatttgttgagtacctgttatgtgctgggtcccagtgatgcaaaggtgaatgagaaaaccagacaagaaaatgaatgtagtatactgcagaaaatcataggcaggtgcaggtactgtggaagccgagtaggggaaaggacagactctgcctgagaaacttagggaagtcttcacagagagggtaccgtctgggcatgttcactcctggaaaattggtaggggattctcagaccaaggagcagtgtgaacccattgacgtgtttgggagaaatgaaaagtagtataaaaagaaaattgtgacctagagattcaggggaggcaggtgtgaagcatgactaaagagatggcctgtgtccagttgtagaggttctgggatggcccgcactgagaaggtaggactttattctggaggtaatgaagaaccactgaagggtttcagcagaaccatatctgatctgtgtgagctgctgactggctgccaggtggagttagcattgaagggaggaaagatgggaagaatggtactcaatcaagaagcttttgcaataacctggagagagatggagaggactaaaccagggtggagtataggaaaaaggggaaaaaagttaatgttttaaaggaagaattggtagaccttggtaagaagagagaggggattgtcaagattggccctgggcttctagggcagcaagtatgtcactggtaatgccaggaactgaagtcaggactccaggagaggtgctgaatcagtgggcaagatactggtttcgttttttaggtaatttccgtgtctatgggatgtccaggtagaggaggctgttggaaatatgactcaatagccagagctgaagatgtgattttaggattttgatgatggttttaattttagttaggaatctataggaaacaaagcatgtgtaggaaacagagtaggtatagggaataaatacaagaaagaatgatgaggacatattggagaataccatcattaaaggatggctgacatgttactgtagtgaatagagcactgaaccagcaaacacttaaggatcgggtacaggaggaagggctaccaaagagactcagatgagaaaaatcagccattcaagacagaagagcaccactgaatcaggtttaggtgacatggagggacagggaagctgctgtccggagagtgtggtgaagtggcctctggggttcaaaattcagagttcactaaggtcagtgaaaaattatatatgtggaatctcctctgctttctgaaagtcctgttgcttctcgatttttacatgaaagaactgatacttgtagatactaactaatcaaaacatactttttttcctgattggaaaactgactgaactgagtatgatttgtttatctttcattagtcttggctgtttttgtttgcaactcaaaaggttttctttttctcaccttgaaagagcagatcttgttctggttctagccagcgtagaacatattagaaagttcctaaccagaagttctactctatgtggatttggttagactaagtcctttaaatccaaacatctgttaatttatacaatagagtttacatattgcgtgcacttaacccatgtgacttcaactgtaaatgtattgaaaagagaaagtacgacacatgtagatagattccgcctcctgttgcgtgaggctggcaaaggtggaaagaagtctgctttcttcttctgtttcaactccaggtatctctcatggtaacactgactccccagacagattatgaatctggtatttaaagaagtgtgtatgtgtatgtgtgtacatacacatatatatggaataaaccctaacataagcaagccacttgacataatactcaaagaaccaggaatccgttttaatgctggaggaagtaagctgttgtagacctattgtttaaaaccatagtcaagttggcttctaagtctttccaagggcttttaaggatatatatatatatattttgttgttgttgttttgagacacagtcctgctgtgtcacctacgctggagtgcagtggcgtgatctcggcttactgcaacctctgcctcctgggttcaagcgattctcttgcctcagcctcccaagcagctgggactacaggcgcccaccggcacgcccggctaatttttttttgtacttttagtagataggtttcactatgttggccaggctggtcttgaactcctgacctcgtgatctgcccacctcggcctcccaaagtgttgggattacaggcgtgagccaccgtgcctggccaaggatattttttactataaacgcttcccccctcacatgtaggctttagatcatagtactcctagaaggtgcaactccttaagtagatctgcataaatgaaatcaaccttcctcccttgtcattttttggagggaacattaagaccacatttggtagaaaggaccacaaggccagctcagagcaaagagaacagtggacagttggaaaccttttggtaacctgcgttctggaagagagtttacctcctgcagagtaaaagtaggaagctgtagatgaagtaaggggtgctgagggtcattgaggggatgggctatcagggaagtgtaatgcactgggaagaggtggggtcgagcatccagagccttcgcttctcacctcaagcttccagttgtagtgagtggaaagtatataaataacttcctttgaccttgtttttctcacctgagatgagataactatggagtaatttgctttagaggaacagaggaaaaacacgggtgaatggaaagatccaaggaaagggaggtttttctgatccggttgaggttgcacttcgcgtaataactattgtgagtatcatgttggtaagtcttcatgtagggaaatggcattatttagatgtttgtgcaggatctctgaggctaaactaagaagggagctggggcaccagtatccatgtagttcatccaggatggttcttggactaaagtggtgcccgttgtgtgactttgctcccttttgactctatatattgctctattttatatattcttgacacctactgattttccttccatgtctgtcagtccaggtactgtatcacctgtaagaaccaagactgagctcttgaaaaatacttttctgactattctagcccttaataattattcctttccatattcctgtggcattttcaggttataccacaaagaagaatacttttctcaaaaatacttgctgatcattgtgtgcagttctaggcatagaattatagataacatttattttggtctctttgttttatatgtatattacctgtggccccagctagcgtggaagttccttgataaatactgttctttttgttttctgtcattttcttttctgtagagctttcattgttgaggttcctcagtgctgaactaacaagagggtacttccttgaacataatgaggccaagtatacagaaagaagagaaagagtatacacttgtttgcgaataccaagagaattggaaaaggtactattttttcttcattaccagacatcattttgaaagttatgtcaaagtattaattatgcaaaaaaatggtcaacagctagagttgagttttttaaataattgaaataatgttattgggggagtagaaatttccttacaggaagaagctttaaagttacattttttagtgtaagacccagtgataggatattaatagatctatcaaaatctgaacttttctgcctatcattatcattgtgtgctacatcaaaataacttttgtaaggaattaatctctacttctgtacccttttagttcccttcagttctcttttactagaaacaggttttttttcccccattcagcatgataaattatttaatttcagcctttttaaaggtttcagtttctcagaaagcccacatgtttataaacatacaggacagtctcttcaaagaaaaagatggtttgtttaatctttatcacaggaagcatcacattacagggtgagtgtagtaacagcagcactacatcttcacgtgtcttattccttggctgtgccttatcctatcaagaccaataaaataggctgggaaagcagccccttctcccctaggcgatgctagagttggtgagtctaagcaattccaaaatttcttgctaaaagaaaagaagaaataattcagcttcagctatattgaaacatgttttcatacttctgtagtaacgtaaatcttgtaatagtccagtcgtcttcttagaatcatactttctgttggagtggctatcagaagagtttggttggctggatttattggtacattgtagtaacaagaggtactgcaggcaatgaggagtaaggacccagctggtttggctgatgttctatttctgatagtctatcagtttaatagaagaaaaagagcgaaatgtagagtgacagtttcagaaatgttgctttatgtaggttcttggtgaagcgtcacttgctgaagttttagggagttctgtattagggtgggatttagagagctggtgagcaagcaaagattagagaacaaatatggcagtggtttgattgcctttggcaaggatcattaaatatgctcaactattactgtattcctgcatttctagaggactagagttccctgggggggcctgagggacttacagataaggagggaggaggagtgggcagggctctccgcagcactcctctccagcgcagcaacagctctgtcttatacattgagatttatcgaagattttgtttggggaaaggagtagggtaggcggatgtttcttttacttggaaaaaaataaaagattaaaccagttcttgtgtcttaaaagactgttagcttgctttgcagctttcttccagcaataagccatgagatggaagtgtgaggacacagtgcaggggaagtgggaaggacagcctgccagggcctgtatttggacaggatagtgccagccacaatcagcttttgcccacctggcctcagccctctacaggggaatttgtttcctgtctttctgagtagttatgaactcccatttttctctggggagaacacagagggatttgcctgcaactcccaccaaactttatgaacacaaccaggggactgcttcaaagtgggttggtatctgtctcaccccttttattacccctcctgtggcaaaactaatgagcagtggcaacatccactcctgattttgttacctcagcagagacaggctggtttcacgcttccttctttctttctcttaaggcaacactgaaatagcaagcaatgttttggggtagatttctcacagaaactaataagcatttcatggttgtaattatgagtataaattgttttctggagaaaatagcttatacttatgtcttgatgagactaaagtataaaccagtgattctaaattgtggtccactatagaaccactaatgggtcaagtaatcagtataagttgccatcagaattttttttttaagaaaatagaagaagtattagagaacattgcctatactaagaataagtattgtttcatgaaactttggttccatttgtatgaatgtaaatgtataatgtcagaaaagttgcatcaacactgctcatacacaattgtaataattttctaatgatttttgttttccctgagagaggctttaggcctgtttgggaaaatttgatgtagtctcttagaacaatacttaagaagctttgtagcctaaatgtacaaaagaacatcatgattttctgtttggagcattttttcttaacttctaaaaccaagtgggatgtagaggaaagccaatttaggtttcagtttaattccaggcttaaatatctctcataactgcatgaattcactctgctatctttaaggcctttattttttataagtaggatttcacttaaagtttttattatgagttgagagcctatctagacatgcaagataacctaaataattttttattggctttttttgtttacattgtctattctaatatataatatcttactcattttttttcttgttttcgatgaatgctatgatattttcacctaaccttttcaggaagagaaacttgaaaattaaagcgcactttgcttctacaaaggttgcaaacaccataaaacatgtaattaatttttatattttaagataaaggtcaacttaatatgtcttatcaaacctgtttactaatgtgaaaaaaaaaacaccccaatttttgtgttgtattgtcattggataaataccttatacttgacatttagtaaaaatgaattgcttatatattttacatagtatttccaattattagcacattattttcactcttaaacttcttattttaagctaagggtatataattttggagtgttttattggcttttgagagacatttcttctcttccaccataaatgtcctcccctgaccctacaaccccttgggttctatgtaccagatcttctgctgtttatgtagtccactttgggaactttatttttcttttttatacaaccaaggagattaaactatactttctctgccttctaaattgagaggcaagatagcaaagtgtttaaggggatcatctctaaagccgaactgtctaactctgagtcttggcttcacagttgattggctgtgagtccttgagcaattcacttaatcattctctgcctaagttgtctcatctatatattaattatatggtaagcatgtaaaatttttcacaaccttcacatcagcaactcagggggaatgcactactctgctagagtgagaggaatttaaaggttgcttgtccccgattacattctggtggatgtaatatttttctttgcagtagggatagctttcatctttgggatgtgcacagcaggaggtgattgggagaggtgtggtttttaggatttccctgtgtcccagttttatctcacattatacttttaatctccctgctttgcttgccactaaattcgactttgctaaccctgcaaggggcatgattttctggctcttggccctcttgggttgctgaccataggcagaaaaaacctctagggaaagctgtcttctttcctctttccttttacctaggctgtctgggggtaaagctgatctctttcatgaagaacataaccaatggccatgagagatgataacacaccctgacattttctgccaagccctatagagtctggcctcaatgggcacatgcctgaagcctacagttataacagaaacagggtgctttaaccagaggcttggtgaaatcaagggcagggagcaccagtttcctaaagaggaaattcctggtgagtgagttctcactgtcccataccccaccttgacttggacacttacatcccacctcttgtatccatttctgtgtgaataataaataatgtttgttatgtaaggattaggtgtcagatactgtcctaggcattttacatgtgtttgcgttcaatccattcaacagcctcacaagatatatatactattaaagctccaattcctttgtccaccccacggtggcagttctacattgacttccagacagatctctccttccaccattgtttggtggaggtatgtgctagtagtatatgctctccatttaggtcccctaggaacagtttaccatgcatcaggtacaaaattgtcccttgtctaaggactaattttgtcatctttgtgaatctaaagctacagtaaatagtaaagaaatacacattataggatcttctaaaatttcctgttatgtttaaattcaaatttagaaagataaagatcacttacacacttaattattaatttgctccatctatattttgagtactttctatgttccaagaaggcacttttgcagtgcaaaatacagagataagactcacacctagcttaggagatatcagatccataagttattataatacaggatacaacgtgacaagtgcttttaaatagtacaaataaaatatgaagaatttagagaaggggaagtgtgcctagacaacagacctgggacgaggatccaggaaggaaaaagagagagattttgtcgtatatgctttgtaggatggggtggctatgctaggaagatccagaggtggaaaattgttaggtgtgaacaggaaaccaccgacacatgctggaaagaaagatagactggccaacctaggcaatgtggcaaaacgctgtctctacaaaaaatacaaaaattagccaggagtggtagtgcacgcctgtagtcctagctactcgagagactgaggcagaaggattgcttgagccccagaggcagaggttgctctgagctaagatcatgcaactgtactccagcctgggcaacagagtgagaccctatctcaaaaaaagagataggctagatccagttatgttgaatggtcaggctggagagtttagagttgagtctatggaaggagactattaaatatatatttcttaggaatgcttttagctgtatagaatggaaaagctggctaacagtcatttaaacaagtaggaaattatttttttcaacaaatctagaagaaaagaggtctcagttgttgcagcagattaatgaagctgtcacggacccaagtccttttcatctttctattttgccatccttggcaaattggctttgggtcctcttgcttgttgtcttctagtagaaagatgacggctgcaacctcggcattacatctgcattataaacaaagaaatggggtgggcattgccacttttttgactatgccttttataaagattgaaagatttcccagacgtggcctggaatacttccacttctgtcttattgtccaaactgagctacatagccattcccagctgcaaaggaggctaggacagtgaatgttaggcttttccaacaaacagaaaagaactgagaatggttattgggttagccatccgtcagagctttctttctggaaaattagtatagtcatattcaacatggactggaaatgagacaagcagggagagctcaagatccttccatgaatatagttaatatataatttaattctacaattaaaattctaatttaattctacaattacataatttaattctacaaattaaaatcttcatttgatttacttattcccctctcatggtatttatttcttgtgttaaatatgtcagatgtatgttgtggattatcatgaagccttttagcaatattcttttccgtgtttatatatgttcatgtaagcttgcatatctggttaaactaaaatgaaaatattctgttgacttttctttaccttgtaattctgtgctttttggcaattcattatttcattgttaccatgccttgtacattatagctatttaatacatttttctaaaaattaaattcaactgcttaaatagaatgacttagttttcttaccaatgtagcaaatttttataagccttaaatttgtcagattgaaggtgtaagtattgatatattgttattactaggcatagactattattgttgaaagggggaagggttactgtcatacaggggaattatttgtaatcaagcatcgacaaccttagcttcttgagtctgtttgtaatagctgaggcctgatcaaggcatcagatctctcttgggttttactttcttctatgattagaaggttgtccctcggtcatctcaagaggtctaatagtgcctgattcattgaatgcgtttgcctgtgcggactggcgacggttgctcgccccatttccctgcctcccgcccccccttccttctgccctttccggccggcgcgggggcgcttcgccccgccgtcccgctcgctcccctccccttcccgcgccgccgcccccgcccgcgccgcctgcgcgccatcaaaaaaaaaaaaaaaannnnnnnnnnnnnnnnnnnngcacttttcttgcatgcctcgcagtttgactctagaatccccgcttgtggtttatcatgaagccttttagcaatattcttttccgtgtttatatatgttcatgtaagcttgcatatctggttaaactaaaatgaaaatattctgttgacttttctttaccttgtaattctgtgctttttggcaattcattatttcattgttaccatgccttgtacattatagctatttaatacatttttctaaaaattaaattcaactgcttaaatagaatgacttagttttcttaccaatgtagcaaatttttataagccttaaatttgtcagattgaaggtgtaagtattgatatattgttattactaggcatagactattattgttgaaagggggaagggttactgtcatacaggggaattatttgtaatcaagcatcgacaaccttagcttcttgagtctgtttgtaatagctgaggcctgatcaaggcatcagatctctcttgggttttactttcttctatgattagaaggttgtacctaggtcatctcaagaggtctaatagtgcatgattcattgaatgagtttgcctgtgaggaatggtgagggtagatggaaagatttaaatgtctagtggagtaacttaattttgcctttttgaaggtcgtggtggggttaacatttaggaaaaattaatccaaaagttcatttcaaacgaatggacttaaaatgtcatataaagcctttttgttttatgtcagtgtgaggatatgttaagaaaacgtaatgactattgtttcccctttatttcagtaaaacagtcctgggatttcattgtgaaactaatagagagtatttactcagacccatatttatggcagtgttttcttgggcatcctagtcagtttctgatttcataaaaacatgttcagagaatcatccctctaaattcttctcataatgcagctcttgctggtgacacacccttgtgcagatgttccccctccttgtcccccagcccctgctgtgtggctgctgagaagcaggaaagccagtagggatccacatgtctcagaatctcagcagccttggctggtgcttctccccttctctccgaggcttgtcacaccctgcttgtggtggtagtgaccacagcttccacgttctttctgcaactgtcttaccattcttaattttctcaggggaggttgggcatatgagactcatcagatagttctaagacaagccagcaaagcctttaggcctctagcacatttattaatgtatttaaaagataatttttgaacttggcaccatggggccatgtttatctttgtgaatcaatcacttatttctctcatttcagctttggaaacagtcttaaatttctcttctctgtctttccattgtcctatgtcaggctgctgtgatcattcacactgatggctcttctccttccgtactgtcctctctgctcactgcagcctgctgtggtgcttcgtgctgaccactccctagaaagtcgatctcatcctagatagaaggtgtaggatcagagcctagagccgcagctaagacctctgttccttaggtgacactcagtcttgccctgggaccctgagggcactcctgccttgctgcatcattccagcctctcagcaggagcaccacagccctgtctaagccctgtctgtagcaagcaaaataccaagtaatagttcctgcctggtgggttgttgtgaggatcaagttaatgtgggtcacgtgcttaaaatataacagtattcaacatggattggaagtaagagaagcaagaaagtctcaggatcattctatgtgcatagtcctacaaattaaaatcaattgacttgttttccatggctgcatatgcttacatagcttgcctatcgtaagagaacttggctcatgataatccctttgttggccatctcctagagtatagactttctggggcatgaattttttaattcggatgattaaaatgattttattgtagggatgaccttgaatctgcagtaattgctttcaaagtcagtcatttatagttttcttattgatatcctgttccccttaacattctgctgattgttgatccctatatgtgagtttattgagaacatcttcattctcagcagagatttatcaaaatgtacatgtttcaaaataacctaatcatcttcaggtacctctttaaaataaaagagctataagtgaaaacagtcaaaagacaaggataccttggaacctaagaatgaaaatttgagctccttagcaatgaactgaacgtgatttttatgcctcttgcataatgattatatcctaacctcaccactaggaggctactcacattgtacctgtgcatgctctttccttggtttgaaattcggtcctctttactgcctggcaaaatctagtgcctgtcttctctcctctgtgggacatctctgctatctcttgcacctccttccctgtggtgtgcatgccactctcacctgcccccaaatacacacgctttacagacccaggctcttcacctgtgtttccagagcacatcattcatctggcacttagcgtgcggtttgtgtcaagctcactgggttgtgaattccctggagaggatgtctttcctcccagtgcagtattaagcaagatatggtctctgcttttacaggagtagacccagagctttagcacaagctttataaaagtgagactaagcctctttactcctactttctaacaccctagaccagcgatcctcgactagcaggtggtatttggtggttgtggtggaggagatggtattcagaatttccagaagatggttagtgtaattcaaggagatatattgcaaaatcattatgcttctttcattttagccataacattttgtttattttgaaatttcaaatggtgctaaaagaagggcaggagatttttgtcataaagggacacgtagattttttaaaaggtgaagaaaccctgcttcattccccacagaaagaggctggcgtttttacttgtttatttctcttgaggcaggtatttttcagatgctaagtgcagtactattaggttcaaaataaatatgataagagcaggttgtagaaattttcacaagtgaatattttgtttacttacaatgtcacaggataattttcattttgtaatttccttagcattaaagttcagatgttaaaaacttatgttaaactttattttaaaatgtgtataatggtaaatccagtggtgagtgaggccagaaggatgagtgaaagtgtcattagtagaaatagtgcttcagttttctgcagactgagtgaagtcctggctctgcctccaccactcaagaacccaggccaactccttgtctcactgcagagtgtgggtggtactagactgcggccatgcacaggcagggcccaagcccagcacctggccagtgcccggttgcgttgcccagaacctgtagaaggcttctgaagtccttccagaaaagatctctcagagacagagagcctggtgaacatttctgtccttttattgttttcacttataactctttttattttaaagaagtacctgaagatattaattaagcaaaagattattttgaaacatgtacattttgataaatcgctgctgagaatgaattttagaaaatattttaaaattatatgtctgcagtttgtaactcagtacttttaattcagttttgcacaaagaacttcccagtgtgttcccactcgtatactcttctgcaaagctttctgtagtcagtttgagctgaactgtcttcagtgctttggaagctgcctaggaaggaactaaatttcagcctggctgcctatccgggacctgattttcagactgagttgcaactttttagtggatcacaaacgctcctgggaacatcaggtttctggcagtttctgccctcagtactgaaccagcagtccactcgcaaggacggaaaggcttctcagtgataggagagtaatagaaaaggaccatgaactctatctatatggaccttgctcagcctcctgctgtactgctttgtgtgtaagacaagaaaacatgcaacactgggactctacgctaatctaccacacgtgactctatgctaatctagcatcgtattttcactgctgttcataatgagtctaaattgttaaaaacaaaaaaagggcctatatattcagattaagaaatctggcaaatattatgtgtagcatatttttgagatatttttatcaaaaattaataaagtgtattctttcatttaaagacatgtgaatttgtttgctagggctgccataacaaagtaccatagactgggtggtttaaacaacagacatttattatcttgcagttctggaagctggaagtgtgcaatcgagtgtcagtggggtagtttcttctgaggcctcttcttggcttgcagatggctgccttcctcttcggtcttcatattatctctcctctgtctgtgcctgtgtccaaatttcctcttttataaggactccagtcacactggattagggcccaccctaatgacctaaacttaaattacctctttaaagaccctatgtccaagcacggttacattctaaggtaccaacataggaacttaaattacctctttaaagaccctatgtccaagcacggttacattctgaggttccaacataggaacttgatagagaggacacagttcagcctgtaactatgaattttaatctgtggaggcagggcaatttattgactaaagatacatggatgctgtggtgagggcatatgtatcataccataattgtgtgtcagacatacagaaagttgccactcttaaaatgagtagctgagtttgttagcctagtggtggctacttggccaagtcctcgaaagacttcaccctctttctgtgaaatatagtcctaaacttaacaagtaagagtgtctaatgataccacaaaaagaaagggtatggcaagtactcaagaaaggaggagaaatataaacactaggaggctggtcctggaattaagaataaggccttctgagtgcagcaagtttcagtgcacatgaaattgtgttaaagttagtgatcagtttgcatatttttaacataaacaatattgtaactcaatatatattccagtctttcccatcaatgaagcattctaataaacaggaatagcaaaattatgaggaataaagattttccataatatctagagcttgaggaagtactcagaaagccgcatcagatgatgtgccattaactatggtcaagggcaacttgtttttgagtaatttcttttgtgagtcgtaaaccaaaggctctgaggaagcacagactcactctttgaagagaagaactgttaatttgttattcccagggctaagttttaagaaattaattttttataatgtttagaaattctggttgtttggaattttcatctacaagtatttttaaaatactttttttttttcttctctccttgttaaaattcagctgatggtttttggaatctttctgtgcctggatgcgtttttgtatgtgttcaccctgcttcctttaagagttttcctggcactattcaggctcctcactttgccttgctatggcttaaggtaagtttaagatcgttaactattgtaaatgtatagtatttcattatttttaatacttgtagtggttgcagagtaaggataattcatacagtttcatccacactttggcccttcatgcataaactgtttacctttttaatggatattatataatatgtttatataatattaagctttttatatgcttatttttttccagaattgttttgaaccgaaactttgctttagccggtaaaataatgttaatgctggaggctttgtagcagtgtagaaaggacccgggtctgaaagtcaaagacctacttatcacgttcttaactcacctgggcctttatttccccaaagtccttgggcctcgtaggcatcatctgtggaaaggacagggttctaggctggagtggaaaaggaatctcctcaggagctcttactgcaagtgttcctcctccatttcatttgagaatcattgtaatgatctgtggagccttagttactggttatggacgagactgatttgtgagagtggaaaaactctggaagaccattgtccccacggggaagatcagagagcccgacccgacattgattagcttgtgagctgtgcacaacagcctgacttctctaagtgtgcttccccatcagcaaaaagggggtattgagagctcagcatcttttaccacaaagattggaagatgtaaaaaaaatacccagcatagtacctggctcatagtagaccagaacagataatctgttttcttctttttcttctctaccaaaactcagaatagtaaggtgaagatgttaagcttacatgaagcttaatgctttattggtcttgaggttaaaagcgagtttggcttttacggttttctttctttgtacaattatgccggtgtgtctccactctgtatatagtcactcttcacagcatttttattgagttcttagcatagatgtcgaggttacatttctgacatgcatcacttttctacatacatttcatgctggaaaagttctaaaatgctaaaatggacaataatttgtgagacttcattgaactatggtgactgttccgtggtgtataaaatatataattaataaaataatttaaccatagcagttgagttaaaaattagtggtcgatatacacatttatatggtttgtttttttaaaagactgaagccatgaaaggttcttttttaaagtagtaaatgagcgtatacttgatatttagtaacacatacagtctttttaaaaataagacaatcagttttgatagaaattcctcccagtataaattggaataattattatgatgatcacattataaaaggatttaaaatgcttgttttgcaagattacatggagtaaaacaattataaaaattcagctcctgtcattgttatatgctatattctgtaacttacttgccttccaggataacagtgaattagtgttacatattttattaatcacaagttaatcaaatgggaaggtagttttagaaatttagttatttgctttaaggcatttctagtacatccttttttcttttgggagaagttttaagaaggccttattattaacaagcctttttaaaggcatttgtagcgtggtgcattaatactaacaaaacctaaccacaataaactattttcttttatcactcctgggagcttcatgatatcatggcattttagttcattttcagaagacccaaatacaatctaatagaacattaccaaatatacatctttatttggaacgggataaagcgaatagaaacatggaaatttagataaagtcaggtgaaacacatgacataaaattactaatattgctggatgtggtggctcatgcctgtaatctcagcactttgggaggccaaggtaggaggatcgctagaggccaggagttcaagaccagcctgggcaacatagtaagaacttgtctctacaaaaaatttaaaaaattagccagacatggtggcacatgtctgtggtcccagctacaccagaggctgagaggttggaaaatcacttgaccctgagaagtcaaggctgcagtgagccatgattatgccactgcactccagcctgggtgatgagtgagaccctgtctcaagtaaagaaagaaaataactaatactatgtagggcttttcacatctacattatgagctacattactttttagttattctttgatcaacagtgtgcgtcaagttcatgttctagccatctttatgtggacggcttttaaagacatgtcatgttcttagtggctgttggcacaatgtggtaaaacattaaaatgatagataagctaatgactgtattccttctggagtggtcccttccttgggcattggttagcacacgtatgaggtatactaagtaacagtggtgatttgccagtgatcccaagggtctctcttcggggacagttgtttgaagttccaccttgttatattgtacaggcatctaaaactgtgttgcactcaagttcatttctgtgtagcccctgttacgtgggggtacagggcacataaaatagcattagaagagccttttctagaccagcacggtggtacacacctgtcatcttagaactttgggaggccgaggtgggagggtagcttgaggccaggagttaagactagcctgggcaacatagcgagaccctgtctctacaaaaaataaaaaattagccagttgtggtggcacatacatgtagtcccagctacttgggaggctgaggtaggaggattccttgagcccaggaattcgaggctgcagtaagctgtgattgcaccactgcattccatcctggttgacagagcaagactgtctctttaaaaaaaaaaaattcttaaagtgtttgttctaaaaactaaaagatgttacagggaactgggaaatcttaaatcctctgccagtatttacttttactagtggttaatgatccctacctctaaccttttttagatattttaagattttttgtagtgcataagatgattgctttcttacattagtttgaaatactttgaatctaaattaatttgagtatcatttgaaaataagatgttttcttttttcaaagttttatagctaaaatgacactagagggcagcctgttacacatgacatttaagactccattgaggatttcccctgcaaacacttcttactatttctgctttggattaactgaaaaattaatttcatgctatcactaataaatacttatatgtataaaaacatgaaatgcagttaaaattatataactgtttcagcaattttaaatgataggagtttaaatgaaacttaaattttcatttaaattttaaatgaaacggagttcaggcaattataaatgctttgaggataggccaggttacacagaatatgaaaatcctgcctaatgtcttagtgccttaagtatggtttatcaaaattgagtaatttgtgcttacagtaatataggctgcaatttttgtttctttgagcaatttagaaaatatctctttgagcattatttttaaagtcacgaaacttgaaatatttgataaggtaaaagttacataaacaaagctattgttaatattaagtctaagacctttcaaatattttggaatataaaaatactttttaggtttaccaaatgattatttagaaatagccagattttgccttctgatagcttttattcctgtgttttctacttccattaaagattattcgatttgtcttgcctgtagtgatgtcatgttccatccttttcagcaagcaaaaagtgctctttccttcagtctgactttatttttttcaaagaaataagaagaagtgaaatagactggcaaagaagttgattgcaattttttaaataatttttttttttcactctcctgtatttcaatcttctttctgtaaaaacttactgtcttcctagtctctttgttctttgaaattgttttcacaaaagggaggaaacagtccatttgtcaaattaatcacaatgctgacgtgaaaacagtaactctttgcagactctagaactgtttggttcagtatcacatcaataatgtaaattattgccttctttttatatttgagatcagtgttctcacctcatctgtttgcagatttacatcttgtacagcatttgtgagaagctttttaaagcacatagacccccgtgttctctgcttcataacttaatatttgaacctatttctagttcttctgcaaacttgccatggtttttgacttaagtaaaataaagaccctgtcccttcactaaggctgaggacaagggtggttctacagtgccttaagtaaacccagccttcatcatgatggctcatccagcagggtgttttgctggctttgaccctgttgtttaagtactgttcattatgagatgttggcagggtaattatctgcagtcatatttgtgtgtggtgtttgccaaggatgcactccctccctaaaagttaatgtctgtcctcagtgatctcaagaatacttcactgaaatagtttctgatgaattaacaaccttgaaaaatctttgcccacaaatattttgttgtagacttaaaaaaaaaattagaaaatgcatctaaattctttaaaagcagattcacttatgtatatcttccctctttcccagataagagtagtgtcattttagaaatcatttgagaaacttcttgaacgaggataatctttttaatgattcatgacatataaaacagaactaagttttgatttattatatgaagtgtctattccttggaagaatgatagaattttttgtttttcagaaaagcagactgctctatattatgttagaggtacgaaacatcctttttccaaatttgcttgtagaattgaatgaaaaatagctaattatgtacatttgatttacctggcatttttgtcagccctctattctcctgaaatttgtgacttcgttttgtgctttagaattctcagtcacgtaagttaaaagttaaagaagattgtagagaaaaatgatatagcctggtaccaagaattgagttattgttgaaaaaactttactgaaacattttagaaagtgatacatgagttgaacaggcttaagtaataaatgccggagtgttttttggtttttgttttttactattagagcaactaaaatatgtgtgagcaaatgttctgtcccctggcccggctttaggcataactctcacatgaggcttcacaggcttttatttttcttggttgaagaggcaatagtatcattttcttttgagagtttatcccatgggagagctcttgtctcccagaattatgaatttcagatgcttgagagtttcctaaccttttgagtttccttcgtatgccttacctctttcgaaatagttctgcccaagattaacctcacctatatgttataatagatttttctctttttagacaaaattaagccttgattttggcctaagtgattgatgccaccactgtagcacaagtagggagagctcttggtaactttctctggggaaacaaatatgccttttacttccttttaccagggctgatctatgtggcttatttgttgagagcaatatatttgttattagaaagtcttcgtaacaccaggttttattgtcccgtttcctcaccatggagctctaagtagcgtagcaacattacaaccttctctctttctttctctctcgtaaatcagaccgaagggaggagcactttcacttcctttatagaatggaatgtggtggcacagggactccttgtggtgagtaaaccctgatttttccttctatactcttggccaaattgacattcattaaatgcaaaagtaaacaggataggcagacatagccattagggggtagaaacatactgaagaaaatgtggatccctgtcctttttaaaatagcatctttacttggtcttaaagctttgtccacatttctttgtgaaggatttgactgtgatttcacctaacatgaaaatccgctcaaaagtcatctttacacatgttagcttagacttagcaaatacttcatccccaaagccacagaaattggctgagcttaattccttccatataagcagtttttattttgcattactaaaattgtgaacatagctttataaataagttatttttttcagtatagtttgaaattaaagtttaagaaatggtttgaatcattccgtttaagtatttatttttctgttacatatgagtcaaactgaagatttaagatacttaattttctaattcaggaaaacatcttgatttcactactttattccagtttacttaaattataaaaggatttcactttcaaaaataaaaacatattattttgcatttttatttcagtagtgcttgtgtttcttcactcttccaattataccacaaatggctgaaaatattgagagagagcgagagatctagtctatgtattttgtaatgaaataactcatgctaatactctggcatgtttcaacactgatttgaaataactatgcagggattctcccatttttctcgctcatttttggtgccacatcttccttcttgatctttctgtccactactagatgttactttaatcatagttagcatattatcttcccctaaagaggaaaaggaaacagcttacccttgatcgtctttctctactgtataattcagtttctgtaagtctatgagccctttgaaacaactagagatgctctaactggtaaattgtacaatgtaaaattgtacagttaccagaaatacaatggaaatggaaatgtttgtaagaataaaaagtaaaattttggaaatttagctaatttggtttctgtaagggtggttttactagaaatttttaaaagaattctgtttaaatgtcttatgttgaaaaatgtttaagttttgttaaatacctgatgtaatattacttgtgtgatgacatacacccaaacctgcaaattagattagtgggtttttcactttgcccaacagtatgtttcacttgtttatgctttcatatggggttttcatcatttgcaaggtgaattgccagtaaccaccacttagccatttataagaactgtagcatgaaagtatttttcaaaagccagttcggggttgaatggcagggccttggataagcttcttagggagtttgaagtgcttatcagatagtcatctaaaaatatcctggcagagaaggaacaaataaactgattggttcaagttgttttaaccaggtaaacttatttgtgaggttaggtcttttcttagaaagaggctgtggtacatacagctgtcttttaagatgccaccttagaaacaattttttattttggcagcctttcttttttattaacaaggacatttatatgaaaacaagacccttatcgggcacggtggctcaagcctgtaatcccagccctttgggaggccgaggccggtggatcacctgaggtcaggagttcaagaccatcctggccaacatggtgaaaccctgtctgtactaaaaatacaaaaaataagaagaagaagaagaagaagaagaagaagaagaagacagaaatcaagacccttgttttttaaaggttctgcttcttgtattctttatatgaataatattcctcctgaaaatcacagtcattcctgcagcaaccaattatgatgttagcaatggatggaacgcttccaccagagcagggggtgcacagaaagcagtgaattcaatatgtgtatatcgtatatatatcataatagtccagtttttttttgcgttcatttttagaaataccaaatgatagataggtttgtttttttgtacagcaatttattgagatgagattgcggtacagtgataaagtatccagtgtaaaattttacagaaagatagtaggttctgagttgttgattcctgcaagtttagaagttctgttttaaaaagtctagagtgcagatgtttctgaagagcatgccttctggagccaggttgccaagtttccatccctgctgcaccgtgtgggaacttaatcactgtacaaccacaggcatgttcctgactgtcccttggctcatttgtaaaaccaagatgattaaataaataggattattgtgaacactgaaaggaatatatgtggagtgtctagaacagtgcttgccacgtagtaactgaattgtagcattaggtgtttctacaacttttctttgttaatttatcagcttggttcaaaaagtgtggtattatatcattttgggatatgtgtttccaatgtttggtagatctaatttctaactatggcttgtattaaatatactattccttcattgatatactaacacgttgttctttgattcaaaatatgtatataaagaaacacaattggatatatacttaaaagccctttgtctcaaataaaattgctctgactgagatcactcaactaagtagatgccatctaatacgaaaagctctaagtatagttttctactttaattagttatcaaaattattttcataattaacacaaattaatactaccctacttttagctcgtatcattttctttaatttataaacatgacttacagtctttaaacacaaaagcccatgactgttgatgatgtgtgactttcagtatatgctgagctgtgctactcttctgagtgggggctggtggctcacgtttgttccctgctgcccaagtggagacagtcacaccaaggccaggagctcacaagtgttcaaaacgtctcctcttctcagtgtttgaatgagaaatatgtttaagtgatcaagatccaattcttggcagatataataggtcttccattttcagtcttgtagggataagggcaggaaattatcttgatattcaggtagcccttggcagagatctgtgctctgggctggttggttgggagtcaggagatgaaggacattctttgttccctgaggagaaaaaggtctctctttctctctgtgggagaaagaggaacatcattggataaaagaaagtcatggtgaaaaagaaataatgacagagattgatcaactttggccgtgatgcaatctttcctgaagccttaacttcaactgctaagagtagttttacttggcttttcatacccatcttaagtcatgtgatctgacttagacacattctgacctctctcttatttaggctcattggtccagcccagtgtatttccagccacctttagcccttcgtgaacagtcttcacagaatttgtctgctttcagaatttctgcaatatcttagattctgtctgtaaatagatcagccaaattaatatctaactgaaaacatcatacagtgcacattgtagaaaacaagaatgagtttctgtaacaactgctcacagaattggtagagcatcattgtgaccttataaagcaatgtttcaagtaacagtttggaagatttacaaattccttcttaaactccacaaagatctttggaggaaaagcattaggaaagagctctggagaatatgtagccaaggaatatcaaatacataggtgactcagatggccaatggccatttagaaaatgagcccacccctgtattgttgcttagaacattgtcacaattggtggaaatgaagagattctgcagctcctaaaaaaaagtactcgggccgttttattgattgcactatgcataaaagctgacaaaacaagagacagcattttctgtcctgaggaatcagcctgcaacaggcaaagagaacgtatctttcccattcttgtcacaagaattttaaatccagtggaagaaatcttaaatttcttcttttctaatgtattttttgctctgtcttgttaagatggttcctttcacaatttaggtttagctccttttactctaacctcagaagtaaggagtgattcttctgctcatattaattatgaaaaaaatatttcaactgaagtcacagaggtctaacatttgtaatacaaaagctgtcctataaaccagtacaagaaagatagggagtgttcatatgaaatataaataactgttaaatatgtggaaagatgtttagtttcctaatgatagaaattaacggtgaaactacactgtgtacgattttccatcagtgagactggcaaagatccaaaagttgatcaaacactgtatcagtgccctgggctacaggctttctcatgacattgctagttgaggtataaactgtacccagtacagtgggcagttcagctgtttctatcaaaatttcaagtgaatataaccttggaattccaatttcaggaatttatcctacagatacactttcatatatgtgacatggcatgtagattgcatcatggctcataattgcaaaagactagaaatctgtcagttatacgttaaataaattatggttcatccacatagtggaacactatgctgccaaaaaagtatgaactcctgatgaacttatatggaatatcatgccgttaaataaagtacaaaatgcagagcagtatgcatagaatgtagcattgtgtgaaaagggctgatccagcaggctatgtgcagggattcatgattaggttaaaagcttatgccataatggtggaaatctgttgctggaaagcaccctatcagtagatacctgccctctgtgttcatttgttaagattgccaacatctaatagtaattcttacttaaaatctttatattctatacttggacagaaaattttacactgtcgagtagtcatttagtttaacctcccttgtttgaagtttttaaaagatcaacataattcttatttttacctttgtatgccagtgtatatcgagtaaagattattgtttttgtgagaacatacagagtaaaaattatatttttattacttcttgtatgtttcagggacagacgtttgcttcagcctgcccaggtgtgtgacattttgaagggtgtcattttggtaatctgctattttatgatgcactatgttgactactccatgatgtaccacctgataagggggcagtccgtcatcaagctctacatcatctacaacatgctggaggtaagggccttgcttaccccgcacaggcctggccagggcactcagcttcaagtcttcagttctgaaggtacctgagagtcaagaatgctctaccgactctagttatggtgcttctggcctttactgtgctgtcatcacttgggggctcttcttaaacatggattctgatttaggagatctaggctgggtctggagaatctgcatttccagggcggtggggctcatgctgctggtctgggacacacctctggtggcaagcctgcaggcatggcatgtcctcatgtaggctgggaagattcttgctgcccagacattttagaaccagtacccccttgagtatccaaattgtcaagtgctagggaaattagtttcacaacttcattagaaacccatgctagaactttaaattatgaagtaaatgttatgattatgtatatgtttgctgtaagaaatacacattttaagttgcacatttaaattcagatctttacatagggtaaataaatataagttcccaatttttgtaagtaatgtttttagtacaatatgtctcacttcaaagcattcagcatatgaaaatctgcatttatataaaaaataagttgagctgatatacattcactttacaaaaaaatgcttcgctttataagccagatattcacaagttttttaaatagtaagctaccctaagttatataataaactttgaaattcaaattgcaggccggcacggtggctcacacctgtaatcccagcacttggggaggctgaggcggggcggatgacctgaggtcaggagtccaagaccagactggccaacatggtgaaaccccgtctctactaaaaatacaaaaattagccgtgcctggtggcgcgtgcctgtaatcccagctacttgggaggctgaggtaggagaatcacatgaaccctagaggtggaggttgtagtgagctgaaatcgtcccactgcaccccagcctgggtaacacagcgagactccatctcggggaaaaaaaaaaagaaattcaaattgcgtttttatattttatttttggggggatacaataaggtctatttatctttctaattagccatgaagagatttttcctagtgagaggacagatggggtgggggctgctggcctttctgctctgaagctgcatcgctgtggtagacaaggactctccatctcttcacagaagccatggagctctagccttcctggtacctcctaaattcaagaccaagatgttttaaaaccataccccagctacctgattctaggcttgctgcgcgtacactttgccccaccaagtaggttgcctaggggtggatggggacaaagtttgtgaaacagaatagctcatcttgttctcccttccttctcatagaaagagcctaggcctcattccctgttcccctctgctctctgccttgctcttttcactgctgccctactagtctctccttcgtaggctttccatcttaggacactggaaagtgcgagggtttctccctgtcccctgacttacaaagccctctcaaggtagtattattattgttactagaaaataggccgagaaaaaggatccatgaattgctgactaaaatgatttatatacgtattcacattgcagactataattgatgaggtggcttaaacacagtggatgagagtccatgctctggaagaggcaaaccacctctgaccaaatcctagtccttcctttattacctgttatcctggacatagttactgttgctgaatatctctaatcctcagtttctcatctgtaaagtggagatactagggagattatgaggattaaatagacttcacatagaaagggtttagcacaatatcaggcccatggtaggagctccctaaatggtagctgttattcattcagcacatctttagttggcacttgctgcatgccaagcatcttagaccctgaagactcacaggtgaaccagcctattctcatggagcttatattctacaggtgagagatagacaataaacaaggagacattaggaaatgatatatcttatgatgaaaaagaacagactaaggcagtagagaccataggagccacaagagattggatggtctggaaaaggcctctgttaggatgtggcattcagactgaatcctgaatatcatgccctccttttctctcttttatgtgtcaatttttacctgttatactgtattcaaggagattgatacctgaaaatgtggttaggaagtaaatctgcatattttattccatataataaacctcaaaaaaatagttaccattatttacaaatattagatatgagtaggtcaaatgatatatttgtcctaaatttgaatcctgagtttgaatttaaagtgctaaaaccagaggaaccatgattttgatgtgcccaccccctttttttctttttttggttgagtcagagtcgcgctgtcacccaggctggagtgtagtggcgcaatctcggctcactgcaagctccacctctcgggttcacgtcattctcctgcctcagcctcccgagtagctgggactacaggcgcctgccaccacgcccggctaattttttgtatttttagtagagacggcgtttcactgtgttagccaggatggtctcaatctcctgacctcgtgatccgcccacctcggcctcccaaagtgctgggattacaggcatgagccaccgtgcccggccagatgtgcccaccccttttatttttgccactatttaagactttctttgttacaaacatagctaattagtctaactgaaattctatacatattttagccgttactatttgttaaagaataaagaaatgtgagtgaataagtaaacaaagatcctcactcctctttagcttgccttctactaggatttaaaacacagatctccaggatttgagctatatctcaattttagttatatatttaaatggaatattaagaaacatcttacaaataatttttttttttaggtagctgatcgtctgttttcatcttttggacaagacatattagatgctctctattggacagcaacagagcctaaagaaagaaaaagagcccacattggggtgattcctcactttttcatggctgttctctatgtctgtatccttatagacctactggaaatttccgacagttaatgcatagtctaccttattttatttggttagccattttatagatttaaagatatatagataatgtatgtatcctgaagattaatgtgaaatatttgtgttctgttgagaaattgattgtcataataactaactaatttaagagcctcatgtaggcattactctttgagctgctggaaaacagttctgtttgcagtgtaactgattataaggaagacttttataataaaaaggcagtgtatctttatacatacctgatatagatctatataatttttcgtacttatgttagaatttttcttgaagttatctttaaatccaggaattcttttttatgggcttaaaatgcatggaatttatctaaaagtgtaatgtgaaattggttgggaggagttttggtggttttatgtgtttgtgtattcttccctggctttaagcttttctattggagagtaagtgctttactgtataagcagtgtacatgtttgtgtgtacccctacatatttatacacacattcctgctcttaagttccatgtgaagtcaggactcattcacaagaatgagtcacttttttttttttctatctctgtaacagtgacacttgaaagaaattgggttaatgcttggaaagttaaagaaccaagttggaagatacctgtgagggtaaaatcttgttccagttttaatggagtaaagcagttaccactcttagatataaattaactattctgtatgtaatacaaatataattctgcagtttatggatatcttcaaaatgacatatgaagaagaatcttaattatcagatatttcctactgccttacattccacatttcctgaagactcagggaagaaaatcacttccagaattatattttgtgctttcttttttagaatgcaaattattttaattcagaatgtgtatttcttagtctcttctttcagtatttaccataatttattccatttacttaacaaacttttttgagggcctatttcctgagcactgtgccaagtgccagagatacagaaagaacaaaacaaccctgttgcaaaggattcatggtctaaataaatgaatgcatagaggtacatttccacttttgttcgtttcatgtggattgcacatatcctgtcaaacttatatcaactatagctaatagggaaattatgaagataatacaatacttattaagacaatttagaaaagaaagtcatctttattattcactttcaaaattttatagtattatcagtaataatatgaaagcaaatttaagttttttccttgaccttctattagttttgcatgcaattcttataatggttcaagcaacaactctcaatgtagcttttaactcacacaacaagtctttgcttactatcatgatgtctaataatgtaagtatgagatttatcttacatttttgaagttatacaggcatttcagctgcaatactctgggtgggataaaattctttgttctatatgttgttctcccggaagttttataagtagcaagtccagtttttaaactgttataatcataaagatggtatttctgtttactatttcagtttgttgaaattaaaggaagtgttttcaagaagtttgaaaagaacaatctctttcaaatgtcaaatagcggtatgtacaattagattctacttgaagttctgtgcagtattattttgcagttcattctgaaatcctaatggcacattttctctgggccactcttcagcttaaactgtaccttctcttatgctatcaacatctttactaggttttcttatttttggttcctgtaatcacaagatgtttgagataaaaaaattagaaacatttgtgtagcaccatacgctactttgagaagcttcttaatagtctagaaatttctctgaagtgggtggtatttttccattttatagatgtgaaaactgaaacacagaaaataatttgacttctccacagtcacatagcttctaggagaactatgtctataaatctcagattgtctctaagtccttagcttttttagttattatttagttattatttactgccttcgttctaatcctaaaaagtgtgaaggcacaaaatttttgtgcctggagtcattgtcttacatagtttttgaaagccagagccacattgcgtggtggatcatggagcccccaagaacagtcccaggggctctgccagggagtatgctcagagtcaaaagtgttttcacaagaatatgaagacattattcatctcttctgccatggtgacatttgcacaagtcatgaagaaatggtggtgttttagcatgaatccagacagatgtacaatagagaggacccctaaaggaacctggcttgatgatgtccttgaggaaggaggggtgtgttatggggaggcctgcagtcctgtcgtagataagagcacacatggctcatccaaagcagcgcttgtcagactttttggtcctgagaacccttttacacactttaaaaagtatgatgatcagccaggcgcagtggctaacgcctgtaatcccagcacgttgggaggccgaggctggtggatcacctgaggtcaggagttcaagaccagcccggccaacatggtaaaaccccgtctctactaaaaataccaaaattagctgggtgtggtggcgggtacctgtaatcctagctactggggagactgaggcaggagaattgcttgaacctgggaggcggaggttgcagtgagccaagattgtactagagcactccagcctgggtgactagagtgaaacgctgtctcaaaaaaaaaaaaaaattatgatgattccaaaggacttttatttatatggattatgtctctccctattcaccatattcgaaatgaaaactgagaaattttaataaaaatattacatgcttacaaaaataacatttcaataaaaaagatattttataaaacaaaatttagtgagaagagtttctcaacaagtaatgctggaacagttggataaaggttaaaaaaaaaagaactttggccccttccctgcccaagaaaattaattcatagtggttcataaccctaaacataaatgctaaagttataaaacttctagaacaaaatataggagaaaacattcacaaccttggtctaggcaaacatttttggagaccacacaaaaagtactaaatgtaaaacaaaagagagaaactggacttcttcaaaattaaaatatgtgatcataaaacttaaaaagtgaaaaggccagccacagtactaagagaaaagatttgagatgcatatatctgacgatagattttgtttgtttgttttctgaatatataacaaactataccaatcaataatgaaaggacaatctagttttaaaatggggaaaaggcttgaacagacatttcacaaaagaaaatctataaatgtccaataaggtcatgaaaagctgctcggcattattagggaaaatgtcactggagaaagacaaagccataatgagatagcactgcacaccctccagagtgactgctcttgtagcctgacagtgccacaagttaggatatggattaactggcactcaggcatcgatggcgtgagtgtaaagtattacaactgctgtttttggccatttcttttacagttaaatgttcacctgccctgtaattcaggaaatatatttcctcagtaggacttgttgcaagaattattatggcagctttgttcatactagccaaaaactggaaacaacccaaatagctatcagtaggaaaataaacaaactgtatatccataccatagaatactacttagcaattaaagataaaagaatgaactcctaatattgtcagctatgtaggtctcagaagcattatgttgagcagaaaagccagacacaaaagtgtacatgatgtattatttcatttatatgaagtttatgatcagacaaaattcgtttatgatgataggaataagaggttgtttgttgggcatttggattgactaaggggactcaaaggagctttctggatgatggaacttctttctgtattaagggcttggtgtctcaagttatgcattgatcagaactcatcacataatgtacttaagatctgtgcatttcactgtatgtaaattttacctgtatattagacaaggaaaataatggcatatgaatatgttaaacaagttataggagatttgaaaactaagcaaggaacaaaaagaacaaatggaaaacttgaacataaagcctagatgattctatgaggccatgctggacctgactctcaaggctctgagaagcagttcatattcttgctgcttattaatgttgctcacctttcaagtgcagactgccaagtgtcatgaattagaaatgaaagaggaaggagggaaggtactaaattatagaatactttgcttcagtagttaaccatagagtaaattgattcaactgtaagaatttcgtttgttgtggaaaccatgttttttttaaattaattcatattagtaacctcctttgggtaagtgctctttatagagccttaaactagacacgcagatcttaagttttaaaggttttcaatccttgtgtataaaagcttcaaaattatgagggggaaattgtgaatgtttttaaccttatggccagcatgttgatgtaattaataccccttttcatttttataaacgggttccccagaattccaacctcttagcttagaaagattaggtattcaatatttgagttttaagaaaactctgggaaaaaaaatgatataatgatcaggtatgcatatcagtctacaagaaatttggactttattttggcttaaaatggttactacttagcaccaaaaaaaaaattactttttgctgtaagcaaagtagctcatgttacaatgcaaggtggtccgcattgtaccctttaagagttttataagaaattaactttaccctaaggcagattttaagacccttctcaagtaagaaaaaaaatattctaggcaacgttcagctattaaaatggaaagatcaggagtcaccaagaggtgctttttactctttatatgaatatgttgccttcttcatatgcttcagtagtagctacttaatgagagccagtcaggagggatactcatatcggctatttttttcttatgaattttcctatgaattttttctccatcagaatttgagttgccagatacgtagtgtaaggttcagtccttcatgctggtttaatatagaagacttcatggagaaatctgagagtaactttacccctttcagtggtagctcactgtatattttctttggaggaattgcctgaggacatgtgaaaagtagtttagttaacaaaaccagatttttaacaaattatccttttcttcacttcattttaacataagcgttagctgaatgtggaaccccagcctttctggtttgcattcttgagatgaagaattttaggtagttttttacgcattggtaatgtgaactgtgcatttagaaaggtccttcaggagttaggttgtctggagtaagcttatagctcacttagcactcttagaagcctgcatatctgcaataaatgtggatgtttgttggaaatagtcactcattttatatttaaaatgtgactgcaagtatgttaaagtatatccctgttagtggtaatatagcaaggaaaaagcttaataacctgaatgtcagaaatattttaaaagcattaataccaatgtttttaagcttcttaataaaggttaggagaaaacattcctagaaattttaatttttaatcaatgtaagagttcagttctaatccgaaccctgactattctgaagatgagatggtataaatatgttgctgattgcattatttatctaatatatgtttgattatcagtatcagactctgttattctcataaaaattttatttctttttatatcttactttggagaaacttaaaatttgggtattttttaactcaaattttaaaagtcaaatcttgattttataatgtctatgtaaaacatttaaatgtaaaagttgtgaaagtgtaagaataaaacttccaaaaaatcttcacataacagcctcatttttatagttagatatagttttgtatctttatcttatcaaataaagatagagttaatttttatggtgtcactttttaatctttaagcttgccatccttcacatccttcatcttataaaatcgcattcatttaccaaatttatccatttttattaatctctatcatattttgaaatagtctgcttttctaaaatttgttttgggccaggcacagtggctcacgcctgtaatcccaacactttgggaggccaagatgggcggatcacctgagatcaggagttggagaccagcttggccaacatggtgaaaccctgtctctgctaaaaatataaaaattagccgggcatggtggcacatgcctgtaatcccagctactccggaggctgagacaggagaattgcttgaacccgggaggtggaggctgcatccagcctgggagacaaagcaagactcttgtctcaaaaaaataaaaaaatcttaaaaaataaaatctgttttgccttaaatacacctttaatgagataagtttttccccctttcatcagtatccttagaaatgaaattattgcagattttctctatacttgcagctgccatatgtccaaaaatcaaatacaattaatttaaattcgatggtagttttgctttgttagagtttacaaaagttactttggctcatttcagatagtgttttaaatttctcaaggccatttattttcagataattctgtaatgaagcaagtctatattatacatgtttgggaagtatcaaaaataaatacatttcattgttaaattcatttatggaaattagaaaggacttagcacacatataggtacagcttggtgaataattctacagaattccaattaaagatacattggtaaatttaaccccatgaattaagatccacagttagctgtagtaacaaagaatatattttgtgtcagactttgatggaacttattctagggcagacttttcttagtttcctttaacctgtatcctcttttgaagtcacagaataaattaaacatgtgatctagacaaatcaaaacaggtgcacctgaaaatccacatggccttgctccggaggtgccctgcctcctaaagaggcatctcagtgcttggtaccttgagactcactgtgccctgagctcacactcataataaatagtgcttcagctttggaaataggaagtgagtagtgcccactgggctttgagggagtgaaggcacagctcagacccatcactaataaggaggtgagctaccctgaaaaagaaggtaccagcaactgactggaagagcttaaggatgtagggaaggtacagagaataaaggccaactcgcttacagagaataaggttttgctgtggaataaaagtttgtatc

SEQ ID NO: 1644 - DNA, 1041 bp, Homo sapiens
cgtcggcgacgcggccgctccgggagaaggcggcggtggcggcgtggacggcccgcagcgggacggccgcggcgaggcggagcagccgggcggcagcggcggacaggggcccccgccggcgcctcagctcacagagacgctgggcttctacgagagcgaccggcggcgggagaggcgccggggccgcacagggacagacgtttgcttcagcctgcccaggtgtgtgacattttgaagggtgtcattttggtaatctgctattttatgatgcactatgttgactactccatgatgtaccacctgataagggggcagtccgtcatcaagctctacatcatctacaacatgctggaggtaagggccttgcttaccccgcacaggcctggccagggcactcagcttcaagtcttcagttctgaaggtacctgagagtcaagaatgctctaccgactctagttatggtgcttctggcctttactgtgctgtcatcacttgggggctcttcttaaacatggattctgatttaggagatctaggctgggtctggagaatctgcatttccagggcggtggggctcatgctgctggtctgggacacacctctggtggcaagcctgcaggcatggcatgtcctcatgtaggctgggaagattcttgctgcccagacattttagaaccagtacccccttgagtatccaaattgtcaagtgctagggaaattagtttcacaacttcattagaaacccatgctagaactttaaattatgaagtaaatgttatgattatgtatatgtttgctgtaagaaatacacattttaagttgcacatttaaattcagatctttacatagggtaaataaatataagttcccaatttttgtaagtaatgtttttagtacaatatgtctcacttcaaagcattcagcatatgaaaatctgcatttatataaaaaataagttgagctgatatacattcactttacaaaaaaatgcttcgctttataagccagatattcacaagttttttaaatagtaagctaccc

SEQ ID NO: 1645 - protein, 54 aa, Homo sapiens [sequence omitted]

SEQ ID NO: 1646 - DNA, 201741 bp, Mus musculus
  misc_feature (1)...(201741): n = A, C, G or T/U
ctcccgcatagtatctcattgaggagacctgggtttgaggggcataacaatgtcctgatgttcgctaagccctcctgccctggctgacggaaccccaaccattaagaaaggaaaggatgattcgacatagcacaactgatgaacttctgaagtcttaattttccaaaagatcggagttatttcagtttttacctgatggtaaatggacacttgggttgacttcctgttctcccttcaggaagataggagagaaaaagagaggaagccgaaaagattccgagaagggagaaagcaaagacctatcagcactgagtcccaaggccgtccatcacaggctctgctgcacgctggaatctgctgagtacctaggacctacctgtcccctcacatgcagcatcaggtgagccatgtgacttctgtcctcgtcctgtgaaatacaatccaggaagctgaataagtgctccttgactgctggatgccgctcagtatggcaggtaccacttcccctgcctaggactgtggatagcagggggactttggtcactctgtgatcttgaagcgttaaggaagaatttagtactgatttgttaaatgctgtcacagactttaaagagtttttaacatcagacgttcttaacagatctgtgtatagactccaaggattcattcagtgaactgcaatgaaatgcaaggcatttacaagttatgtgtagcagttcttattacaacttaagagtctttccctgcattgtcagcatgggaaaatacatacatataacaaacaggggagctggtatatatatctataatgtcagcatttgggaggatcaagaattcaaggccagcctaaactataaattgagactgtctcaaaacaaaacaaaacaaaacaacagaacaaaacagtattaaataactagtagatagcaagaattaggccaggtgtgatagtgaacaactttaataccagcagtctggaggcagaggcagaattgctgtgaatttgaggtcagcctggtctacatagtgataggccagccagggctatatagaactctctctctctctctctctctctctctctctctgtgtgtgtgtgtgtgtgtgtgtgtgtgtgtgtgtgtgtgttattatattaattctaacaagtgaggagcatttaccccaactgtgtcccgttttcttttgtcaggagattatagcccatcttgggatgttattgtcattaaatactttacataatgtattgtaaggagaagccagagaaagtttctcttagcccccttctagaaagactttctctgagcaactggctggcagccaggtagactccaggcagatttggtgtgagttcaggttttcttgttagggtttctattgctgtgacaaaacatcatgaacaaaagcaagatggaaagggaagggtttatttggcttgcacttccatagcacttttgatcattaaaggaagtcaggacaggagctcaagcagggcaggaacctggaggcagggactgatgcagaggccatgaggggaagggtccagtgctacctactggcttgctcatggcttgctcagcttgctttctaatagaacccagggtcatcaatccagggatgacaccacccatattaggctgggtcctccctcatcaatcgttgattaagaaaatgcccaacaggttttcctttaacctaatcttacagagactttttttttttcagttgaagttcttcctttcagatgactctagcttgtgtcaagttgacataaagctagacaggacacgggtcattttgtgaatcgaggcaacgattcaaagtggttctttctaagccattgccatctggtaataattgccatccgtaaaagacaaacagacagaccgagacagccctgtattctgagctgacagccttcctactttagagatattaacagtttacttattttgtaaaattgtggtggcagtcaatggtgagatttgagttttctcctattttagttttcattgtctttacttggtttaaaacagaaaaactgctcgataggactcctttgttaattccaggtattggagaaattttattggctcagaaacccaaagaaaacttgtttctaatgtactgctttgttccatatcaaataataggcttttctttcttccatctgatttcttgtgtgtgtgtgtgtgtgtatgtgtgagagagagagagagaaagagagagagaggtgtgtatgcacatgtgtccttatgagtgtaaacagatacatattcctgttgtcttgaatgcatttaacataaattttttgatcagggggctggtgagatggctcagtgggtaagagcacccgactgctcttccgaaggtccagagttcaaatcccagcaaccacatggtggctcacaaccacctgtaatgagatctgacgccctcttctggagtgtctgaagacagctacagtgtacttacatataataaataaataaatctttaaaaaaaaaattttttttgatcatttttgagaggtggctgtcagagatgagggaatgaataagtaataaatgcacagaaaggagacaaaagacaccagcctgcgtcacgtggtatctagctccacctagcccaaatgctcatctcgccagaacatgtatactgtctccactgagtacagacctttgtcatttctctgtctcatcttctctattcctttcagtagaccccaggggtgtggatgaggtgccccttgcccttgttctgtaagcttagagaatttaagggagttatctaaggcagaagaaggcaggggggaagttgccattttaaaatagctgcaagactaattttgcctttgagtttaactctttttcctctagccctattactactgccttctaagttgctgggttttaagcatgctatttcacagacttgccttgtttgttttgctaataagaaacatggagggtctggttattgcattggctttcctaacagtcttccatattaccagtagtcctggtccatctgggctctggctgggctgtgatgttaggttctatagaaccagggttcccttgaccagcacatagcgaagagttgtgttgtagatagcctcctttggatgacatctactacataataattcttattgtgcaacagccttatggtgggagttagtttcatgactcagtaatttccttcagcttcaagctgagctggagacactcagcccttctcctttagctgtttctaagtatatcctgtaggatgaatttctgggctcagggaatgtgggtcaacttagagaaatagtgaagaaggagctaccatttacagagacccctaaactcacaggtcagttccaccaaggtcttggaaggccttctcaaccagaagagatggattggtgagcaatctccacatccttgtgctgtctgctcaagtgatacatggaatcatcaggtagatacagatgtagcatcatctatagctcctgaaacttttctaattcagttgatgttttcctaaagaccacttgctaaatattttagttttcataggttataggctggtcagcctctgtctggattttaggggatcaatattcttggtgtgataatttttctttttgtcttatcaaagctatttagccctacaaggtctcacatatcctgaaccttccttctctgcctctgcactgtttggccagttgtatcagactgtgaactcatcctcccacttagggcatgagatgcaattgctacctaggtcagaggtaaaaaactgggagagacattttggcccctgtgtccttgctagtcctgtctgtggctgtcactttctttttacaagagtcacgagacaacttttactgtgtgtcttttgtgcgacactgagatttttgtttgtttctaacataggggaccatcaggactgtgtgtctttttatgcgggtctgtgaaatcatattgtgtcaaacaaacctttgacaaaccttgcttccaggagagggctcagtgacttttcattgtctctggaaattaggccttgtgttgatagctaaccttgcagctcccctggggcaggcagacatctcagcccagctggaatcttgatgaggttcaaggtcctagaaagagtcagtgaactctctaaaaccatgtataataatttttttgtttgtttattttttgagacagggtttctctgtagccctggttgtcctgggactcactttgtagtccaggctggcctcaaactcagaaatccacctgcctctgcctcccaagtgctgggaggaaaggcgtgcaccaccacgccccgctcataatttttttaatgattactttttattacatgtgtgtttgtgtgtgtatacatgtgcacacacatatgtggatgcatgccagtgtatgcaggtgtctggatttcctggagctggagttacaggtaggtaggtggctgtgaatcaaactctggtcctctggaagagcacaatgtgctattaacggctgtgccatctctccagccgcatcatgacttatttccatccattctctcattcagcatatagctattgagtgcccactatgtactgacatctagtataggccttggaaacacagcagaaactgcaacaacctcctttgctcctggggaaagacagatgacaaatgagatagacacttcaccagtacaacataggagtgggcaaaggcactagagaaatgaagggcaataaagatagaaagaagtgtgtgtgtgtgtgtgtgtgtgtgtgtgtgtgtatgctcaacaatacctccgttttcaaaaattgatccgaaaggccttctagagatgatacaatgtgaagtactgaagaatgagagtaagtagaggacagcagagacacccgagggcaggtcaccctgggcagcgggaagggccctgatgcagtcatatgcctgtagctgtgagtgacaaggtcggtgttgctgaagcggagtcaatgaggcctgggagcaggtgatgaagtaccagggagagagtggggcacagaaggggaagagatgtcatcacaatataataattgttaagtgtcaaaggacaaaaggctgaggtgcctttttaacacatcaaagcaggcctagtttccaggttttcccagcatccctcaggtcctacttgtttcagggtatgggtgacataccccaccctttaccctgaacattccagcccagacactggactgtcttttccctagaggctcttccatatataatctagacattttggttacctgctcttttatgtcccttcggctttctggctgctgcacctccctcccctctccttccccttcccctctcacctctcccacgtggcccagctcagtctggtcatgtccactctggactctcccagatgtccctgcctccagctatgccctttcatctataataacctttctccttcactgtacctaagagcagtaatgccatttcttttttattcaataattataacagtaattagttattattttatgatacattaattattaataattattatgttaccattatttgacttctacactgggaagtttaaggagccatgggtgacccaactggtactttaacagattcttcaacactgtgttgagaatagactaaagacagtgaggccgggcacaggaagctgctatttagccagctactgcattccagctgagatttctccggaagcagcaggatgacacacaggctaagatgaaggggatcctgcagggtggaaagtttattcagcttacccactttgggtgaaataaattgattagctgcgagaactcacaaaaagagtcttgttgagcttagctgaatgcaaactttcataatgaaggatggtgtgccacccgtcccatatgtttcctgtcctgtgcactgtcttgtgtttcctgctcactctcataatgtgctcagataaggagtgggaactccacacgaaggctggatagtatcagagagatgcacagagcatgcgcgtagagccgggagaggctgctgaaaagggaagtggagctagctcgcaagagttttatctgctttgtccataaaaggagatcagacacttcccagaagccctgtacccgggctggagtgtacattctgtctgttttcactccacatagatttatgttgccccatccttagcaaatcccagttcttcacgcagtcagtcagacttcggtttacccgagtcgctgaaattcaaaatctgcctgctctgtttaactttttacaacacagtttgtcattcctggacctttcagaaagtaaattcaacgaaccacatcgaggcaggtcagtgggtatggctttgctcttgattttaatctgttttcctgtcatgaaggatggctctggtagctaattaagatggaaggctatgacctgggtttctcttcagaagcgaaccttaagctggcactggcagggtgacaagtcagtcagctgggaagctgcctccttccagtctcctatgtttacccactgaccatggacttgctcaggagcctggccacctctgtgtccagaaagctaccagcaggccatgagaaccattttgtcaacctaggattctatccagtgccgtctttgcttttgtttttactgagaccacttttggaaagggaccattgattaagaactcttaccttaacgtgcacattttgaaactaagtatacatttattgtgaactcttaccttaacgtgaacattttgaaactaagtatacatttattgtggcaataattaggatttgatttcctcaggaatataaacattttaaatacctatataatagatttagtaatagccaggtttggtgtacatctgtaatcccagcactccagggctgaagcaagaggatttcaagtttgaggacagtttagactccgtagtaaaaccctgtctcaaaaaggaaaatcttctgttattttgttttaaatattattgttttggggacagagtctcctatggcccaggcgtccctcaaactccttgccttcctgcctctacttctgttttgctagattccagcaaccacccttggtctatgtgggtgtcaaagccagctcttcacacagcttaggcatgcaatctgaacgagccacatccctggcccctgtcatttaaaggtcttctttctacattagccaaagactagatttaaaagtgctccttttacgttttaaaagccaagtggcctctgttttctttgtctctgggctttctactggaaaggtaagttttatttttctggagcttacagctatcttagagctggtattaatattgctagtatttgccaataaataattaattatactgcaagtgactaaatttggagcataggaatgactctctagagggagtcctaaaaagaatgctgtactcagaggttctgggggcagggaggcaagtgaagagattgtctaaaggcaaccgagcagcatccatggctgatagaggtggcttttatccatcaagccagcaagacagtctatccagggacctctgggtcactaaggccatctaggagcccctgtggggaagagctacacacacacacacacacacacacacacacacacacacacacacacacacacacagagtcaaccagcccaatgtcatcccatagcccagagggaactctgctgctgcacttcagtctcaaccccttagagatggccttaggggctctgttggaactcctgtgcctcaggaggaggagccacttccttcctataacaagaacgggtgcaggtgggtgcccagagcttggctggcactgctcacagtgagactacagatttctcttcctgtttgacagtctttaactctgcaaaccccacatgccagccttgatctagagattttactatttcttcctgagctgctggaacccaaagggtgaggcaggcaggctgtctcctgaggtctacaataagtcagttaagggttgttttttttgtttgttttttgttttttgttttttgtttttttttttttaaagttccgaattctttattgtgtgtctgggaactagaaaggtgatgtagagatagctgcctggtgcctggtacatgggcacaacacttccccaggccaggtcagggttagcatggtttcttgcctctaaggtatacatctctgagctggaatttgtgcgagcttatgggggaatgaactgctccccctcctcccagcaccagctggagcctggactactaggctactctacccaggcactgccttcctttaccatctggtctctacttgactgctaagccttcctgcactccagaatcaaacgttttgcagggaggaggtggcagggtgaggacaagataagggaaggaaatggtagatgaggtggctctggccctattctgtaagcatgctccagaaattctctgtcccttctatggtggagactgccaggcagggtagttaagcaataggtccaaatgtggctgggatgctccttcaatggctggcatgtcgcttgtcttgacgtggtgaccttctggaagtagccatggtctgtaggccacagagcgggaaggacaacttaacaatggggttgaagataaaagcatgaaacagtgatagtatgatgctgaagacgatagagtttagctggataacctgatcttttcctgcggagcattttccacgaaccaatcaacactcttttccttagactattcctggctatatctattctcattcattctctctctctctctctctctctctctctctctctctctctctctctctctctctctctctctctcgatctgaaactaggaagacaaactatggtgtaataaagaatgaactaaccccacatggcagctacggagggctctagatacaatccaagccacgtgcaccgctcacttttcttggatcccttctgctctttggagtgagtctgcctctttaacttgcgggaatggtgctttgagaggtttctgtggctctctggcgtgcacacagacgcgcagtgcgtgcgtgtgtgtgctccgcacgcagagagggaaaaagcgcgcggtccgggctctgcgtcactccccgcacctggccagagatgggtttagtagaggctaatccgcggagggcacttcatcccgggtgtttctctgagtccccgattttgctgcctggagtgccagcgtcccatcctgcttcggttcctggttccccccaccagcccccatcctgccattcgaccccaatgcaagaaggatgaggcgggggaagggctggtggctgggtggcctgcgggtacgctgcgcagtgatctccgggtccgtttcggagggtgcgtgcagagaagcaggatccctcagggagcgcgggctccgctgccacctgctgagaacctcgcacgccaaaacagcctcgggcagggctacctgctataaataagcggtcaagagcccggtgtgtgaccacacatcccgccgggagggccataatcacttgtgagcacgcagggaatattccgggccaggacttcgcgctgaggctggatggggtggcgatgcttgcaccttccccgagctctcgtggggtggcgcctggtggcccctgggcgggctgaggatggaccgctggggagcgaggggagggaggccgcggaggacccgcactgcagcagctgttgctcgcctgtgactcgccagtctgggccgagtcgcctagccagagtcgcttggtgcggaggggaagggagggcatctactcctgttcttggctcccgggggactcactagggagattccggctgctgtccccctcccccgcctctgctttccccagcgctcgcccagcccgggaggaggaaacgcgagcgagccgcgcgcagacacctcctcctcctcctcagctgctgtcgccgccgccggccacaccgcggtgcctgttgctgcaagccacctcggaccgaccgtctcttcaacccgcaagagaagcagagactgtggagtggacccccaccccagcagcgtggggcggcaagagcacagccagctgaggaccatggacgccccgcccgcccaggccatcttctgggtgcccgggagcacctgcgcgccctagctcagcccggagttctgagcgtgccacctcactggtaggttccaccttgggtccttagggtgcggggcaaccctccacttccagcatgcccctgagctcccttgctgcagagaaggcgcggtcccgccacccaagggcgttgctgccgggtctcttggggtgctctggtgggggagggggaagaggcgggatttcagagctaccttgttgtcctctgcttgggggtgggggtgggggagaaaccttgatgctttctgcgctgcgacgaaggtgctcaggtcccctgctcctcctccttgcatatcccgccccactccctcccgccaaatatcaccggggcacaagtgtttgtaaggcatccagctcggacgaggccggtcagagtgaccccaggccgccttttgaaagttcagggtactttgcagcggtaactttggcagcttctcggtgcacgcaacatttctttctatgggcacatcctgtgctggtcattttgaaacccggcttgattgtttcctagcagcttccgggttgctacgtgagtaagaggctcactctaacttcacaggttgctgttctcttcttttctaaaagatgtgtcgttctgtttgaaccccacctaggtgtggcgttcctggttgtgattttattttaaatgccttgttctccggaagttgcttaaaaaggaaaagaaattgaaagtgatgagtgtttctctcagcaaacatcttcagcgccctggtactgatgatggcaggcattcacctcctacgtacaaccctccttcgtcctcttagtggctgcaagccgttcttctatttagagccaggtgttagaagggaatttttgaatgacctaatttaaatgggtcacacccaggaagctcagctgtctctacaagtctaaacttctaaactttttgcgttgcacctccatgggcaaagatcccttttaagaccccctcgatgtgaagtgggattcccatgagttggagaatggccacacttaggctttattgtttgtggagcctgctcaaggtgggaggggtgggatgggagaaggagagggcagctgtacccaaaggtaggaatgtatcacttttcagggtctcactaccttgcctgagagctcgctgaggctagcgagttcttttctcttttctcagcattcacggtgccccccttctgcagagtcagttcctccctgggaaccctgaggactttcttaaggaaccaggaagaggcatgaaaagtacataaacgggtgggtgctttgcaaaactcttagcaatgggaagctgagcctctgatgtgcctgtctttaatgttcgttcctatcaagttaaagggaccaactctcttaagtttatctgtaagaaaccattgatgtgccgtgagctctactgtgtggtagatgctgcagtgagttagctggtaccccataaaaggctgcatgtatgaactaatgaccaagggaccaaatgtggtgcaatggacagtctgaaaccagcagaggaccattaaaagggatgcttttgggggggggtgtggatttgttcagtcatttacaaacccatagaaaaggggaaaagctttggtgtagttatgacttattaataccaaaggagagctttgcagtgggcctccctgacacaacctacccttatctgtcccaggagagctcgagggttccctgataacccttctaatgtataagagccttctaacatacaagtcccagtacccgaggaaacctggaggcgatggatgggtgtctggaggaacactgactgcccccctagcccttcactacctagcctttgttaatctctgatccttcattcctggaagacctggactaagaaggccccagccgaggtgcagagccaggtgttggtgggagctactttgtgacccattattttctagggtgtgcccctagagaaggactaactgatgcccctccttccaacagctatttgatagactaagggacaggaggacaagaaggatgcttgcagggtgctgtttcaaatgtgcttctcttaaatcagcaaatgaaaacttccagaattgcccccatcccagtaggccccagtgcccaaagtttctctagtctcaagaaaacttaaaacacttacagacacctgtgtgtgtgtgtggtgtgtgtgtgtgtgtgtgtgtgtgtgtgtgtgtgtgtgtgtgtgtgagacagttattttgccttgctctttctgtgtctgctttcctacccttctcaagtttaacgactgaggtaatcctagaacttgatctgtccctcatccttgtcaggcctgttccttgcacattaaacttggagaagcacaatctgtccattaaagtgaccgaaaggctccagcagcaaccagggcatgcaggattcacatcccaggagcgaatgacacggactttgtcttcagagctgctcctctgcatgttgctttgccctccttgcgcccccctctccccatctccttctttcttaactctatacatcaatgaaaatattttaagagaagactcttcacaaaagacatgatggtttccacagtcaagagttttgatattttttcagtcaaaaattcagtttgataggttcgtagatctaaaggcaatggacctcttctcagactgcaaatatataggaaagttttagattgtatgaaataatcctgatacttaggcttcagtgagatcaaggagagtgtgggaaatatgtcttagtactaacaaatacatttaatgctgagtttgatggatatggagataatagcaaccagttctctcttacaagataatacctatcttgggtgtggtggtgtgtgcctgtaacccttagtactctgagaggaagaggcccagaaggattaaggtccattttggctatgtaataagtttgtggccttccttgattacaggccattgtagccctaagcctccaaaccaaccaaccaaacccaacccaaagataacaagttcattaaatttcagcaaatcactattcacttcttaacagggtggtacacacctgcaattccaactactatagaagctgaggcaggaagatggagagtaagacagaatttcattttaagacaaaatattgcttaatgaaaggcaaaagggactggggatatagctcagttttggagtgtttgcctagtatggatgaggcccagggtcaatacctagtataaaaataaaaacataacaaaacaaatattatatggaatagatggatctgtactttgcaagcaagacaatatttatgggcttgtcagaatttatgaacataaacatttagagtacttaaaacattcctggaacctaattaaaattactgccatttattactatgcttatttactttatatcttaactctgacattaagcttgaatttctaaggccatggaaaatgcaggtagaacaaacaagccaccccaactagaggatgcttgaggggtaaccatactatttgagtgaaaagaacaggagttgtacacaagacaggtcgggattcaaatcccgccttccccatttattagggaggtaaccctttctgtgaagtaggaagataaagctgagcccctcagttgtggcagtgcaaaagggccaagaggtggttagccacaagtgtccctccagcaatgaagggtaagcatgaacccaagagccaaaagaaccaggttcaaatcccgattctgtacttaagcatttgaacttggcaagtgccctcacagtttcttcactcagttgtctatggtggcagtgagttaagtcagttggtagctacacagcactcttttgtgttgactgttgttactactcaaaggagacaggcaggagggagggttattcacaacctgtataacaaagtgtaagataatatcggtagggtacaggactggcttcaatgagctctgacttatgtaagaagccattccaaaatgtcatcacttgacatatcaaattagagaggcatacctcgacactcaatattcaagatgctgaacaggttgggaatcacaggcttctgtaactccatgtccacctctgtaaggaccatctttatctgatcactgccctggctggggccgggagaagtgacagccatggtgtcatactgtgtgtaagcggtggtcatactgtgtgagactggagtacaaggttggaatgcagttcagctcagacccacttgatttaaagaaagcactgactcataggaagagagtggccctcaggaaatttcctgcttcttccaaggtcccccaatagctaattgatgttggctatttcttaacctggttaggaactggaggcaccccacaccccttttctctgcctctttcttttttgtcttaattgttttttgtgtgtcactaaaactcaaatacctgaggctggaaattctgatgttcaagacagggactcagtgtatagccctgactgtcctgaaactcactatctagaccaggttggccttgaactcacagagatctacttgcctctacctcccaagtactaaaagtaaaggctcgcaccatcataccctgttgcctggatactttttaaagggaggtggggcggtatttggcttacatttctggtgaggagatcccaaatgccctatgtgttggttcgtttttatcaacttgacacaaactaagaatcacccgagaagagtgactcttgattcaggagctgtcatcatcagattggcttgtgggcgtgtgggacattttcttatttgctaattgatacgggtgggcacagcctctactcaggtggttgtaggctatatactaaaccaagctgagcaggccatggagtgcaagccaataagccgtattcctccatggctgtggcctcaatgcctgcctccaggtttccatcatcttaagctcttttcctgccttccctcgttagtggactgcgatgttgaagtgtaaaccaaatcaaccctgtccccctcaacatcgcttttggtcagtgtcttaccacagcaacaggaaccaaactaggacatcaaggaacagacatgttgtaagggcaccctgactgcaacataaccccgtgagtagcatcacacggctgagggtgtgtgaggagtagagatcttgagtgaccaggggaagtagcaaagaggggatgggatggaccggatcccttttgtgagaccccttttgttattcttgcagaagtaactcaccatgagaggagtatttatctcttcacgacaggggggaggggactcaatccaaacaccaaacaccgacactaggccctgcctcttaaaggttccaaaccttttttaacaccacacaccaccactttgagtgccagtcttcttgaacatgaccctagggcattcactcaaaccacactgagccctggtacccttctgccaggatttgggcagatgacagctgaaactgcctaggctggctattgaaaagttccatcctaccctctgtggtttgctgggatggggtgctgtggagccaggaagaaagagggttcccactgtgcagctggcacaagagaagtgcactggcttctcttgttcttagcattcgtgtacttcccccacatttttgttcttcaacctaagacggaaacagctttataccctcacacaatgtggaggacatttggtatcctgcattatggaaattgcagtcaccagattttttagaaacagaagaaacttggagatgatctcattttattctcctataagaataaacttcagattcggagacgttaagagactcgcttttttaacttcactcttgaaagtgttctcatgggggaagttgaggttctttccagcctgtggataggagtcaggggcttggactgtcccaaatctgtcacttaatttagacaagccacttctctagaacctagtcacttcgtttcctatatgaggtaaattcctaaatggcttaaaaggacctggctctctttaaagttttatgatcctaagtgcatcctttcaggggtagcagatctccttaacaagagtgttgaaagggtttctggaaaagcatgctcttgtgtttgggtggctatgtttaaagattatctgggaggtttaggcttgcacacatgtgactttactaacaggatcctaggaacaggtggagatgtttactgctatggggacaagacagaagggacctcacaataggtagttcacttgggagtttgaaatgcaagtgttaattcctgaaagtgaggtgacttgggatagttctgaaaacaatgcggtgatttgctaatattatggggtatttcatttatttcatgacacttttgattgaaacgtaatatgatcatttacctagcctaagttattctgaatctcgttgtgctatttacttttcttgttgctgtgacaaaatatcaagcagaagcaactgaggtgggggaagaccccattctggatcacaagctcaagaaataccagtccatcatggtggccagagttggccaacctgtgttgctgtgactgacaggaggaaaggggccaacctgtgctgtgggaagcatggtggagctctttacatcctgacagaatgggaaaagagcatgggttgaaaccagaggtggatatagccttagtgtcctgtccccagcagccagctgacttctgtctccagctgctgggccacacatcccaaagatcatacaatttccccaaaccgcagcacccactgctcagaacaggagcctgtgtgtgtcagttgatatccaaaacgcaacacttacgttagaataatctgaattactcagaaataattatgtgtgatattgcgcttcagtttgattctttttttctgagcagtattaaggtctaaccgctttcgccaggagcccacgcaggtggctggaaagggaagcatccaaagcattcaaatgcttttgccaagaaaatggcagaactaattcgacgagtgattgttcactgggaggctgaaatgacaagaaagcggagacggattctgtcatgcttgctgccacctgatttataagtgcattacctaaaataattgatagacctcaggtctgccctttgtgctaattctagagtttctttaaacacgtcttgagattaacagctgtcaacggttagaacttagggcagattcagttaccgggctggatgtcaagccaggcttttacctgtaaagggggagagaacatcacttactggattatatgaacttttaaggctacctgttacatgaaaggctgtatgccagagtagaggatgagagggagagactcccactttcataaaatattttcaggtatatattgccttattgttacacggctatctttatgttttaaagatagcaatatttaaataaagtaatattgctttattgttggaggtttgaatatttaaaataaataaaaaagccaacctatagcactggggcttgagaggttcctcagttaagagttcataccactctttaagaagactagagcctgatttccaacacccactttggttgcctcacaactgcctgcagctccagctccagctccagggagacctgatacttttgacctccaagggcccctgcattcatgggctcatacccacatacacacacatacttagaaataacaaaaatacatcttgaaaattagttctaagctatgttcaaaatacaaaaatgttacttttagaatacatgcatatatatggatgttcatatatatgaaatatgggaaaacagagtaaagaacagacttcattttgatcttagaaaaggtttagaatttgaatattgatttttttctaactccaaactttaacagtttataaagcttgcaatcctgttgaaggatgcctattcagactcttaaagtaaacacaatgacaagcctcagagttcagtaatggaaaggacgtgctgctggcggctctgagctactgggaagaaagaggctgtggttgcttcagcagtgatgcaaatatttaggttggaatcaaaagatgagagtggggctggttgagagatgattcttctctgtgggtccctcatgtttctacacatctcccgagcagggataccaagtgcctttgttctgaactacatctctcatcatgtttctgccataaacatctacggttgatagaaacagtgacttcctctggtgcaaggtggatgtacccctccccatagtgcagttctctaagcccagcttcttttactggaattcactgtgacaggtatcatctggaccatggaagttgggaaattaacatcaatgctgactctggtcattgctgttggtcctttaccttccacgcaggaaacatttctttttttttttttttttttaatataagacagttcgttaggtgcggtgctgccttttttttttttttaagatttatttatttatatgtaagtacactgtagctgtcttcaaacactccagaagggggaggttgtgagccaccatgtggttgctaggatttgaactccggaccttcggaagagcagtcgggtgctcttacgcactgagccatctcaccagcccaggaaacttatttcttccctcagcagttgaactgtgaaggcttgcttatcagctacaagtatattcatgtgcacatacccacacacatatgcataagtgtatgtgtgtggccccttacagtcagtgataagcctgatgttccaaagagggaaatggaacagcatgtactgtggcaccaggccatgagaaagcacatcttagatggtgactatcttaagagtcaaaaagtgtgtggaagaggacattagaggggatataaggcgggggagtccaagagaatgtgcatgtgtggagctcatggcccgtgatgactggtagaatagccgaagcgttccctaggggagggaaaggtcagatatatttatatggtagagtcagaactgatgggatcggggaggaatctcagagcctgtggccagtactgtcatatccatccctaacgctgaaagaaggtccaagtggtaaaagcttggtctttgagaagccatttctgggagatgatgggactgttaaaggtgagccttgtggggggtggagaggtatctctaagatacttaagatgtgcccttgaaggagatggtgggaccccaggcccttccttgtcctcttgtttgtttgtgtgaattaagtgatatatctgccataccttcttgctagaatgtcgtctcttaagagtaacaacatagccaacctgtcacagtctgaaggtctgcagtcttaaggcaaagcaaagcttttctcattctaagttggttgtctcaggcatttgccctaggagtggaaagcagtgaacagtgtgactggacagtgatgctctttgctgagatgcagggggagaagttctgggaaggggggatgagcctgagttgtaaaacagctacagtcaggctgaggtgcttatcagcaaagaaggtgagatagaagtaagaatggctgatcttgaactcaaaaaagtgtctgtgaggaaaagatatctggaaattattagagtgtctatggtcagctcattttgtgtatggggttagtagtcaggagagtaccctctgggacctgatacaaattctcctgtgtcactttgtgacaagctcttcaagaactttgatctcctggttcataagagtagctttaagacaacacatagtgtgcgtaaaattgccagtaatattatttggatgtgtttgttggcaccaaaagataatattgtctaaagaaaaagcaggtgtaataaggggaaagagtagggtccgaggtcgggggccttcaaataacctgaaaagaagcacctggcaggtaaggcaggagccagaagagtctcaagaaggggagtgtacaaaggctggggtcaagtaagctctcgccacgcaaatgtgaggaccaaatttatgagaactctcatacatgctggctggacatgtaattccctgtaatcacagcctgcgaaggaaggcagagacagggaccctcagagcaaactggttatggaaactagctatattgggaagctctgggcttgattgagagactttacctaaatgaattagctggagcagaactggaggatgactgtcaccatcaccatctgtcctccatgtacactcccacccacctacgtccactgacacacatgcaaacacatgaacacaagacgtatgataatggggaagaaataaaaagaagaagggaggtgtggtctgcctggaaaatccatccgagggagcaaggcacgttctggatttcacagcctggaagacctgagtggctttaacacatagatttctcagtgtcactccagtgcaggggagaatgcaagcagaaatggatgggcaacagagagagaaggcagcaagaggaaacacctgggagagatttgtgtgagaaaatgaaatggaaggcttgaggcagagggtgggtcgatgtcaaagaaaaatgtccgtctttctcatcctttgttgtcatcagcctgtgaggacaggggatgattctctcatactttaagataaccaagaggctccactctgtgtcagactcagtgtcaggtagtttaaaatatctttgaggaggccctacttgaatcaggtggtggggagtcagagtgaagaggacaggaccagccccttcttggagattctcctgtgtcagtcaatactctacagggaggcacggacacaaggctgggtcagggtaaaggtgaatagaggttacatgctattggcagttgagtttagcacaaaagacctttgccatcccctgggatgagctgtaagatgcatcaagggtagatgctgatgatacagaaaggaagttaatcaagagagtttgggtttggaaaagatactattgacatctgttggtaaagtgacaacggttaaagagtgggcttccagtgagccaagcaaactaatctttagcttagtgtttagaatgtgaaaagtacaagcatatgttaatagagtatgaacttataagcctgagcctctcctgtgtagcctgtagttttgtgtgcactgctttgtgttcctggctggttgcacacacacacacacacacacacacacacacacacacccctacacctgcccaggagctatcttggattcatggataaaaggcacacacacactttagctcattttaaactggcttattggttctgtggctagcccttaccttcactcctagctctacacctctacatctgccctcagcttagttgcccagttaccttctctgaagcccattgatcttgctgcccaagacacttttgagccgctttccctttctgcctagattttggaagatctcccctgtagctccaagtctgtcctgtctctctcccccaagtatctagttgttcttcctctttcctagcctgcctgaacctggaagtcctgcctctttctttctgcccaaccattagccactgacatctttattgatagatcaaaaaccaactgggggcaaggaccttcagcatcagtaaacacagattcttgatcaaagcgtcagaaccaacccccctacacctgtggttctcaacctgtggatcacaacccatttggggtggtcacatgtcagacatcctgcatatcagacatttacattatgattcataacggttgcaaaattacagttatgaagtagcaacaaaataattttatagttggggtcatcatgacatgaggaactgtgttaaagggtcacagcatcaggaaggttgagaaccattgatctagacagactccagaagagccccttacatgttgagtatgggagactctgctttgccgagcccatacccatgtgctcaggtatgtctcagtttctttccatctcctttctttctcctgatgctagtgcttgaaatttatattaaaatatcgtaataaatgccacctcttggtgctggagagatggctcagtagtgaagagcagtgactgctcttacagaggacccagtctggttctaagcacccacatggaggcttatagccatctataactctagtataactctgtgtccttttatgatatgcatacatatattcaggcaaaacactcatatacattaaaaaataaacaaaagaaaaccccttgagctttgcttcataaatcaaagttaaataagatgagtatgtcctgggactatagctcagtggtagggcagtagccaagaatgaaagaggtcctaggtttttgttcaaaaagtcaatttgaaattattgtaagtgattaggtcaactgttaaatgggtctacttccgaaaactataaaaaggggtggctgatacttttttccccttacaggattccttttgggggtggcaaattgtattgtctttgtaaaattccatgacataattttaaagtaatccaccagactgtaactgtcagagccagctcattttctcccgtgctcttaatatatgtagtggggtgtgtgtgtgacatgtgggagctgggagctaagctgaggtccttcattagagcaacatgtgatcctaaccttggagccatctctctagccccaccccctgcaccatgcgcaccctgacaataggaggctcatattctccaacagatccccaggagggtctttgtgtcccacagtgagtgagtgtgacagttacaccctttttcggtgtaactggttaattttaggtgtaatacaatgtcaggaaatctcattctaggcagagtttagttgaatgagtatccatttcttcctatggttcggtttcagactgttaaattctggaataacaacgctgcaatcagctatcactgtggcttcattaaattctaatgccctgttttcttctcccccaggattctgccctcagaagcacgtgaaatagatcacttcatttaaagtaggaaaatagtagcacgttttcctggctctccagacctctcccaggatggaggcaatcacattcacagcgaggaagcatccgttccctaacgaagtctccgtggacttcggcttgcagctggtgggctccttacccgtgcattctctcaccactatgcccatgctgccgtgggtggtagccgaggtacgaagactcagtggccagtgctctaaaaaggagcctaggacaaagcaagtccgcctttgggtttcgccctccggactgcggtgcgagcctgacctggagaaaagtcaaccatgggacccgctcatctgttccagcatctttgagtgcaagcctcagcgtgtgcacaaactgattcacaacagtcacgacccgagctactttgcttgcctcattaaggaggatgctgcgcacaggcagagcctctgctatgtgtttaaagcagacgatcaaacaaaagtaagttgagatggggatcaaaagatgggcggccagagtttgtgcggtgccagagtcgggatgctcgtttcaagtacatggggagtaatgaggaaacgctgccactatacagagattgcttaacagaatttgggacttaagggggcagtttatagtccctttttgtcgaagggtgtttataatgtatatttaaaacgataagctttggggttcaagaattcaacagaaaaaaaaaacccgattagatttatagataagaactaaattgtcaggactcttgttcctcaaggcttttgtttagaaacttcagtgtctctcgagttgcaatgtgtatgtgagccatgggtgatgggggttaaagtaaaaagaaaaaagaaaaagaaaatcatggcccagtgcttgatggtgcccaagtctgagtctctcataagcgaccaggtgaaggccaggctattctattgcaaactgtgttttgagtagcaaagttctagattggtgaaaaaattaagttattaataaaccactaagaaaaatagttatttaaaaccatataaatatacttttagctagtttcccaaaggcacagatagcgtttactcagacaaaggtcgttgatgagaacaggagcaatgaatctaagctttgatacaatcagggctcttttgtgcctttttcctgtcaccaacttctggtcagatccaatcaacccggtattatgatgtgtctgagaggaatgtatgaggtgaggtcaacattctgctatttcctgtctactttctgcttgcatggcgaccagcattattcacagttctttgcagggctcacttcaagtccctcatctattccataaatatcagtgtatgtaaaaatgaaaataggatctatgtaagtagtttctcaactggacctgtggaggaaaatatactttagtacagtacacaagagacagtcatgggtcctaacttcatgagtggcttgaagactatgtctgctgactcaggcgctaggcataagcatcctggtgtgattggaactgtataggtcacttgtaccaagtgaggatgctaaggaaatgacagtacagtctgcgattctcaggctttcctttctgtcctttttctttcagtcgcagaggttggtcttgaactgctaatcttcctgcctccacctccaacctgctgggtgttacaagagtgtccctctatgaccagctatgtcttcctaatttcaagtttagaatgtgaatagaaatgccaaacatttcctattgcttcctaccaggttcttttgcatattctccagggtgttaagaatatcctttggaaatgaatgttcttgatttcaagtcaatcttgaccctccacagcctcaggttccgtgtcagtgggttcagctaacagcagagagagaaatatttgtcaaaaagctgcaaccatgctgaacatatacaaacactctttctcttgcccttaatgctctgtatagcatttcacagagcaccggcgccacgctaggcattctaggcaatcaagaggttatttgaaggatataggagttgatgtggaggctgtttgcaaagcctgatattttgtacgggagattagagcatctgcaggttccggagtctgtgggaatcctggaacaagtcccctgaggagagggacagcaggggatttgtggagtttcacttttgtttgctccttttactcattgactcagtggctgctgctctcagagctagtgtctcagaggccattagcagaagcaaggaggaaagcagacgttccaggagggatcagggtcaatggcacatgtgaaaagcatggcggacaggcacgatgaggtctaacacatgtcctgagaggagtaaagaggttttttttttgtttgtttttttctttttctttttttttttttttttaaagccaagctgaggtggtgctaaaagccatggtcctacccaataccctaggactatgtatgaatcaggtaatgttgccatgcctcatctcagatccaccccgcagatccgcccttgaaagttcagagagcgtaccttctggattcaaaccctgtctctgttacctataaactagtgacctcgggcacctgagtgtgtttgctcatctgtaaaatgggaatgattatagtaattatctcagggagttgctgggaggcctaagtgaggtagaatgggacctgagactcagtgtgctggctggaggtgatgagccgttgcctagcagacagcaatccctggcttctgtctcaagcactgccaagaaaagaaagaaattgaccatagtaataagcatttatggccatgaaaattacttactctagagggctttaaaattatattctatctctttgtgtgcacttgatgggggaggggtatatgccatggagtatgggtagagaccagaggaaaactttgagttgtggcctctctttctacccttgggtcccgggggtcgaattcagatcatcgggtttggcagcaagctcctttacccactgagccatgtcccagctctccgtactcagggaagttttatagaggtggattaagtagcaatctccaagtgtttggagaaaagagagtgttgtgtatggaaatgtgagtcttctgtcttcagctctctggtgacacgtttgtcagacttgaccaacattttataagctcaatttccacaaaacttcccagacatttatgaaaaaccctggccagtcacttgaccagagagagagagaaagagagagagagagagagagagagagagagagagagagagagagagatttataacaaaattctgtaacagagtctttcagccttgctctaagtaaagaactagtctttctctatattctctatattctaaatattctaaaaagccatcttggtagtataaattaattcttaagctctttttggcttgtgtacagtttttaccaacatgagttgtcactagatgataaattgctgctatcccgctcattttatttgagagagttgttcatagcatagctacttaagtcaggcgtttttgttcttgtcagaaatagaacagtaaatgacagtggccctgattctaactgacatatctactatgttctcaagacacctcgagacatgtctcctaacaggattatctgttgtaggagcatgctaacccacactggcatttctcttgactgttctgtaacatttgctcagtgcaagagttccccagattaaggagtcttctaagtggatgaggtcagccttgatcatgcttgcagaagcaaatgtaccttcgctgccatgggcgtagacgtagaactcctgcttgagaggaaatcctttgatcagcatcgagttaacttactgcagaatatctaaggagaatgggcagaggattattttagaggtagaccgtgatagagccttttgcttgtgtgctccataggagattctggaatggcttcacagagcaaagtatctacgaccaagtagcacctgaaatgcttttgcctgagggccaatgttcccttttaaatagtcatcagtcaggtgtggtggcttgcttctttaatccagcacctatgaggcagacgccaagtggatctctgtgagtttgaggccacttagtctacataggtagagacttccccaatccctctggttttccaagaaagggtttctctgcatagctccggctgtactgaaactcactttgtagaccagactggcctcgaactcagagatctgcctgcctctgcttctcaggtgctaggattagaggcgtgtgccactactgccgggccgagagatcctagctcaacaaaacaaagtcaaagttatcaagtagcctaacgagtattagtttttgtggctcattgctattagtacttgctctgttagaaactgaaactgagatactgactttaaatttatttaaacggaaaagcaacgagctccttatctgttattataaacaacattttagggattgtaatgatattttctgaaaagcgttcagcagttaacagcggtcggattttattgtttccgatctctgtaatgtctgtttaggagaagatggtagcgtagcttgccatcttcgctgctctccatccgttcttttgtagtacatcatttccatcgggcatctgaagaaaaagtggcttcaggaagatagatagtgaacaaaccgagacgctgcggtgacttttccttaatcctactacagctcagcaggtgatactttcttaaagcttggctgtagtgtaaaatctgagtccatgttaggctctctgcacatgcttcatattaaaacccattggtttatcctgtgctttaatgacgttttatgcattcatgattctgcaccatcgtgcactgattccttagaaactattgtctctttaagtaacctggtgtgcgactaaaagtatgtgctgcacgtgtgtgcaagcatccacagaggtcagaagaggacatctggtctcctagagctggagtgacagacaggtgtgagccaccagacttgggtgactgaagaacagtgggcgctcctcacctctgagcatctttccagcctcttgatgtatttttgtcgtttttattcatatgtatttgtgtgcctgtgtgaatggatgaatgccatatgtgtgctgatatccccagaagccagaaggggacatgagatccctcagagctggacttaagggtggttgtgagctgcccctcgtgggtgccaggaactgagctcagatcctcaggaagttctcttaaccactgagtggcctttccataaaggtgtcaagtgcttttaactgttccttatcaaattggaacacagctcttcaaataccatttgtggctctgcttctggtcttctggagttgttgtccagtctgggcacagtgtgggtgcttgataactgtgataggacaggtgtcactggggtgggcgatgtccctaagctccccctttccattcttgctaggagatgtttgttattgcagcctctgtctcctgaagaggaagtattccttgtctgttactaaaagagatgctaagtttgaggagccaatgtgggggacatgaggtgtaagaactggggtatggagagggccagtggagtgaagctgggtaccttgtaggagatgcatgtttagaagtcggtttggagaagatagatggtgctggggaagatgtatttgtatacttcttacagcctacgagagcaaaggattttcttttctatggcaactaaactacaggtctttttacaatttcttatttgttactttctgtgtacatgaaacagtgtgtagcggattgcgtagaacaaccttatggagttatttctctccagctttatgtgggttggagggattaaactcaagtttccaggcttgtgctgcaagcatcgttacccactgggacatctcgctgacccataaactacactgctcagaagggactgtgtaggcacccttacagtaattttaaggctctgtaatcattcatagacttaaaaagtaatacatgttaccttttgacatttctggtacaaacaaaaccaaaagacggtgcatctttgcttgagactctgtaagtccagcatctttctcaggagccccatggggactaagaacaccgccacccccacccctgctctgagttaccttgcattaaataggagggtggtatgaaattgcttttggcaactagtttgaccgatactgacatcttcctgggttactacttttctcattgttgagaaatggcttcaagaatggaagatttacttcagtccacagtttaagcggggatagagtctattgtgacagtgacagtgtgggggcaggagtgtgtggaactggtctcattgggtccacagtcagagagagagagggatgatagcgtttcttcctgcctcctcctttatattatgtccaggatcctacccattaaccctatgaacatactgcccacattcaggcagggtcttccttcctcagttaaacttggaaatgtcatagataacttcagggatatctgctgagatgtgtttctttggagcttgtaaataataaggcaacaatgaaccctaacatcaactcacttacattaaagccagggtggctttggctactctgttacttaatttaaaacatttaaggttgtttccttctggtgttagctttgtttacattttacccaaggccaacttgtgctaaaacttcagcatctgggccaggtgtggtgatgtagactttttttctgatctttgtgagtttgatgtcagcctggtctatagagcaagttctaggtcagtcagacgtacacagtgaaaccatgtttcaaaacaatcagatttaccatctgtttggaatgttaaggtatcaatttattatccacactacagttttcaggattctaaatagagcctggctacccgtgggcccccttgcacagctgatctgtttgccagcttagacctctccttgcctaagtgaagatgggcaaaggccacactgagccttgtgtcaccaagtccagtgactctgaagaacatagtatacattttcagatactcttagccattctccctgctacggaggttttacctgtgccaggagttcagctgtttgtctcctttttcactgttgaggaaagggctctcagaaggttgcttagtcccgttctgaagacttttcactgtccaataccgactcattctctgaagtctcctttggagtggcttgtcatctaggacttactgtgcagttgcaggggacagtgtagtatccatgtcagctaaaagctagttgactgactgtccggccagacagaagtcggctgctgggtgccagggttggcgaggattcttctcatctataaaaagaatgtccaggacttggtgaactctgaagtatttgttggaaggtttctgttcgcgacgctggattgattacataatttatttttgactttgaaaaatgagtctgagggctttaaaggcctgggcttcaggagactacatggactttaattctttttaagtctgttttgttttgttttgttttttcctttttcaacatgagctacttgccttgcagttttaggcaaatgcttttcctaagaatagattttacaaggttgttgaacccaaagttaactcgtattgtaaaaggacacatttatagtttagacctttcctctctcatagagtagccacatggctaccgagccagtgacatgtggctgttctggaaggagacgcccatcagtggaagcaccatttgcatactgaggcacagtttgaaaaacagaatgcatgatgtcccaataagattctctgatgcttatgtgttgaaaataggttttgtatattcagggctaagttacatggacccaaattaagtttccttcattcattttatcattttcagatgtgtttaccagataatttaaaaattcgagtatagctcacattctgttttcacaggttagcatagaactagactatatcaggtgatctgcccagtatttctggaaacaacctccttattcatcacagggaggtcacgagttccccttctttgatgcttttatttgttaatgatagggtatgcagtgactgctataaagctgtggcctgctcttgagtctagcagagtgtaggactgtaattttaggatacacattacctggaatcattaggaatacatcccaggtaattcccattacggggcatcatctcactttattcttgcttcttgcttatccatccatccactcacgtgcctaagctccaagggaaaaaggtccttaattatttttatcaccactagaccttggtacccagcaaaggagggcatctttggatgaactgagtatggaaggaggagaatcaatgtttctaattcaacacaaacaggcagagggcattccgttcgggctgcctttgccttctcagactctcaagattttgatagattcatcagcactcgtgtgtatgtgtgtgtgtgtgtgtgtgtgtgttgtagtcagtccatccattcaaatgttactgtttcatacacacccagaatcaatgtttaactgatcactgggcatcccatggatcctccaatccaagcttacacaggacatgagctgtcacacccctgccccaccccggagcagctgcaggagttctctgcctatatcattacagatcgttctgacatcagaattgtgttctgagatggccccttttctgaccaccctgcatgagcttctttgacagaagcctgttgcagctgtctcctgagaggctccaccagtacctgacaaatacagaagtggttgcttgcagcctactattggactgagcacagggtccccaatgaaggagctagagaaaggacccaaggagctgaaagggtttgcagccccctaggaggaacaacaatatttcactaaccagtaaccccagagctcccagggactaaaccaccaaccaaagaaaacacatggtgccactcatggctccagctgcataagtagcagaggacggcttagtcggtcatcaatgggaggagaggcccttggtcctgtgaaggttctatgccccagtgtacgggaatgccagagtcaggaagcaggagtggatgaactgagtatggaaggagggttggtgagcagggggagggggaggggatagagggttttcagaggggaaaccatgaaagggggttaacatttgaaatgtaaataaagaaaatatctaataacaaacaaaataaaacagtagttctcaacctgtgggtcatgaccccaaaaagactatcggagaatatagatctttacattatgattcgtaacagtagcaagatgacagttatgaagtagcaacaggaataattttacagttggcgtcaccacaacatgaggaactgtgttaaagtgtggcagtgttaggaaggctgaggggcattggcttagaggctccttagagtgatgctcactgttgtggtgtgaaatctgcacagtcctcttcctcaggttttaagacaagtttttcacacaaacttgtcttggcctttattggtgatagttgagaaagggactccagtgacctagaacagtctctgacaaagagcttgtcagctaagtcttctcagctgcaaaatgggcccagtacctttgctcaatctaacacaaaaacgctcttttgtgacaatagatatatttattttcagtgtcaaaaaacttagtctaaagtgttagaagtggggcctagagaaatggctcagaagttaagagcacttgctatttttttccagacaatctgtgtttgattcccagcacccatatagcagctcacaaccacctgtaactccagtttcaaggaatctaacaccctcttctggcctcactgggcaccaagcatacacatggtacaggatatacatgcaggcaaaactcaaatacacataaaatttttaaattaattttttttaaagttagaagtaaaagtttctctgtaaggcagacatggtggcacacagcctaccatcccagtactggagaggcaaagggaggcgaatctgctcaatttgaggtcactatggtctacacagtgtgttctaggccagccagggctaaaacaaataaacaaaaagcttccttttagtggcatctcctagagaaaccaacattaaatcctcggtgtaaaaaaaaaaaaaaaaaaaaaacaaacctcggtgtaaatcattataagtgtatgctcttatttataaaatcagatctttctataagaaataattttatgtattctgctgcaatctggattttacaataatttccccactcctattaactgatcatcgatgttttcccatttccctcttttgtgattgtttcttttgcatcggcattacagctatctccaagctgatgtatcaaactcatataaattcatagacacatgttcctcccccttggcagcaaggcagaagacaatccccttaacggcagacatggctcagagcccgttgctgctctgtgctgcttctctgatgttaactttcaaaccagagattacagtttaattaagatggcatgccttaatgggattcaaagctttaaaagaaacaactggagaccaattgtacatgcaagagaatcaatgtcacatccaaacaacttgcattctgtgatcatctttatatacttgttagatttctaaaatctgttcttgcctctctccttcctccaagttgtggattgcctcaggcctgtctatgacagtgtggaatgagaaaagtggtggtggtgggggaagcattgttttatgtcaaaaagcagcagccacacttgtgctttacaaagaagataaaattagaccaaataaaatttcagatttttccttagtttttatgttgtacctattaacaaaatcagtatcatcctggtgagtttctggctttttcttctcaaagctcaccttagcgcctttgtcagtctctaaactgatatataaacggacacttcatctatctatcatccatgattcaggttcttgctataggcagcacaccctttttaaaattgatataacatttctggcatataaaacattttataaaatgctagcatacaccgggcagtgggagtgcatgcctcctactcgggaggcagagacaggtggatttctgagtttgaggccagcctggtctacagaatgagttccaggacagccagggctacacagagaaaccctgtctcgaaaaaccattaaaaaaaaaacaaaaaactagaaacaggagaggtaaaaaggctgaaaggaaaataaagcccaaagaacttttaaagttaactttttaattcagtaaggagtttccatgtgattgttactggggatggaacagctactagaatttacgattcctcagtggcagcttctagttaacatacatgatggccatgtatgctaactgtctgaagctggaagcaagcacccaattaaatgcttccttctataaattgtctggatcacggtgcctcttcacagtgatagaaaagtaagacaatcctttcgttatttacttatttagtttttttaaagacaacctcactatgagccttgggtggccctgaactcacagagatctacttgcctctgcctcttgaacactgggattaaaggcgtgtaccaccacgcctggcttcatttttgtctttatttaagctgcagggtttctagtaaggtgatataaccaccttattagaaagtatctaagtagtttgggatgaatgtcatctgttaaacaaaagacagacacagactctaaaagtgccccacccacctctgacgtgtttccgtgattcagttcagttgcctagttggtttatattcttctgcctggagggcgttcatgctggagaaggagccagatggtacccagggatggtgctgtccattacttatcgctaggagaagatgcggctgtaactgtgtagagtaacaagtaactatgtaactaatgtgtgtgctttgcaaggaaggtacccggtgatgaggcattccaggaaggcctccctgggggagggccagctgtggcagagacaaaggtgactcaaatgacactgggtaagcagcaggacaagagtcccatcagacctctacctctataggtcctctgcttccttgtgcttttccttgatgtattagcattgttcccaaagagaatttggaacctcgtgcaaaagagccaggcactttcttctaggtggagcttggcagatagagtcacagtgtgctcatttgtcacttgcttctttataactaacgtccccccagttcactgaacagcacacagtactctatttctttctgaggcttgctgtcctctggggatggaggtgttatagatagtctagacataaagtgatatatccctacttgtaagtgagtcttcttaacatggcctttagtgtaattcagatctgttcttcccatccaagccaagcccttacagaaaactacctgcacctgaagaccctcagcactgtgagcaccaactctgctagagatatgagcaccttagacagtcctctaaccctcatacatagctattgcaaggagctttctacatataactgcttgatatatttaataatattattacccgctatttaaattaatgtaagggttaatagggcaagaaaaaaatagctaaaatagttctttcaagtctggaaccccatttaaaggtctcttaggaattgattttattttattttactttttcatttgaaagtgaagctttctttttttaccaataacaaatctattgtcttgtctgtctgcctatctatcttttatctacctacctatctatcgatctaatttcatagcctttgttctttaacttatgaggacttatttgcctctcctttaagctgagggtttttttgggggtatttgtttgtttgttttttgttttttttttcgtgacagggtttctctgtttagccctggctgtcctggaactcactctgtagaccaggctggccttgaactcagaaatctgcctgcctgtgcctcccaagtgctgggattaaaggcgtgcgccaccaccgcccagcctcctttaagctgttttgaagcagtcttttctatctactgcttttatattttaaggtaaaggctttctattctggccctaaatttgatatgcagtcacgatgaccttgaacttctgatttgcttgcctccacctcctgagggctggggttataaacttctaccaccagttccggtttattcaggctctctgcagagcaagccacatccctggccttgtttactgctcctcgaccctgctttcttgggagcccaattccaccattccctcgggaggcaccacagacttttgcttaactggatgctatttttgtgagagcaaaagtagcccattcttttgcttcagacacagtgaatgagtttttcatgttagaaacaaatcattatgccattatgcaaatgaaatataattttgtggaagtgcgtggtgcggaggaagctgaactgctaaaatacaaacctttatgctttcatccggcaggtgaacttttacaatatcgttagatcaaaatccaggtcagtatttcctcttcctatggctgtcctcaacatgcatgcagccacatactagtttacgaacctgggagaaagtcctagccgctctatgactcaatttttttcccagttgtacaatgggaataaagccagttctagtatcttcaattacaaaaaaaaaaaaaaaaaaaaaaaaagactaaatgagttagtatgtatacggtgcttaaattggttggtcttgtgttagtaaaaccttaaaattaatataattnnnnnnnnnnnnnnnnnnnngaatgagtttttcatgttagaaacaaatcattatgccattatgcaaatgaaatataattttgtgaaagtgcgtggtgcgaagaaagctgaactgttaaaatacaaacctttatgctttcatccggcaggtgaacttttacaatatcgttagatcaaaatccaggtcagtatttcctcttcctatggctgtcctcaacatgcatgcagccacatattagtttacgaacctgggagaaagtcctagccgctttatgactcaatttttttcccagttgtacaatgggaataaagccagttttagtatcttcaattccaaaaaaaaaaaaaaaaaaaaaaagatggcttgtgttagtaaaaccttaaaattaatataattatctctgaaagcccagtagaattactatacacgtttttatcatgtttgttttgttttgagtatgcgtgtactgtgtgtgtgtgtgtgtgtgtgtgtgtgtgtgtgtgtgtatttgcacccgtggattgaggaaggtgcatgcttgtgaccttgtaggtgtgtgtgcctgtgcacatgcattcagaggtcagagcaagataacaggcatcttcctttatcatactgtactcgtgtctccttaacacacggtctcttactgtaccaggagctcttgggatcccctgtctccgctctccagttctggggttcagtacaaacatctgcagctacgccaccttttttgtgtgggtcctggagagtcagcctcagcccctcatacatgcttgcagagtaagtgttcttaccactattccacctccccaagtccccatgtttcactttgtgtttcaaattggcctgcaacctgcaatcccctgcctcagccagcttagaggtaggataatagtgtgcaccacatgccaactttttgtttgtttgcttgcttttttttttttcttgagacaggtttctctgtgtagacctggctgtcttaaactcactctgtagaccaggctggcctcgaacttctggagccacctgcctctgcctcccaagtgctgggattaaaggtgcgtgccgccatcaccaggagccatgcttaactctcagtattgctttttaaaaatgtttccagcaaggtaattgtgatcataccccaaagagattcaagcagactgtagcattttgttttgtaagcttttgataaatgacttaccctaggtgctttgttttgcctcttgacctcaaagtccatgcagtgagcacaatgggctgttttcctttcctgcatgattgctgggtctgcttctgtagggtcccgtggcaaggtcctggctctgttttgcatcttatgcagcctgcctggctctcactctgtcttgctcactgcagtgagactgccagcccttaaagtgtgtatacttctgaaactgtggctcatgaatctgtagcttgtcggcacacaataaacagccaccctgtgccagttttcttcagggttctttctgagacaggagctgacgcctggctgctctagtccagaatatggtgtgcttctcagtcagaagccaaaatgtcactaaagtgtaagaaatccaaccctgagagactccagtgttttctgttgtagaaacagatgctgtttgactttagtggttggggcctgtggtcactgccttcacttcctaccctgttataattattgtagacagacaatttttttctttcatactttaaaaaaactatagttttttttattttaagaacaagcattttattagaaatatgtttcacaaagagcccaaatttagttattactataaaatgccacttcatgggatgtcagcattgtcatattctattgctggtgtatgtcatgctaaccatgaagtatctttgtcttatacatgcaaaaaagtaatgccagggaggttaattagcctgctctagaactcagtcaattagtggcagaaccatgacccacagtcttgagttttcgtgcattcactcagtaccaaagtgacaatctcaaaaacaaaaatcctgacaatgtcactttatctttcctcttaataaaaagccaactgttctaccagccactttccagtggtattttggtttcttttaatatcaggatcacagtatatagcagggggaaataatatgttcttggtaatcaaaacacaaagtcagactgggaagtgggtatgtccctgagaagtgtgtttcattttggaattgattcaactggtttcaggggaaatctaaaatccattaataaaattagaaatgaacaaggaaaacaacaggactgggggtgtggctcaatggtagagcacttgcctagtatatgcaaggccttcggttcaatccccaactcagcaaaataaataaataaataaataaataaataaataaataataatacccagacatttagatggctgatgccctgaatctctttgaaagcatcattgacaacataactacttcctaattctttccatttgatagataggacaactaaacaatttcaaatgcaagcccatttaggcagtatacagcaatggaactagaaaaaacatttactatccagttactgttgtttgggttatgctattagctgtagaccctggccagcagggaaattaggctgaaacccctaggttccttagcagtcatctgtagagattaccatgaagggaaaaggttgttcttttaactatttcctcactcagtaaactagatgcctatagggcccaactgcagaagaaccaaagccccaaagctgaaggcagcatgcctcctgtataaagagcaaggtctccttgtcaaaccattctctttagcactacttcagtcttcctcctccatcctggactcttgattccaccaaatccaacattgcaattggtgtgcccaggtcattactgagttcagctttctgggttctttaatttgctgcataggtattctaccctaagtgattaattgaaaaaaataatttttttcaagaaaccttaacaaaataccagattccctattaacaaaaggggatggagattaacaagccaaaataggaaaaaaggtgtctggggcaggacaactctgacctcagacgatgggctgcctgtgctgcaggagtcagtgggaagcaagactgccgctctcccacttagccatcctctgagctctcagcagacctggcgtccgcagccaccttccagttcctgcgcttgcttgccctctcctgtacctcagggtcaagcacggggacatggacactcttctctttctttttccgtttggttttcttagtgtctctttcctcgatgtcctcagaactgctagattcgggagcatctgactgagaagaaccactttctccccctaaagggaaagtgattttaggagactggatttttttcctggatttttttcttgctcttgtgtggttgcttccttttcctactactaaaagctcgagtttcctctgagaactcacttgaggaatctgctgttatgtccgtagcttcctttttgtttttcctctgtttgtgtgtgtgtgtgaccgttttttttttgtttgtttgtttgtttgtttgctttgttttgttttgtttttttccctgcttcctcttctgggatttctttgacttcttatgttttcgagattcatgggcagatgattttacctggggagatttttcccccattggtaatgtcttgctgatcactactgtctgtttcaaactcttcaggatacaactctttataaccactgtgaccccatctgtctggtatattggattcataatcatatagcttcttgttccaggacttagccttaagaaaatcatcttccagggccccagaaatttcattctttgacctccagtaatctctctgactttcttcatcaaaaccatcactcatccactcatcaaccatcagctcatctgactttagctgctgggcactgtgttccttctggtcccctggtaagcattctccatctgcttctctagttctctgattttccacatgtcagactcctcctgaatcttattgtgagcgtctgtgtgccggatgacattcctcaagaggactttccccaatggaacccgggacattctttaatcgtgcgccacagccttgtgtggtggggtgggagaaaaggccaactatagttttttgttttttgtttttttaacatgcttgcagtacccacagaagcctgaagagggcactgtgtcctctggaattggagtcactgatggttgtaaagggtgctgggaactgaacatggatcctaagccagagtagcaaaagttcttaatcactgagccatccctccaaccccccaggcaactttttgaaatctaggctcctacaaagcacaggcagaattctttgaagtggtttggtcctatctgaaaggcttcagaactgtgatttcagaaacacctgttcctatcacaattccttttggttggtgcacaaaaagtcacgaaagtaggttcaatggaaaaccacactcagtcttgtgtctctttagactttttgatggttttggttttgtgatactggggatccaacccagtgttcttttactcttatacacacacacacacacacacacacacacacacacacacacacacacctttatgataggtctttagctggggggtaggggtgggggtggctcccagaactgagtggacacagctgccatgcccttgaactttcaaaaccctgaactaaataaacctccttctctatataaagaagcttgtctcaggtatcttatgatagtaacagagcgctggctgatacaccctgtgatccagaatttcctaagtctgtatcatgcccattaatgtcagcagacatgaatgtaaagtctgtaaaagcatgctttataatagcaaaaggctgtgagcaatatatatgaccatcggcagttgagtggatttcttgtgaactagagggaatataaaataccaactatagtgaataaactacgattctgcagcaacttgggtaaacttaaaataatacaaggcagatgaacgcaagtgggaattacacactgcacagctctgtgtatctgcatacatgctgcacggctccacccatctagagccctgggtgagcagagggtgaactcatgtgttatttagaaagttacttctcttccaggaaaggaagtggtgtggcgacttgtccctcagcctccagcctttgagtacttcggctccatttggtggcactgtttggagaggctaggaggtgtggtcttgttggagagggcatgtcactggaagcgtcatagaggtttcaaagcctctgctgttattctaagtttgctccttgctttgtgctgacgatgggatagactaatgacccctagccacagctcagttagctgcaggatcacgaggctgtgtagggtgctatccattaactatttctacataggcgcttcccaggctttggatttatgatgggtttaaggctatgaccccactgtaagaggaggaacctctgtgtctgtcctcacagagtacctgttcacaagctcggcacgttcagttgccttgtgtgttgggtctatgtgcttagttctgccactcaggaaatcttaataaagacattgattagacttatatctaacttgaaataaaatgaaatagtaaatgccatatactttgatggattaggtaagaactgaaaaaattttatatatatatatatatatatatatagatagatagatagatagatagatagttgggactcagttacatctgcatttccttaaacttaaatgtattcttttgtcatcataatcattggtgtgtgtgtgtgtgtgtgtgtgtgacacacattcagggctgtgctagaaatctaacttagagccttgaacttgtcagacctacactacacactacacaaactgagatctttcagaggttatgtttatatacagataatgatgctgctgagcctggtgatgcaggcctgcatccctagctacagggtgctgaggtgggaggaaggaaaagttcagggcaagcctagactacagagtgagttcaaaggcagcctggataactgggtgagattcttgtttagagtaaaaagtaagaacagggttggggcctttggtcagtggcagagtgcttgtctaatagccccccccccccccgtacattatcaatgctggaagaaaagtataaaagcattgctcatcattaattttttgtccaatttatgccattcacccggtagtttcttgtgtgttttatttcccgttccctttaaaatccctaactacaaaaaacgccaagcatgtaatcccctgatcttttcacccccttcattccatccgtttttacaaacctatccttttatgaagcgaaggagcctttaactctcattcttccgattatgactctgccttgtgatgctaacccagcaggactgaggaagaaagtctcagatgatgagttggatttaaagcctcctatttggagtctctgctgtatttttcttctcccgtgaattttggttggtggaaccggaatcatctgggaaaacctcgatctcctccgtcactgtttcccccaggggcagcctaagatcgcatgtgtgagcgcatgtgtgagtggtggccagagtaaacaacccaggtcgttagtggagcctctgaaatccaactcgcaggcactgctgaaggatggctcctcagcgagccccttcagggttgccctttacagaaatagcctctgttccccatctctcatagctttcctggtgcgctgtaccccactaaactccaacaaaagccacaacttcatttacttctaattcacgcaggaaattaggaatcaccaccaacaaagtcgaataatttttgcttttaatatatacaccggtcgggagttcattataaattagactgtttttttttttctttctcttgattcttggggaaacataggatattatcaagatttcaggtagaaaaggcatttaaattgaaaagtataaattcattgccacttagaacccagtattacttcactttagtaatctagatattattgcaagagggaattcagtgtgacatttaattttcctgggttgtgtgatttgggactaagaacgaccctgagaagacgttaaaatcttcctctcgggcgtggtggcgcacgcctttaatcccagcacttgggaggcagaggcagacggatttctgagttcgaggccagcctggtctacaaagtgagttccaggacagccagggctacacagagaaaccctgtctcgaagcccccccaccccaatcttcctctcagaaacgtgaggtgctgggaattgcaaaactggagctacactccaggatctgattctccgaacagcttagtttctttctggtgcccccttcttcccttcccccatcttcaccgtcattgtcattgtcctcatcctcgtctttgtccttgtcgtcctcctcttcttcctcctcctctttctcctctccttctgtcctattcttcctgttccttctgcttcttctattcctcctcctcctcctcctcctcttcctcctccttctctttggggtctatgtagcctggaacttattaggtagcccagtcaggcctcaaacttacagagatccatctgcctctgcctcccaaggctatgattaaagctatggttaaaggtatgtgccaccaagtatggctttcacagagcaattcttctttattgttttaatttattttttattttacatatacctatgttttgcccacatgtatgtcactgtactgtacgtgtgnnnnnnnnnnnnnnnnnnnntgtttgtgtgtgtggtgtatgtgtgtgtgtggtgtgtttatgtaagacaaggactcttgtaactctggctatccttgaccttgttgtatagtaagggtaactttgaactccatatcttcctgttccccctcctaccttctgggattccagaccttgccacgatgcctaaaaaacccacagatctttcttgctgtggctgtgttccttggcagctagaaagacatttaaaatgtaagtttaaccatcagtaaactgagggcaccacagattccattagatagactataaggacaaaagagaagatctgtgctgagtatttggcatctgccctacatccagcaagctgtgaccatgcccagcatggtgaatggtgagcactctgaagacaagattggcatgatcttggcatctgtgtggattacaccatgggaggctgccttaccatgcttcactggggtggcttgtctgtgaggtctgccaagtctctgagaactgggtctaagccaagagacatgtcatagtcttttgagggattttcttttaacctgtttagttatttattatttatgtatgtgtgtactttcagaggccagaaaagggcatcagatccctatcctaccccaccctgcccagctagagttactggcagttgtgagtcacccaacctaacatgggtacttggtactgaacccttgacctctggaggaagagtatgtactcttaactgttgagccatctctccagctctttagacacaatttattatttgactttgagtttctgtgtaggcttattagtcttgaaaaactatgtttcaacagaccacacatgaccagtcctgatctttgacgcagggccaaaaatgtctcagaagcctggcaagtggggcacacagagcatactgaaagccagcaaggccccctgtactgcatgtgttctgtgtaaatgaagacactcagaagaccagttggttttgacctctggatccaatggatagaaccactggacaggcaatgtcggctgtgggtacaccatgcgttgtggttctgtgtactggggctgcagggctggcctgtggttagatgagaatccagactgctggaatctagaaatgtcagctggctaggcagctgtctgtccaggagcaaggtcagacatacaggatgagtcaggatgggtttggacgacactagtgtaggatgttcagaggctaggccagggcgagtgaagtccaggctgcctgtcacagggataggtcaggactgagaacaaggctagccagagctgtgtccaagaaccagactggaaactagagagagagagagagaaagccaaaggccacagcagggcaggggcagagagggacgggggaagaggaatgtttttttttgcttgctaactggtcaggaagtctgtatcaagaaaagggagacgagggcgcagaagacgggtttcctttctgtaggacagaacctggcgagcagagggcagtctgacccagggtaacttgcagtttctgtggggaggagttcagggtaagagggggtcacctgtgctacttccccagggtcctgtcacatggacatttctccctctcatcctcatatagactcaactgtgccgcagaaataaatgaaccccgaagctcagtggttagcacaaggatcctctagttgctgctccggggcctgtgtgctctgagttgacgatagccaagagtctttgttctgaggccccaagctgcctctctcttatgttctgttgtgacctctgctatggtgcagaagaaaagacggggaaagttcccttacttcactctaaccccacactgtatttctttttttttttaaatttagtttaattttttattttttgaacattagtgttttatctgcacgtatgtctatgtggaggtgttaggtcccttggaattagagttacagacagttgtaaactgccacatgggtgctagaaattgaaccctggtctcctggaagagcagtcaatgctcttaacccccggatccctctctccagctcccaacactgtatttcttatctagactttttgggcaagttccttaacagtctccacatttccacccttgtcttccccaggtctaaggcagccagctccaggcatgaccatcattgccgcagatctggtgatgtgcccttctgctgccctctccacttatggtctagcatagctctgcccttcagagaacaagccatggaggcttagtaagattttctcggccttctgagtctcattttgccagttgccctacctctcccagttgcttacatctcatatccccttatcctaggcccacgtcatcctctttctctagtctataacattccatggcctctcttagttctagagcatcccagattccctttgttcctgtgacctagaccgctcagtaccctccctgtttggctacctttaacttaacttgccatttctaagcttgcatgccactttcccagaaagcctctcttgcataaatttgcaaggaaaatcataggcttcagtagactgtaatcttcaagagagggatttccatcttgctccctgaatgacccacacacttagaactgtccttaacacataacagttaacacataacttccttgtatgagtgaatgaatgaatgaatgaatgaacaaattgtatgtaaaaattctttagctccaaaaaccaacactaaccaacaaaggtagaaaagagaatcatttagaagaatcctagggtttttcacagagtcaccatgacgtgtgcaaagccggtctgaccaagccatgaagggtcggcatcaggcaggagaaaccacagacgtggttacatcacagggataccctggcaagggcaccaccctggctttgctatcagacaccgctgccctggcactgcagctgctgggcattagctacagctccatggcccttcttgtgtttcagctctcattaaccctgtgacttgacattaccctgggagagtagcagcctcagacaggaatatctgatgggtgagatgagttcaggcatccatctgtggctagagagctgctgaaagtgagtcctcgcacttatcaatggaccgggcaggcctccacctgttttagaacagccatttaagactgaatgacctcacaaacttgaactatggggactgcttagaataaagatttccatcaactcagacgggcataaaaattaggaaatgttgagtccacaattcctagtcctattccattctaaaaagaaccattatgatacgttggtaacagttcatccacatgtctattagatgcttcttggataagaattatctcttgagtcatacagggctagacgtagcagttacggtatgcttgccctttgtatatgaagcgagcgctctggtgtttttacttgggaataaaatggctggttagagtctcaaggcttgcccgggtgccgttgtggggatgattggtaactcagagggaatcacagatgtcccacaagcagggagcacactggctctcaatgctggtgcttcgtgtgtgtgatattaagaagccctgggtattacctgtctgagactgatcaaggtgggaccctgtctatcaatttatggggaagccaagataggttctgatagaagggaagtatccactgtgctttatctttgtcagatgttagtgacccaagagaacagcatcctacacagaaatccttcacagaataaactatgtgaagagttctgctcggaaattatccaaatgtatttttttttctgggtagtttctgcttaagtaaacttctagacctaacctgccatcacctgactgcctgaaaagttagttcccggtggccacctgctcattttctttgttgtgttggtgggtggctgactctggtgccctggaggctgtgctcagcaataaatgaatgatggacttaaatgagattaggtcattgcacttgtggttatcaggtggctgaacctgactcagtaactgagatagttccaaaagtaggacctcagatctgtcagtacccacagtgacctcccaagaacttgaggacacctctgtaacctccttggcactgtgaatcttcacttgggtttctgcctgtagaagatgctatacatgagttttttaatggtcccatatgctttgttctactaaataacccctccacagaatttctacattaaaccaagccttatgtgctgtgtgtttatgtaggacatataggagtcctgtaggaagctgttatggctaaaatcaatgttctatgcatatctaaaagggcagcacttccattttatatacttctgaaataacagacattttgttttgttttgttctgttttcttgagacaggatttctttgtgtatccctggatgttctggaactagctctgtagactaggctagtcttgaactcagagattggccttcctctgcctgtgctggagttaatggtgtgtgccaccactgcccagctgtgagagatattctttctttctttctttctttctttctttctttctttctttctttctttctttctttctttctttctttctctctcttctctcgttctctcgttctctcgttctctcgtctctctctctttctttctttctttctttctttctttctttctttctttctttctttctttcaccacacctgaatcatattaaatcttttttatataatctaatgaacagataatggctagattttttttatctctttatagagcttgtttttgctgttttgaggcttgaacctaggaccttgcacatactaggcaaaccatctaccattgaattacactctcatctatttctttgcttttattttgagatgggttttcacttccttgctcagtctgggatttgctgctccagtctctgggatagttggcttataccaccaggccctactctgggttagtaattttaaaatagatgaattgagaaaaattttagtttggagtcacattcaaaataaaagttagctgtgattcatttgaacacacagatgtttgagtgttgataatacacaaaactatcgtcttatagcatgtataactgagatgagagtcaatattttgcttgtactctggccattttaaagagtatactagtttcagtatcaaagtagacatcaatggaagcaatcacctctggtgttttaatcgcagttacattgtttttcttacctctgtatcttgatggttatccaaacagtcataggagggaagaaaggctcggaagcttgtaccatgtgactattgaaacaatgtctttaatttgtctacacaggaaatgactgattttatcctgtctcagagagaggctaagaccatggccagggtatggaaaggtcagtaggagtcaaaggaaaagaattagaggtgtctgttgcaggaagaggaagttgaatgtaggtgctgaggtcaagcagatagggtgacagtggtgtctgggggagcggtaaggtgggcatggagtccagtcagtgctgacaccagttctctctaccggtggacagaagccatgcccttcgctgggctttgcaaaattcccagaaagccgtaagtcttggctctttgctatgaacgcagaagaaatgaaagtctgtgttcacacaaggtcttacaggaactggaaagtcacttagaacctgaagacaacccggacgctcatgaatggtgaagagaatgctctgtgacaaataaaatcagtatacttttgtgtgtgtttatatctgtgtatatagtgtttgtgtacagtgtgtctgtatgtataatgtttgtgtgtttatatatttgtgtgtgtttgtgtctatgtatgtagtgtttgtgtttttacctgtgtgtgtttagtgtttgtgtgtgtgtgtgtctgtgtgtgtacatgtatgtttgtatagctgtgtgtatagtgtttatgtgcatgtggatgtatgtagttagagtgtgaatgtgtatgtagtgtgtttgtgtccgtatgtgtagtgtttgtgtgtttatatatttgtgtgtgtgtctgtctgtctgtctgtctggtttgggggtgatcccaggatcattctgctgagtgtggcagtgtagaccttcccaaaagaagtatacagtacataattccatataaagatataaagatataaagctctagaaaatgccacgtcccatcagtggcaagaacagcgcagtggttgcctagagagaggggaggattacaatttgaggtgtaatggaaatgtattggtgtcacaggtacgttcatatatcgaaacatgggaagctttacacaggacataggtgagcttattgtaaaaatgtcgaaagttacaaaaaagaataagacttgttacgtgttcaataaatgccaggtcatacgcattaataactagacgctgcttgttactatctctgttacagacgaggaaactgaagctcagagaggttaaataacatccctagtactacacagcagcccagaggtgtggttaacatgttgttggctctaggtagagcatatctgactagccacctaaaccagccaagagacctaacagtgcagtgtttcagaacaacctctagggggcagtggtagcacccaagaattttgtgacccttcatgagaactgttaaacatgtgaattgggcttttgatggtggtggttcatgcctttaatctcagcacttgtgacttggaggtcagcctggtctacagaacaaattccaggatagccaaagctagacagtgaacctctgtctcaaaaagcaaagaaaaagaatttgattttccttattcagttgttaattcccaggcaacaaaactcactcagctaagagtacacccagtaacttttggttattatacattcccagggctgtgcaacttttgacaatgtattttcgtaacattttagcttcccttaatgaaaccctgtcaccctgaagttccctcccttcctttaccctagtcaggcactcactttgcggtccgtatatgcttgcctcttctggacacttcatataaagggaatcctctccacatggcctctgtgcctagcggtttttgttttgttgtgttgtgttttgttttgtttctcaggacgttttcaagattgtccatgtaaggcatgcaatgctaacctgttagtttttggcactgaatgatgacgttgtgttaacgtggaatttgattgattgatctgattatcagttaactgtccctgaagaagtttctgttttcccactgttatgaataacactgctattctcagctttttaattttgctttgtgtggggatgtcagtgcaggtttggaacccagggccttacatgtgtgaggtacgccttctaccagctatagccccactttaccgtccccacttttccaaatgcaagtgctgcgattcaaggccctgtgccaccagattcagctctcaatcagttttacttaaaaaagtgatggccatttgtgagagggtccacattgcaggcacaaatgcgtgcaagcagaaggctatttactttgtaattaagaaaatgagtgaggactttggcaatatattttttcccttgtataaagtattcagatggagaccataggtctccatgatagtgtttcctaattactagtgtttaggaagactgttagcaaaatagtagataatatttgttctcctgtgtgaggcacttgctataaagccggtgtgtattttctggtataattcctaccctagtgtctgtacgaggtgttattatctttgttatagacgaggcttctgaggcttctaaggccctcaggcattgtagccaagactacctgacagctgttgttggtttttttgggggtgtggggtggggtggggagtaggcaaggtacaggagcagtcttttatctccacagtgttctctgctcagcccgggctttctgggagcccctgcctgctggatacctcagtagcaccaggaatttaacatctccagatgcttcccaaatgttgggaataaatacccagctttccctctcttcccttctaaggtttatgtctgaggttggcaaacccttgctcttgggggcctgagagctttcaacctcccaaccttcccagtcaccatcccagctgctcaactctgttatgtcaccgtgagaacagccacacactgtatgcaaagtctgggactggctgtattccaataaaactttatttataaaagagtgtaatggacgcatgtgaccagctggctgctgcttgctaacctcccgttttccacagtttctcaagaagaacccagtcactcccagaagtagctggttcaccacatcttagtcttgcttccccgagccgctgttcacaaaccctgactcaggcctcctgacaccacaagaagacaaactccagttcctttccttggtgctgttgatagggcactgaaccgcagacccaggacaatgccgcccagagcagggcttcacagggacaaagaggggacacagaactgctgttctgatcctgaacgaccctggccagggtttatcgtagaacctgctacagttctcccttcaggaggattgttcaagttcatccgaataaacgtgcccggtgcctaatgctgagctattgtcaaaattaggatgggtttatcatgcttttccgatagctatggaaaagtgccttgaggttcttttgtgggaaaacttaagatcaatgattaagatcaatgattttttaatttaagacttcatcttattgcggtgggcgtatgtctttgtgtgcttatctttttttttttcctttttggtttgtgggtatgtgcatatgtatgtagaggatagccgtggtgccattcctcaggagtcgtctaccttgattttttgacagtctcttcctggtcttgagctcactgatttgagtaggctaactggccagtgaaccccaggagtacatcttccttcacctcctagtgctccttagcatggagtttctgggtctctaactcagatcttcatgtgtgcgcaacagtcgctttacccaatgtgcctctctctccccagcgccaggccctgatttttaatggtgtggttttagcttcctagacaaactggaaggatgggagggtcgggagattgccagggttcttcattcacagtggcaaagcctcctgtggcctgccaggagctacaatgagaaggtcgacattaacatatcaagatcagctaagagtgtgctttaactcttagggtttactctgtgcgtattctgtgagtctgggcatctgtagactgacatgaatccattattgtttacgatttattgtgtaaaagataaatggctagccaatactgtgtacgctctccctgcttagtgtctttatttgaacatctgttatctttttaaagcaacacaaacaagccttatctttaggaattatgtactgaattattcatagatgaaatagggttccaaggagaacctttcaaataatctctggcgagactgtgtgtggatatggtggaaacaagattggtcctgagataacatttgtttaagtttagcattgggacctagaggtgcgctatactacttccccatttctttgaaaatgtcctaaagtgttttgtttaagactcccccccccccccaacttcagaatttataaacaaaactttactgggataagaactccatggtaggtggcaagaagggaactatccttacttaggagctgggaaccagtaggtcccaattctttaacatattgggagtgcaggctctttcattcctaagtatactctagacttcctgcaagaccgaggtcatgtgatcagaggaagggcatgcaaggtcatgtgatcagaggaaggtcatgcaaggtcatgtgatcagaggaaggtcatgcaaggtcatgtgatcagaggaaggggcatgaaccttgtggcactgggcttgaaaagggaagacactgtgacctcagcaaagatggggaagtaggctgcatcagcaaatctcagagacgatactggaaaggaagatttttttcaaaacgaggtttttaagagaggccagggtaaagcttttgggatctgtagactggttgtagcgtttgtctagggcagtagaacaccggcatctatggagagacttgctcagaggaataaatcactaggacgttaaacttttgtaatactgacctgcaggtcgtttggtaatgcacaagggcttcaccaagcccagctctctgaggacacaaatctgtatgtgaatccctgagagtccccagcaataaataagcacttcctagattataatttgctcacatagatacagaggatctttggagaaagtggagacacctcctcagctaggtcacgattctcacaaagcctgcgggacttcgaggttcagacccatggccccgaggctctttatctttcctcaagccattccttcaaatcccatcatgattctcatctggttgagtttaaaaaaaaaaaacaaaacaaaaatctcactatgtaactgggggttgttagttttaattgtcaacttgacacactccagaatcaccagggaagagatccacaaggtatggattacgttagcccctgtgccagcccatgagggatgttcttccatctattaattgaggtggaaagacctacactgaatgtggctagcaaagttccagaggcttggccctggaccagagagaaagaggaggagtcagcagagaaaggggaggagccagcggagccctggcttcggagcattctttgctctatgctatctgttccagaggatacagtgtgactgatggagctcccagctcttcctgctgtggcttcccagagatggtagactagaacctgggactgtgagctgaaatacaccttttgggaatgttgtttttaaacaaggtatttcacccccgcacccggtcagggaaactaagacagtgacttaaagtcctgttgagtcaaggggacctctagccttctgcaaagtcctggactttcgagtgagaacctctgagtcctggtttccagttctcctaggtagcccttttcattgcacagattccgggatggttatttgcagcggtaattagagcagctcactgaacactgtgtgctcatcaccacccactgattgacagctcgctaatggatgtgcagggtgtgttgacagctgcaggtgacacttgtccacttgtctacagcctcttcctgttcccgctctgactggggacaggttttctattcagtcatagtaatttgatgcctttttctgaaaacctgaatatctgttggtctgaaggctcgattctggaatgtcccaatgaagtacggaaactcggtgataatgaatggtgagagccaggtaggaatatcttagaaaagagcaggatggggtttttaagttgggagtgattgtgcattaatgagtttcctttggtgctgctacattttaatatgaggcattgttttttttgtttgtttgtttgtttgtttgtttttgttttcaaaaaagctttcagagtgccacatgcaattaaggcttcatcaagcagaggcacctgcatgccattactcataatggaaggttgctcctggggtttctaatttctgtcttactgaatcggaacacaaccatttatggagtataatacagaacattgactagggaattcaatcattttgcaattaagtttgaggtctttcaagaacattttgcccattaagcatgagactgtaaccattaagaaacgactttgaataagactctagaaaacacaggtggggaagttgggatacatacagatgacaggaaaagtgaccaaggcaggtgtgcagaatagtgatgatgccacctatagaaagaagcttatggctgcttccagcggggctggggctcaggccaagcctggaagaccatttgtgtggagtgagaaggtctcggtgttagtgcggttagcttggtatgtgaactatagacagcaattagtacaagttcagctcaaaataatcagatggcaatttataatggctcatatcatcatccctcaagactcggtacttagcggtgtcatgagagagcctgtaattaatgtagatgctcagtcctgcctcagatctattgaaccagaattttcattttaatgagacttgtaagtgattcataggcacattaaaatgtggttccagcaataaagatggctagctgtctcactaagaatagtctgcaggtagactgtgctcgtgtggcagcttctacatcttcaagaatacagcggtgcttctcattctggtgtctttggcatggtgacctttcagccttttggtttgcagcctcgaagttctaagatagctgctgtagctcctccaacaaccaagttccaggcaggaagaatggctgaggtgccttcttattggccagacttgggccatcggctaacttttagactaatttttgagaagcagagatgtatttacttgttcagtttaaaaaatgatggcttattactcgccaactcatgagtaccccttggggctaacatgagaagagtctttacagtttgaacaaaagagggttctggtgtaatgaagatatgggagtctgttactgggtacgtagctgtcatgtgtaggttgccatatacaaaggggtcttcgaaatcatgacaagaatgagttgatcttgtccttgggtgaatgtcacccactctataatttaagaaacaagcacaactatgtggagaatagtgatgagatctttggagtgattctgtgggagacgagtgtatttggcctaggacattggccagtagatcagaatcaggactgtgtttggaaatccatagatcacagcgtgtggaagggagagtcactgggactttggtgggatgacacactcagctggttggttgacttttaaatattttcctcagctggtggtggtttacacctttaatcccagcattcagaaggcagaggcaggcaggtctctgtgagttggagaccagcaggatctacagagaaagttccaggaaggctagggctacacagaaacaccctatatcaaccaacacacacacacacacacacacacacacacacacacacacacacacacacacacacacattccaatctccatcttcagaatatctccaaatcagcaattcagcagtagcaaatggagcagcaggaaccagcagcagccaccataggccctcttggggatcccccatttatcccctctccagagtcccaagggtaaactctctgcagctggataaaagatcaacgcccctcctggagtgtgggacaatcatagtgaacagctttggacaaactgaagcagccccgtatcccacccctgggtgtttaaggaagccagaattctcactacaaggcttttctagagagccctgagtgaggagggagttcacctctgccattgtccacctccctttcacgaagcatcacgatggttgtgcggacgcttagaatcttgtcatgagttgagcgatcacaaaagctgccgagtctgcatacattgtgcccacattaggacaacgaggtaggtctgccctggcctttctcagagaaggaagcaggtgaatatatgtgtcacataatgttacgtaatgctttgctctttgggatcactaaggtagtaagtacctagaggctgctaaagatgactaagcctgctgtagccatgaatgcacagtaagagggagccaccaagatgccaatggtcttctgtctctaacttgtgtcacccacaccactttttttccataaaaacttagaactgtcttataaaatgtatatataaacttataaatttatgtataatttagtcaccataaatgtttatggggaacagaggcattacaggtggccacagtccagccacattccccgtctgtgtctctacgacttggagcagagatcagcaaatatagcatctaacacaaaacacaactgtggctgaagcgatgtttccatgagggactagtgatcattttatctggcatctaaaaataaatatgccgtctacagggcatcttgaaaatctaccatctgttacacaatatccatcagcaatgggaaagaggagagaggggaagacacacacacacacacacacacacacacattataaatttgaagttgggtaggggaagaaagcttgcttcagcaaacacatattcatctagacaacccatttttctgagcaagccactttcatcttagactgataccttagcttgacagaaaccttgatgaccttgggctggaaatttttgtttgtttgtttgtttgtttgtttgtttcttgtgcctttccctctgggtttaagattctgcactgtattccacccctcagatggggccggatcccaccactgccaggctgtttgcttatcgttgctgcttctgtgcaatgaggtttgctggaccttcgccacagagaagcgtcctatcttttgcacctctaaggctgccctctctgtaacacctcaggactggggttacttccacacctctacagcccagcacggctgtttgtctcctctctaggactcatatagaggaaaaataaatgcagagagtgaattccaatgccatttataaaatagaatgtgtcaatacgttttgagggttggggatatagttcagtggtagaaaacttatcccaacttttggatagcactgaattcagtgtccaggaccaagaacaaaaacatagatactttcaaagaggccaattagcaatcatttctgtttgtagcataatgggctgggctacagacaagtggcctacaaactaactaactaactaactaactaactaactaactctctctctcaatttccattacatttagttatttattgtaagttgtctgtgtacgtgtgtgtgtgtgtgtgtgcatacatgtcacagtatgtatgtagaggtcagaggacatgtttgggtatcagttctctctttccattactggctcccagggatcaaggttagatcatcagccacatcagcaatcgcctttcccttactctgagccatctgggtggcccacacatcagtatgaaaagcaaggagactgacgtaagacagtccaaaaatacattaacttgatactttcaatgctgagaaccgatagtgggtaaacatgtaaggctttgttttctgtaactaaaccatatggctccctaaggatggaaaactctgtaggtacagcaaaaacacagcagttaattgcttatagtagtctctaatccaagacaaggtatgtcaagggctggtccttgtgtgatagactgccagcactaagtgtatctgtagtatgttcagaccaaatccacggtaaagttatatgacgtgatatggatcaactctgccagaagcaccttggattcattatgtgtttgattctgaaagaatttttagccatcacatattaagaaacttcctgtttctaccaagttgactgtgacttccccacccacccccctttcagtttgcaaccctcgatgaggttgcgacccacagcttaggctgagctctagaaaccagaactggactcaatattgtgcgagtgggaagacacccagtgaagctgtcccttataatttgtcttcagttccagcttccccttctgttttcccacgagcagaagcagcacgagccttctctgagtgtacctactttaatcttggacttccaagcctttggaactaagtatgggctgaacaaacctctattcatctctcaatgtagccatctcaggtattctgtcatggcaacggaaagggggctgaggcaagttccacttccaacagatccgaggtgaatagagagagttgaatagaagtcagggtggattatgttttatttatttattttttttaaaaaggtggctttattaaagggcagtaaggagtgaaatcaaaagccagttagaaattagaaaacactgttcaactgagctgtatgccttggctattctgcactgttcttgagaggtttggaacattctgcaggtctggtgggtggatgttgcttttgttgtatgggtatgggaaaaggggcttaggcatcaggtaacttgcccaaatctcactgccagagaaagtgatggtactgaacttcccaggcacgtctgtctgacttcaggtctgggctccttgcaacaggtcatcctggctctcagatcctgtgctaggagtgtaacggtcatcctagctctcggagcgtgtcttaagtgtgtaagttccttattggaacagtggtctgtaccatcattggcattttgtttaaatacaagtggtcatgttgctccattctacttcagctttccgtgctcgctcagtcctctcaaaaggaggcctgcagattctgagagcatggtttattcctgtagacaaaacaggagacaggaaatagcaaaggagaaggggggaaaggccagggtcaggtcaggatcttcccacgtcttctgttcccagctcatcaggagacaaatgaaggcatgaaggaagtcctagaagctagggcgcaaacttactttcttggggcagaggagaaaaaagatcatagcagctggtaatacttctagttaaagtatcagttgtcttaaaatgattgcttagtcagtgttgataaacttcccttttccttctccttctcctttcatgccagggccttggattcggttcgaggctttgatggagacctaggtggcacctggtgtcaatctgaatcacctgggaggctcataggggttcctgtgtagttgctgagttccatgacatagtgaatttcctaaattacaagcttgttagcattgcgtgtttgtgggttttgctgatactggtgaaagtgggtggtggttaagcctctgaaggtgctatttcacaagaagccatctagatgtagctagagacaaaataggttgcatgttctgggttgcttctctatgaaaggatactcagagctaatctccagagactatgcaagtctcattgctaggatgccctactggctcagagagaagatgtcagcctctctcccctgaagacaagtcctaagatggctgggaacttaagtgctttgcctgtgtctcccactaccaagaacccacaggggcagacacagtgactgttctgcccactgtcaggttgaaacactcaccattatcctggaactgattctgtggtggggttttctagacaagtaaccttttgtctcgggtcagcaggtcaaaggtgagtgtctactgggtgtgggcatcttcttccacccatccatggctctttactaggtgaaatagatttcctctgcaaataaagatgtcatattgaagaaatgctaggcccctcttctgaaagagtcatatatctcagaacttaggccaagtaccaatagtcacatcttgggtgacaagacgggaaacatttctggaataaaactccctcatcataatcagccttttcccatcaaataggtatgcagtcttgaacagactaactgcttctagctggcctcttgtatgtatgtatgtttgtatgtatgtatgtatgtatgtatgtattcatccactcactcactttacaacccaatatcagcccttcctcttctcccagtaccccctcacgtaagtcctccccccattccaccttcttctcttttgagaaggggaaaccccccatggatgttaccccccctccccaagtaataccaccctcacccataacattgctgcaggactagatgcatcctctcccatatatctggtcgcttagtgctatagttggggatgcttaaatatgtttaaatgtttgcagttttagtgcttaagtttatagtttttaactggatgtctggtacccagtaaatacatatatgtttctgtgagaggagaaacgcaataaatatatgttggataaacaaattaaccaacccctcagctttcctcttcaccacctgtttgtagttttagctgtgtgagaactccccggctctaataccctttattgtttggttgtgaggagattaataactatggtattatttggttacattattactattttcttaggattattatgaggatgctaaaaactggaccaacaaagggaatgcttcagaaatgactaaagtccactgatgggtacatcttgtggtcagcacagtgtcacagttgtgcctctctcaggatctttaacatctccacggtagtctctaaccgtaatcatttaacttaactgtgtttttagcaatggacaggaactctttcaatacctttttgcatatgaagccttaagacctgggatatgaaagcactgagcatacttagttgaaattctgcatgtttattagatggcagtggtttttctttaaagatttatttattttatgtataagaatatactgtagctgccttcagacacaccagaagagggcatcagatcccattacagatggttgtgagccaccatgtggttgctgggaattgaactcaggacctctggaagagcggtcagtgctcttaactgctgagccatctcagtagcctgatggcttttaaacttttaaactggtttcctcaacagtattgttactgaacaattatgtcaaagaatgattgataaataattagtctataatagctgatcatggtgatatgtttctctcaggcaaaaataaagtttaaaaaaagagccttcactatgacactaggcaaccgggcaagtgaataagaagatagcaagtaaataaagtaggggtagggagattctatgtccattgaaaaatgaatagatgattaagccatgaaatagtcatatgcttgaacacatttcagcagctaataatataatgtcaaatataaacagtttcttttttttccatttttattaggtatttagctcatttacatttccaatgctatcccaaaaagtccccccatacccacccacccccactcccctacccacccactccccctttttggccctggcgttcccctgtactggggcatataaagtttgcgtgtccaatgggcctctctttccagtgatggccgactaggccatcttttgatacatatgcagagctccggggtactggttagttcataatgttgttccacctatagggttgcagatccctttagctccttggctactttctctagctcctccattgggagccctgtgatccatccattagctgactgtgagcatccacttctgtgtttgctaggccctggcatagtctcacaagagacagctacatctgggtcctttcaataaaatcttgctagtgtatgcaatggtgtcagcgtttggatgccgattatggggtggatccctggatatggcagtctctacatggtccatcctttcatctcagctccaaactttgtctctgtaactccttccatgggtgttttgttcccaattctaaggaggggcatagtgtccacacttcagtcttcattcttcttgagtttcatgtgtttagcaaattgtatcttatatcctgggtatcctaggtttggggctaatatccacttatcagtgagtacatattgtgtgagttcctttgtgaatgtgttacctcactcaggatgatgccctccaggtccatccatttggctaggaatttcataaattcattctttttaatagctgagtagtactccattgtgatataaacagtttctaaaggacacatatacacacacagtgataatatatgtaggggaaatgtataagcaaaaatgactattttgtattattgtggattggtatttgtggggtgaataaaaatagggggaagaggtgacccacttggtgcacaatggtgttaactttcaaagttgcagggaaaccataatttagcttgggatctggtgagatggatcagtgggaaaagcgcttgtctcataagcataaacaaggagcagagtttgctcagaacccaaataaaaagccaggtgggcatagcagcctgcttgcaattctagcacttgggaattaaagatagggcaacctgtggcaagccggcttgccagcctggctgaatcagtgagctctgggctcagcaagtccccaccacagtaaatgaagtgaagagccgatgaagaagtatcaactctctggcctctacacgctcccatatgcatccacataagtgtaaacatgtacacacatacacacaccacatacatatgtgctcatgcaaaaaaccccgtatgtctgaaaactgttgtgactgtgtagtagctacatggatgtcagagtccattttcttttgccacaagagaacacgcgtggctgcctaaattcctaaacaaatggagatttatttagatcatgtctagatgctcgggagtccaagaggagatagttatagctggtgaaagcctggtgtgttcaattcctgatgtagaagcaaaaggagacccaagtggaagagaggagtcaatgtcgtgtgagagccactccatggctgccagaaagtcatttgtccctgcatcagtgtggtgactctatgacccaaatgcctcccaccaagctaaatcccgagggcctaacacccaggcaatggcaagtgaatcccagcatgtgtttttggagggtcaaaccatatttgaaccataagaatgtatgtgtatttgtcctgggctatttcatttggcgggaggggggggcataggggagggattgttttaccagttaagctgtaggaagcatgaatgatttgacaaattctaggggctggagagatggctcagtggttaagaacactgattgctcttccagggcttgagtcccaacacttatgtgatggctcacaactgtcagtaactccagtcccagggggttctagtgtcctcttttggcctctgtagggaccaggtacacatgtgatacacagacatgtgtaggcaaaacatttataaaataataaatcttacccaaaaaagtgaaaatcctgtcagtacctaattctaatgctctacagattagggatagtcttcctcctctcttatctgtaagggtaatttctacttagcatttggatgcctggtaagactccaaactgcctacagggcctgccgttggctcaggaccccttctctggctccctgactcaagcagtcagctgtgctctttcctctttgcttgcagtgtgggcttgctggactgtaaaccgtcccttcaagggcaggtggtgtgtctaccgctgcaccccaggaactgatgcgcggtgatgagccataggcattagtagactgatggatggttgaagcctatccctcggtggggccaggttgtagatgtgaaattaccaactggtcctcagtttccccttcttaggaggtcaggaggctccctgtttcatgcactatggagattttgaacaatgcgtggggggccaatggactttgtctagggttcactggtttcctccgagtctgacaggcaaagcactctgagcattatgctccatcaccacgatcatttcttatctccaagagctgcaatgattaacgagataatggcaaacatctgccagacactaagtgctcagggaatactgcttgcttccctcctgaatagtgatctccgagaaggctttgagagaccaggcaggcatccattcttgatctctcctccgaaggaaggaaccgattctgcgttctggaaagttctcagagctttggtgacctgttgagagtgactctgagtttaacaatcaaagataactgtgagctaaggccatcagaccattaacccatcatgagttggttcgttttagatggagtctcagagctcaggctagtctgcaaccctgtctgcagctctggttggtctcgaatctgtcatccctctacctcggtcttacaagtgctggggtttcagcagtgtgccaccaggggattcacttcaacataaatgtcacagcttgggaggaatgttggagattttaagtccataataacttccacaatagctacagggtagatacggatccaggtgtgatctgtccctgaaatgagtaggtagagctggcagaacatccgagtccacctggccccaagccaccccgttctgcctcatagagagcaaagttcaaaggctcaaaagaaagttaatccaaaccacagaagaaactgcctggccctcatctgaaagctgagtttatgttgaaattcatgaaaacatgaaacttcacgttgcttgtattatcgttgtcacatttgggaaattccaggttagaagacctacaattcagacccccctgcataaaagctttaagaggatggatgagactctaacacacatggaaaggagaagccattctctcttcaggtccgctcacccctggtgtctgtcagagccagtaggagctgtttttagttctgttccttctccagctgtacagagaggccagggtgtgtgtgtgtgcgcgcgtgcagtgtgcacgggtggtttattttacaacccgggcaggtgttcttttgctaagcactaaatccccagagactactggagggttgtttccccctatttcttctctcccaaaaacacttagtatgatacgcatcattactaacgacacagtatgcatcattgttaatggtaattacattggctttataataattgacctttgggagagcttttcagaaataaattgccctccaggaaagattacatcacatttttatatgacctttttgacctatgtgaattttcaaatacgttagtagggacagtcactgnnnnnnnnnnnnnnnnnnnncacccctcctctcagttatggggactaacttgggtcatgatttctggaaagtgttcttgctcagtgcaccaacaatggcaccaagaagagcctgagcagacacttggcgagatgcaggagtctgtgactcactggcttttaccttgaaatctcaggttacaccaagaaagcaaaaacagggctttagggatgacaggatcgcttagcaggtaaaggcacctgccaccaagcccgacaacccccaattcaacccctcaggccatttggtagaaagagagagccaatcctagtaagttggcctctgacctccacccacgccttcgtaccctcgtcatgccccagcagtggcacatacaatagtaatgttaaatttttaaaaggatcgtgttttgcataaggaagcatgctcatttcagacttgaaaagagtgaatgttgtgagaaagggctcagctgtggataaaacctgggattaagtttgtatagaaagtcttagaaattaaaaattttacaaaaaaaaaatcatattcaaaggtaaattcaaccacctaaaccaggaaactttgacctgctgtggagggaggggaacgagtttggatcaggtttttatttgctaatagaccagtcaggaaatagcatttcatacttttccgtctttatttttttttatatgtgtgtggtgtatgtgttcatgtgtgtgttaggtcacatgccaggggttagctttggttgctgttctttaggaacactgtcccccttgggttttcagagtctttcgttggtctggaactcacctactaggttatgtggcctggccattcaggaagcgccaaggatccaccagtcttccttcctccccaggactcagattacaaacctaccactgcctgggcctggctggctgctgctcttttgttgttgttgtggctgttgttgctgttgctgttttctttcacaggttcgggggattgaacccgggtccttgtgcttgcaaggcaagcactttactgagccatttctccagccctcttctaggtcttttttttttttttaaggaggaacatattttttttttccatttagtagtcattattttaatggcattagtgcacagagaaatttcatgaaacacagctggatcctttcaaatgtttccattataaatgttcacaagatgtctgagatgaaagccgagatcctctgtttcattataacacaaggtgtggatgtcaaaatcttttgattataaattttttactgttttcttttatgagctcattactgctggtttttcccccatgaacttgaaatatgaacagtgctttggaaggaagattatttgctttaactttatagactgagctaaaaatagacaaatgctgtttctagtttcggaatgccatacaaacttcaaaagtaaatatgcccaattgacacagaaagtaaaatatggagaagaaaacagatattcgtagcaaaatgtaatcagaaagttggttttgaaatggcacagcattttgataaattgactattgttagggttgaagagagaagtttgtttcacaggcagatgctagtgttcatgcttatgtgtatgtacacagaacagaggcactccagagatggcatgaactttattcttgagggatcctctggaggcccatctaagttcagtcacttcctccattttgcacagtcttagggtttctaggtaggatatagccagcttttaattttgcaaggcttttggaatttagagaaggcagctggagtcactgaatatactcagagtaaagttgttggctgtttttctggctaataagaatttgaaattcatctgcaaaatcaacacataacactagaggcctagaccagtgagttcaggagcttgccaccacgcctgatgacttagctgaaatccagggccctcgtggtagacggagagaatcaacttccatagtctgtcctttgtatgtgagccatggcaaatgcacccatgtacaaaataaaaccagtaaactgagagaaagccggagacctcgatttaaacactgacacggatacactgaagtatagattgaacagccctcatctggaaatcccaaaccttctaatacgaatgtgatgccacaagtagagaaatccaggcctgtgtctgtgatactcacggtcaaatgtagatgtagaaagatgttgtatgacattacccttattctgtgtgacatcaccatcattctgtgtgacatcaccctcatgcggtgtgacatcagcatgctgagtatataagtgtagttgaaccaatctaagcttatctccaactagcttacagttactggggctaacccctagtctactcttctaactgctggcctggctgcctccccagcagtgtaccccagttactcgctgtttctcctggccatgagcttgtggtccatctcccctcacggcgccttcttctctctccccttgttctcccccttctcctcttctcaccccactcaaccaggtaactcagaagcctacctacctctaaccccctccagtaattggctgtagccatttttatttaaccgttagttttaaattaaggaacaaggattgcacaacaaaagctggtaatcgtgagaatccacttgtaggcccagacctttgggtacagaacttagcactacagtacatagcaacagaccaaacctcaacagtttaggtacagatgaaacgaagtgaattttgtattcatgcttgagtccgtacacccataccccaatctaaaacacctctgatgacgggtaccctgcctgtagaaggtgataatcgcctaaacgtatgtgctctgcctccaaataagtgctcaccagattttcttcccctttcctttaacctcttggctcttctgtccctgctttcgaagcatcgttgtcttcgaagctggctctgttttgccacctggaggccctgttctgactcttgagagacttcaaatgtgagtgtaggtgtgttctggaaaagaagtcagggttgaggagaagtggtggtttctagagttaaagggaaaaacaaaacaaaacaaaacaaaacaaaacagaaacagagcacagtcttggtggtaaatatagcaactcataaaaacaggagacaaaagcaccgagagagacccatccaggatttggatttgacagcttgttctgtcctgttttgcatatgtctgtaacacgtatctgaatgcagggcctttgactcatttgttttccctacaatttaaactcgatcatccttggagcaggagtgatagctttgtggttaagagtgtttggtgtgcaacatgagggctggagtacagattctatcactcacataagatctgggtgtggtcctgtgtacacctgttatcctgcattgaagggggcaaagaccggactgatggatggagggaaggtagctgtggctcgctggctgccaaaaaagcacaagctcactgagagcctctgcctcaaaggaacaggtggagagtgatagaggaggtaccccacatcttcctcccatctctgcaggtacacacagatgtgcgcagatgcgagcatctgctgagcatcaccacagctcagtgcattctaggtgtcatctcattcatgcccaaagccacccttaacggcaggtgctatcccgataaaggctctaggacttgacttgctaaggtcgttcagccatcaccatacaaagtgagtgtagaactgagagacatgactcatgtagtaggaaagtttgcttcacaaacctttacaaccaaccttgctctctaattccaaaatacttcatcactgcaaagagaaacccagcactcattagcagtctccccatcatacccccaacccctgctcaaaccctgccctggtgttgtctgacaagatttttcttggggagggacaatgcccacatctactcgccctgggtggggaacccatagccaagcaaagtatggataccaccaaaagtccaaattgatgaactaatggcttttattggggttgcttactggaatgtggatgaggggttccttacagggacagaaatgactcaaagacatctatattggggctggtgagatggctcagtgggtaagagcacccgactgctcttccgaaggtctgaagttcaaatcccagcaaccacatggtggctcacaaccacctgtaatgagatctgatgccctcttcaggtgtgtctgaagacagctacagtgtacttacatataattaataaaaacaaaacaaaacaaaacaaaaaagacatctatatcaccaaagccccatcccctaacatggtgacagctcacaaaatctgggaacctggaacaaattacagcctgcaagcagctcaacaggttagaggctgttctttccagggacctcagctgatctgtttcagataactcgtctgctctctgcttcttccaacccaggcagcaggtctggtctcagagtcttctttgcagcttttctggtctgagagtgactgactgcaatcttgatcatttacattgggagagaggggcctagtgaatcttattggtttcagggacttcctgaagctattttgagttgtttactttctggcttaagaagcttcaatctaggaagaaactgctagagatctgggtaaccactgacccactttctctctatacatacctgctttggacatttcatataaatgcaaccacactaaatgtagtcttttgtgactagtttatgtcaatattgcctaagtctacccatgttgtgcataatattccttcgaatgcatcttgcttagattgaactgcaggacattaagttgctaatatgtgccttttaaaaactgctgtacagtaagtgacattcatgattcacgggcaggtttttgtatagtcatctggtttccattcatacacaggcatttaaagtcctggggtttgtcttagtcagtgttctattggttcaaagagacactatgaccatagcaactcttataaaagaaagcatttagggctggagagatggctcaggggttaagagcacttactgctcttccaaaggtcctgagttcaaatcccaaccatatggtggctcacaaccatccataatgagatctgatgcccttttctgttgcatctgaagacaactacagtgtacttagatacaataaataaatctttaaaaaagaaagaaaagaacagaaagcattcaaattgggcttgcttaaattgcagaggttaagtccgtcatcaacaaggcaaggaccatggcagcatgcaggcagatacgtggctggagaagtgaatgaaggttatacatttggatttccaggcatcaggaagagaaagtgagactctggacctggcttcagcttttgaaacctcaaagctcacccccagtgacattcttcctccaacaaggccacacctcctaatccttctcaaatagttgaactctctgatgaccaaacattcacatataggagtgtggcagtggacagcattcttattcaaaccaccacagagtttttctgtacttgctattacccttaggaaatatttttttaaaaattgttttaaagatattattttatgtccgtgttcctgcttgtctgtatttgcaccacatgtgtgcaggtgcctgagatgtccagaagagggtgtcagatcgtctgaaacttgagttacatgcaatacccatttggatactgggaacagaacccaggtcctctggaagagcagtcagtgctcttaaccacagagccagcctttcagtcccacatatttttttttttctagaaacaaacttttttgactagaagagataacactcaagttgccattttgctaaatcaatgctcacctctcctctcctcccctcctgccccctcctttcatctcctaccccaccttcccactccatgtgggccatctcctccaaacctgtcctgtctagttctggaaagcccactcccccacttttattcttaccttctgaacagtgcctgacgtttgttttcaagcccagaaggccattctgtctctgcagcctgcagtcctcatcctcttgtgagcgtgcctggaagccttacctttttcttggcattttactctctggtcccagtttgcacttcctggcttttatcctccttgagggcaggattgaggtctgactcactgtctctattccctgcgaagattcccttgcctttcactgtaggtaccaatgaatattcatatgtgtgaacagaataagttccctggctagttgccaagtggttctgattcactggaaaccctactgaatttccttgtacaattagtcttacaatggtcctatttttaaccaggtcttgtggtgaggaaggagctggggagtgaggtcatgctttcttatgctctttaccctcccaggcctcctcctcctcctcctttgggttggaggcatgcagccttctgccatcttttcctgaatacgcagaccatttccagtccttgctccttgagctctcgagttaaccaatggcaccgcaggaaatcgaaaagttccactgaacgcatagcaaacagcccacagagtgggagagacatctttgccatttatatacttctgacgtgggcttgggatggacagcttgcagagagccacagaaatcaaacaccaagggcagaacttggcagaaaagctgggcaggagtgtctaggcttgtctgtggggtatggtcaggcatgacaggagcaaacgtcttccgttctgaagcctgccttcttttcatgtctcaggaagactgataaggtggtccatctgaccatcctttggaaccaccttgcgttttctggacggacactgtcaaccagggctatttgattagtctgttgcccacagcacaactttcctgtattagtgactgtgtccctaatacagacaagacacctgaccagatcaacttaggaaggaaggaaggaagaaaggaaggaaggaaggaagggtgggtctgtttttgaccagatggaggaaggagggcagccagaatgtgaggtggcaggtcacatctcatgcacagtcaggaagctgataaaagctgacactcaggtggcttcctctagtttcttcagtttgggaccctagctcatgggatggatggtccaaacctacatttaaggtggctacatttaaggtcccagctcagttcatctactgaaacttcctaatagatgtgcccagaggtgggtccctcaggtgattctaggtcctatcaagtcagtaattcctacccactccctccccttcttatagaacgtggaagtgactctcaatcctaatagatcacttactaaaatatgcatatgatacatctcataaatcttatccaagctttaagcaaacctagaagtcaacatcaataataatctctcttctccagccaaattcagttgcctggcaactgactggatggagtgtgctaatgtcagagcacgtgttctcttgagacgcatttcctatctattcgttccttactgtttccctcatggctctcccaggacctgtataactcaccttccctttacagtttctaaaaatttgatcttggtctgagagcaaccaagctacctgttctcccccacctctaggacacgtgacttgacagctagacagctgaggaccaccagcgtcctggagcaatgagttctggctgcattcagatcacctgggagctgctatacttaactgcagcctgtgattgctgcctatagaattccacgaaggtgtgggatacatattctccagtaggcatatttggggggtcagggggatgtatgtttttcaaatgagagggaaggtggcattttaagggaaattgctgtatttgtgggatgttaatattttacttttagtgaagttccagacggtaacagagaatttctttgtgcagtgtggttggtttgttgcatgttgccagtaaactaaaagagagtggggggtgggagggagaggggaaggacttttcatgtgtatttctcaaaatgcttggtgttaacatgccacacgtccctatcaaatccactcaatgtgaaagcccctgctttcccatgaaagaagtattctgtgtgctcctggcccaggccaagagacctggctcagagggaggcctttgagtatatgaacttaaggcaagttcagactggagtgtgcccgagcctgtaccctggatgcacatacgtaaacatgagtccgggattaaacaatgaaggcttcctgtctgttatttcacctgtctgtacactttctcctcgtaactcttacaagtcagagtttggtcatatctccctaccctgcactctctctctctctctctctctctctctctctctctctctctctctctcttaaagaaatgctagggttttaattacaaagctcttggtatattacctaggttggcctcaaactcaggaagtctccagcttcagcctcccgagtagctgggaatacaggcatgtgtcagcacacctggtgtaatatttaactccttattctctagaatgctatgtaaactctctttagcagcctcatcttctttggcagaaaacttagtcccaggcacttccgttttccttagacaactctagggtatcctcttccattttccagagtggctttgggacgctgggaagttctggagtgatggcaggcaatgacatcgagcgaagtccagcttttctcctttggtccttttcaactgtcgactcacatcgagactccccagtgtgccccccgcccccagcccatacttcccaccatccagaactcacttgaactatttcctcaagactctgttggttcataattcattcacaatatactttaaagaccagtgctcatgtgtaaactagtcactggatgtgtctaagaaaaagacaagttgtccattttcctctgccctcaaaggagtggggattttgttcttctagtggacaagcagctgacattgctgtagagggaactggctgaatgttctctaacccaattccgtttggagctgtgtacgtggctgtgtccaatacaaaagagtagaaactcagtcctttagataccctgcctccaatcagaagccagcttgcagccctaggttggttatctgttttggttttgttttagagtcgggggtctttatagagttcagactggcctgggattcaggatcctgcctcagcctccagactggcgggataacaaatgtgtgccccctcccaacttctagaaattaagtttcccacacctgcctcctcaggtccacttaatttggtgcaactcggggaaacaccagctattaacagatgattctttatagcagtggctctcaaccgtcctaacgctgtgaccctttcatatagttccttatgttgtggtgaccttcccctaaccataacattatttccgttgctacttcataactgtaattttgcttctgttatgaatcacagtgtaaatatctgatgtacaggatatctgctatgcaacccctgtagggtctcgacccacaggttgagaaccaccgctctataggatacaaataagatgccagagtgaattttgggggaggcacaaacattcaccttttctaagcctaacactccccaggaacctccatatgttcctccacccaaaagctatgccctgccctttgggtttttatggaccccctctttacatggtgatgattactaatagactggccagggagacccaacaaggcttgtctatgttactgttcttcacagcctctctgagcagcagtctttcctccagagatggggcaggccccacccggaatgagggaggtgcttttgtttgcttgttctgacctgctactggacaagaatagacaggtcacagagctcgtttaaggccagatccatgcaaggatgtgggggggccaggtaaagagtttctgtgacctcctttggctgaagagaaatccatttctccagttgccctttggaaagagcgtatataccagtaactgtggacaaaggccaagacatccatctcacagtgaaagtccagactgagaaaggctgagtgtctgggctgctaatggactgacaggccgtgctgaggttgttggcccgctgttcaccttgagtaccgaggttgcagaggaaggctctcgctttaatagagctttgagctttcttcttttctgtctgttccagaatgttgtgtgataacaggaggacgatgtggctgaaaggctgcaaagccctttccatccatgcttcttggtgatcttctggggatgtcacggattaatgaatgaaggccccacaggtcccaaagatgcacctggtccctttgattataactctgattgagccttgaaacattatcactcttgattttgcccacacctttatggcttatctcctacatgtgtactttaccaggaaggggaaagagaacacagccttctgttattttgcatgcccttgggcaatcgcccccaagctgaactggcttctttccttgccttaagaaataaaatgcagaagggctgagatgtcacttcggagattaattcatcaaaaggactgactcccgctttgggacactcatgctgacgtacagagtggtgaccagctctgtgatggggaacaaacaccaagtcactgagcccctaaggcccaactctcccaaggtttcctgaatcctaggcgcaagtctgggttggcttggaggtggattcttctatcacatccaggcctgggatagatacatgccactcaacctcactgccggcctgaaggcacagacacccacttaggcgcctgagttcctgcccacatgatttgttaccaatcaatttggggacaacttgttaagtggcaacagataactaacaattgataagatgtcaaatatttggtgactactaaaatacattgaaggtctttcacaatcaaagtggaaagaagaggattcatgggctgggttggccggcgggcggaggtgctgtgagcactcctttgcatcaggtactgcagacctttggacttttattttctcaatgtggaagttgggagcgtctggattggaaagtcagtttaacccctgtagcagccatgatctcaccctgccccactgccctttacctccaggttggagaggccctttgctcgtgcaccatttctttcgaggtagctgggttttacgaagccataccatacatacaaggactaggggctgggtaacacggccgcatttgtccccggctatcccgagaagttaggaagaaacgcaatggggttgggagcaacccttggaaatctgggatgcttgttgcttcagctctggttttgaaaaaaaaaacaaaaaacaggaggaagatccaccgggtggaaagcaggacagccaggcgttctctccaattctgtagttttaaaaatccaatcagaggaagaaagcgagagacttaagatttctgaagttgtacgaaaagccccggagacccggcgaatcttgcgcccctccgtcaacaggaattgaacaccccgggcttccgcagggggcgaccccagcacatcccaacttcccgcgtgagcaggtccgggtgggcggggctggggcgtgcccattcgaggggcggggcccgggaggagcccctgcatccccgccctcccccgcgctccccgcccacttccctttctcgctgcctgcccggcgggcgcgacctctcaggctgtgacgcgcggggagaggaggagcccgtaggctggccgccgtctcgggacgatgcccgcaccccgtcgcgccccgagcccgcccccggccgtcagcaggcccacgggccggcgcgtgtgagcgggagcggcggacgaggagccgccgctgggcccgcgatgtcaccattgttcagctgggtggccaaggtaggcggcggcgggctagaactagcgtggggggcggggggggggggctccaactgccggatcgcggcgcggggttggggggaggcagacgccaggccgttccagcgagcgcggagccacttttcattcattcttcctctcagcccgggagccagcctcccagaaggcgtcgcgcctgtttcctccgctggggagactgaggcacagcctgagcaccaggtgtagtcccagactgtgggaccgaccttgctgtcatgggccctctttgcttggggcggctggagtgggtcgccgaggatgttgcctgtcttttaggtttttaacctgctgctttcagaggacaagctccgagatctcggtgtatgaaaatgtaactttctgtctgcacaaagttttatgactgcagcactcgcgctttcagagccttagagatccaggccgccgcacgggggcttaacctgaaaaagtttgcggagttgccaggattccttccagccttgcctgggttctgtgtgttttgactttttgactgatggcattgctccagccatgaaaggcgcccagttcctcttgtggggtctctctgtctctctctctgtgtctctgtctctgtctctgtctctgtctctctctctctctctctgtctgtgtgtgtgtgtgtgtgtgtgtgtgtgtgtgtgtgtgtgtagctgagtaataacttaaacccgttagcttgtctctaactctttataggtagtaattaagtaggggttatagctccagttatgtgaggcattcagtgtgtgtgtgtgtgtgtgtgtgtgtgtgtgtgtggtgttttcctaattacatttctctgaatataatgggggcagatgtggcttcgcctgtcattagggtaataaagtggagacagaaactagataagggatagttatgagatgacaccaagaagcatcattccaaccctgagtcctcaccaggatcattccagaagctgtgctgctacattgagagggtctgtagaaaaattttgaccttgtacataaagtataactttctactgggaaaaaaatgataatgcctacactttagtttttaaagaatctcttaattttttaaaaaattgattatatatatatatatataaatgtacatacacacacacatataaatctcccattacagatggttgtgagcaaccatgtggttgttgagaattgaactcaggacctttggaagagcagacagttctcttaaccgctaaaccatctctccagcacatcacttaacattttctatgtaacactaaacttaaaaaaaaaaaaaagcattactgtagtttacgaagcgattcagagtatgtactcagtgtatgagttgctttattgttgttgttggtttttatattgtactgtaaaaggaaaaattgggcttcacagacatgtttcattccaacaccagcaaggcgtaaatggtaaagatctgctgctgctttttaaaaaaaaccaaccctacagtttctgtgtttttagtttcttttacttctcttctggtacatgtttactaagtcgctgttcactgtacgagtgagacagatctttgtttactttcttgtagaccaaagccttatttcaaatagcaccgaggacctctgaagactcagcctccttcaagaggttgtacttctgaagagacagccacactgagtgttcatagcttgattttgattctgagttatgctttccctgaactggtgttaaaacctgatgctaccaatagcaaaaacaatagaacaaaaacccactcagtatttttagagcaaatttctccttacctgtcacttttttaaaagaaagggttttactgtgtacccctggctgtcctggaactggcaaggtggaccaaggtggcctcagactgacagagatccatccacccttacttagtctgattgctcatgtcctggaattaaggttggatgcttccatgcccagatatatatttaacctactgtatctggtgcaattattataaattacaacttgagttaattttttttacccagtgttattttgcaagtggagaatgtgacttttatttttgagagcttatttcataaactggggtgtggtggtatatacctgtaatcccagcttggaggtggaaggaggaagatcaggagtttaaagttatccttagctaggtatgccagtctaggcttcaagaaactcagtctgaaaacaaaaacaaaaccaaaaaccaaaaccaaccaaccaaaccaaaaaaaaaaaaaaaaacaaaggaaaaaaagtcacttgggacattcactctatggggacttgtgcagacccgtgcttggtttatggtaaagactttctgttttatagtacagaatggtctaacctcggagacaaaggcttagctaacacacgatggacataatgctaacgtgcttttatgttcagttttaaaatgcctaaaatcagtcagatgcatacgggcgcgggcctcccaccacacctgtgtgtcattcagctgatttctttcccttttgacctttggaaccgaggctctgcacctggcagagaagaaaaaggggtgtggggggtgttgatgcagacggacacctgagctgccattttccttgtgtgaagagagcaatgtaataaggaaggactatacagcctagatggaaaagggtttcctaggggttttttaaacaaacacaccattgctgtgcttttagtgagacatgaattagagtgtggctaccagtgtgcattgactaaaaggtggggcagggctttgaggacagtttcttcatgaatcttccaggggacacttgtctcccatcccccattcaaaagtacaaaggaccgtctcaagcttcatcatttttagactaagcctgcagacgttcccccagccagccagacagctttgagcttgtctgatgattgactctttgcctctctgggtatctgttagtgaaagctgacctcagaaaacctgcctgcccagaaggaatgtgacttgggctattgctagtgtcacgggatgttgagtatatgtgtatatatcagttgacaaatgaaaatggcaagtggcatataaaaatgtaggcgggtttgctgtgtcttcatttcaagctctttccatatgggtttgggttgtattatttttcaggtcctgtggtttattcagagagtatgtgtgttgggtgctctctgtgtcccaggcgctactcatgcactagaggttcattttacacaacaagtttgtccttaaaaatctgtgcacattgaagattttcacttttgtttttctttgagacacagtgtcaccatatagtcttgactggcctcaaagttgtgatctccctgcctctgccttctgaagtatttgcgtttgggggtggggggcgaggaggttgcacacgtgtgtgtgtgtgtgtgtgtgtgtgtgtgtgtgtgtgtgacagggcagttttcctataaacacatggagatcctcctgcctcttcctcctatgtgttgggattaaagacatacaccaccatgtgtagctcacacttagttttataaggcaaatattttaaaatgctttaggaaaggaataattttttaaataagtaattgaatgcaaattaataaaaccaagctttttacattttgtcttcgtcgataggctcctaacatggacttaagagtgcatctgctgtatgctaggctgttgtaaggagctggggggttcgatcgcagagaggtaggccagttccctgtttttgtggtctttctaatccagagagacagagaagcaaatgataaccaaagtagttttagttggtggtcagtgctaggaagagaagtagagaaagaaatttgaggactgggtggggtggggcccagcagcagggagctggtgcagagaggtcactccaggccaggtgggtgaatgagcggtctaaagactaggctgggtgtggacttgctgttaattacagtaaggagccatagatggtggaaagcagcggtgctgtccactgctgcttgctgtggatggggtttcttaggctgtgctccaggctgcagtgtctctgttaggaggtgatggtgttagcctagacttgggtagtgaggaaggaaggtcacatcgctgtttttcagcgtttgaaatgatctgtcttgccggctgtgctcagtctgctttcctggagcgatttgttgttcaagagtacaagtgtgtcttgttctttgatcagctgctcctaaccacagccttcaggcaagtcctgtcctggctcccagcttgtatttattcactgcggaggtgctctgtgggctggagtagcccatgttgggtgccagtggtcaactggacttgctcttcaggtttctagagcatagcacggccactttagagtccctttcctgggaggggtccacctgcctgctgccagtgtttatataggcaaccttgcagtcttgcttgaagtcagtcctgtgttggtttgtccatgagatgtagccttaaagcacaggcgctttctttatatttattaatgctatatttaattagtggctgcttaagtttaataaagagcgaagaactccttaataatagtcaagccatcccttgaacttgggaaatgtgctgcctctgctaagcacagctagagtaagccacacttcagtacagctgtgggggagactgtctctgcctgtagtgatgcagattgtcttgggctaataactcaagcataggctgttcttatgaagacagaatgaaggaatgccggagtggaagacagtctccaggagaacatagcccagagcaggcctcatcatgacaacaaggttaatcatagtctgttccttgtaggagttcactaactcatcttagactgaatgtctgtaccctagtagtccccttctgtcaaaacccttctatcctctgcccttttcccggggcatctctgattaatcattcattgggtgagtagagaataatgggaagggtggggcggggctgggtttgtcagacagacttgcctggggggaaagccttgagtatgtatggtgtggggactgcagtctcttgtaggtgggggacactgggcatcagctcaggtgaggctggacaggtgacatgtgaaatgtggcctccttcagaaaagcttttatcccaggacagtggggatcctgtagagaccatagcttatcttccctcagattgtaagctgttggtccactgtgtgaggtgccttgtgttgtagatattaaagtattgtagttcttctactagtctgaaatcactgtgaaaaccagcctggggggctttgccccagtgtgtatgaatcacatgggtatcccaggtaatgtggctgtagttttcttggtctcaatgggaatacttctaatgagtgcctgggtgatgtggctggtctggggactgcactgtgagtaagaaggctctcatattttttttttaaaacatatgccataccgggcagtggtggcgcatgcctttaatcccagcacttagaaggcagaggtaggcggattttctgggttcaaggccagcctagcctggtctacaaagtgagttccaggacagccagggctacacagagaaaccctgtctcgaaaacaaacaaacaaaaacatatgccatggtttcacttgggtttttttctttctatattttgttttttattattttttgtttgtttcatctgcaagagaaacctaaaaaaagaaaatcagtgaccttgaaattggctgtctagggaaccaaagtggaagaggtacttttgtacctcatactccaacacattgtttaaaaatttgaattttttatgtagtaaccattcagtttatcaagttcaaagtctttggtgtaaacacttctttgtacttacatctttgctcaacataacattagaatattatcacagtctaggaattggagtagtgtttgatgaaaatgatactttgcctcctctcctttcttacaaaaatacatttcaagtgctattagaaccagtagacagcagagcagttgcaaagtgccggggcaaaggaccaagagggacttttcgggttgtgccaaacaaggtgggaccctcagaattggtcagggtgacatggtgaggaagaagtcctagatcttttgagacacagcgtgatgccagtgtgctctccacagctggagccagccggctgtctcccttccagtccttagttagcatgtcttgcctctgctcccggggcgtccaggctagtctgtttgcaccctcttttcacttcaactggcatgttctcttggcttccacttgtatcacatggtgcaagtgtttctccaaggaagatgacagctaaggctgtgagctggattttgataatcttaacaggaatgttgtattcgacaatgttttggtagacttatctgaaaaaaacaaaaaacaaaaaacaaaaaacaaaacaaacagtaagctgggaagatcatttcctagtgttcttgctcttttcctgcagattatttcatatctgtcgcgtgttataacaagaagagatgtgtgagctctgttggcttattttgacccgaactgttctggttaaatttgcagagcctgttttctcattctgaaacaaacaaacaaacaaacaaacaccaaacccttcatatctgtttgtttttttgtttccttttgtttgttaaaatctatttttgactaacatcagagtatgaataggaaactgaagaccatttgtaaacatagtctgttagaacctggttggataggtagttgggttgagtggatgatggttgcacagtgtgaagggctgagggaacagagatgagagatgacaacacttgcatcctttgagcattgtgtagtttaggtgggggaggtggcctgtaagggaaggttaattgcaaattaactaggctgtgtttgcagggctcagccagggttctggggagaatggaaggtgaggtctgtgtgaaatctgtaggaaagggcaaacaggtcacacacagtgtgggaggctaagggagaaagaacatggttaggaagcactagtggggaagaaatagtaccctaattgattgtccaacaccaagtagttagccactctcagcatcctgtagttaactagttacatagttaccagtttgtctaggagtggagcccccaggagatttctactttaacatgtctgtcagtgtctttgttcaggtcttgtttaggcatctatatggtagaggtatcataagtgaatcttcactctcgttctaggagagacagcctgacagatttcctggtccttgggctctgataatcttaccacccctcccccacattcttgtgtttcacagctgtcacagtcgcttcccacttttagtaccttgcataattccttctaacaccagtttttttttttttgtttttttttttaatcttgaggaaggcctattattttaaccaaattattgatacttgggtagattcagaaatgaaggcgccttttttcatcccagcacatcctatttatggttgtggctcaggtgtggaaattctggtggaacttagttctgttgttcaaagtggagtggagctttgaatgtgattccgtttgttctcttctgcataaagaagctggcgatgaaccagagcaatgaagtcaattttggtcactaagttctcatagctagtttatggctaaacttaaccccgaatttcttgtctctgggttttgtatatattaaatattgccttgctgacttgtgagtcaaagctatacatatctttgaaacaatgtattgtatttctcatatctttatttaaccacatgagagcatacttgtgaatttcagatcatggtgggcatgggaaacgtcaggggtgggtaggaattatgagcagtggttggggtgagtggagagcctttacttatgaagggtgtcattaacacaaggcccgtggcctgggagagcagctgtgtgaacggtgtgcaggtagagagtatggcctgaacctttgcagagtgagaccattgaggtccagtgtggcagagtatccctggcgctgggctgtggtgactcactggtccatttatttagttctcttgttcccaggaagactcataggaaatgagctatatgtataatggatttcctttccttcaataagggtgatggattttgtttggaaaagcattacctatattgggcatttaagagaaggggaaacttgaattaacattaaaacatggagaggaagaggtaattacatatctggacactttatgtgtgccagccatgatgggagtagccaagttctgtaacatacctgattcttggagtaattatgatcctagtgtggttgttggctcttcctatgtgtttttgctggtgtgtgcatagggaatataaagaaaccaacatttagagaagctaggtaatttaccagagccatcttaacatttaaaaaattatttattctactttatgtgatgtgttttgcctgaatgtatgtctatgcactgtgcatgcagtgccagtggaggccagaagagggggttgtatccccagaaactggagttgatagcagtcatgtgcgtgctgggattgaaccctggttctctgtaagagcaactggtgctcttaaaagtgctgagccattcctctggccccatcatagctatttttaaagttatgcttttatggacagataaaaatatatttactatacctaccatgatgttttgacatatctacagtatagaatgactaaatctagctgcctggtgtacagcttatcttacatccttactatttgtatagagagacacttcatatctgttgtcttagttcttcctaagagtatgatacatttctggctgtagtcaccagcactagctgtagtggagcagcacgagtcatagctgctaagattaaaggttgagttatatggctctaagtacagcaggctttatctgtgatagccgtgttgtctggggaggaggaggtattctcattatgaaacctggttggcagaacttggaaagattcttgtcctctgagaagtggaacttcttttcttagaagaaaggtataaaatgatcaactctaggctgcttttgaaaataggtatacaagggtgaagctagttgtgggtaacacacttccagtatccctacatatcaggagttcttggccagagagagaaggaaataggtgagagagaaaccatggtggaaagttaaagatgggtcaggattggaagaaagttaagggcaatgaggtagacccaagaggtcagtttccaggtgatggggttttcattttattggttactggattccccaccccacctttcttctttcactctgtctcctctctctttttctcttttccttcctcgttcttgtctctatagccaaggctgacctgggactcctggatgcctacctagaccttcagtgcaggtattgtgggtttgtaccagcacacgttgcttgccaagcgttctttagcttggatttctagaaataacggatataaccatatcttttcagtcggtctcttcagcttgggtgtcttagccttccctgggccccagttgctgatagatgaccatatggtgttgaatgaccactgtattcttgttccatgtggagtttgtctctgggattgcacctcagaccagagttataaatcttcctccatgtccaatacagggctcaggtccttggagccagttctgtctcactgtttctaaatgtcagtaaaaatggataaatagttttccttcaggctacttagcatttagctacttagtatagaacaattcctgagccagattaccactcaagcacgattcatcaacgccacctcattgcatttgtgggtagagaagaccgcagttgcctgttctgtttcttcttttcatttacaattgcgaccatcattattctctaatggtggtgggacttgaacctagggccctgtggatgccaggcaagcactctacctgtgagctacagtctcagcttttcctctccttaaacatgaggaaaatggagcccttcatggctgaggtgattccagctaggatgtcttaggggccagggagatggctcagtgggtaggaacacttgctattctagtgtgaggacatgagttcaaatctcccaacacccatgtgaaaatccaggtataccatgtgtacacctgcagccacagcacagcgtggggtggagataggagcattccctgggaatgcagctctgggttcagtgagagtccacatcagaagcagagggtggagaatggcagaacagaacatggcacctggcgtcctctaacacccgcctggcttctgcatgcatgcactcactgtaggtgctcccacacgcgcacttgcacacgcgcccattccctcatccacgcactggcagctgagtcccgaccagtgctgtctgtgtctttctgtgcttgctgctgtcctgcttaggtgctgtctgtctgtcgcttcgtcaggcggttctggggttaaacataagctctgtaggaccgaacaggaacacgatgctccggtcaggcatcagctcattcagatgagataagaggaacatggggggaacgtggggcagagaaattacactgctctctgcctcctggagcctgaatgtcgtcgtccaaggtcacaactctgggccttcccccttttgctgaaccaggcagagtacactacagtttctgccctttttcctctccatatgccgtgaagaattttttgttgtcaagatttttaaacaagaaaaagttggccaaccaaagacataggcacaccaattttggaaaactataaaaataggaagtttatttgttgggtgaagtttactattgtaggcctgctaaaggcagagaattagccaagaatggtattttgaggaagttatttttactgggtggacccaaaggaaaccagtcattaggtgaaaataacccaagatcctccagacagtatttgcttacagtcatttgtgactgttctattgtcaagttttttttttttttttaaatacaatgtaagttcccaagtataaatagtagagcttcagaataaagctcaaaattggcttcagaagaaacaaaaacccactaatgagtaataagcgactggctccttgtcttttgattattaacaaattatctggtaagcatgaaatactactagtatatgtactaggtcaaggccttcttattgttccagaaatagccatgttcccaagtttccaagtgagtggaaagatttctaaattattttcatttctggaaatccatgactaatgcctaggactttgcatcaccctgatgtttcggtccgttccacttgattttggtgttcgtgagagaacattacattgaggcagctctctagcgtggtaatctgctgagctgtggtgtgtggacggctttgctcccaggaaaagcatcctgtgttagaccaggagtcccaaccctgctctcatgttccgtcgtcaccccctgttgagtggactgggatagtgactttagacatttgctgagaatcttgcctgctccaggcgatcagtctgtgcaggttgaagcttactgtgcaagcccaccatgtgcacacaaagtgagaccttgcctgggagaaggcaggggtgtgcaaaggagtagttggaagccaaattccttgtagatgcctgttttacatagaattgtcttttcaaatgtgatttccaaagggctggggaatggtttagtcagcaaagggcttagtaaagggctaactgcgttaagtcaggtccagtccctagcacctaagtggatggagtctcattgtgagtgaatcagaacctgtgatcccaacattgggatagggtgggatggggtggggtggggtagaatagggtgggatagggtagatggggtggatgggggttgagacacgagcatccttgggcctcattggctagcctgtgtagttgactcaggttgttaaactcaggagtctcacaaatgagtgagctagagagatggctcggcagttaagagcacttgcagctcttgcagcttcatccccagcacccactcggtgtctaacaaatgcctgtacctccagttctaagggacctgaaattaccttctgacctctgaggttgctgcacacttgtggtgtgccaacatatatgcaggcaacacacccctgacataaaacaaacataaagctatcttaaaaaccaaaaccaaaccaaaccaaaaacgttgtcaagcaatagaggaaaacacctggcattgttgtctggctttcacatgcctgtacatgcatgcatgcatgcacacctccacacattcatgaatgaacacacagtatgttttctgtccatgagccacagatatgctctggatgtgagtagttagtaaggaatgcagtgacctggagcacccgtgtgctgacttagctgtgtggttttacattgctctaacacgtgtatgtttcatctggagtgggtagatggcagcaaagtggaaggaagggtgactctgtcctcaagcccgtcctgtgcagatctaggttgggtgcacaggttcttcgtggtcatggagcactaagcatagagtgagaaactggtaaggtttgagtctcagagtctccccctacagcatgtccctaggcatatgggcatatgttgttgttgttctgttattatcgatgttactgtggttattatctacttggaggcttaggggtttcagccaaataaggaaatctgacaccaacgattactccgtccctgcttcatcatgcaaagcaaatcctgtggtggggaaaccaaccttgactgggaatgtctggctagttctgtgtgcctgagctttgtgactcgatgccagtcactctagcccttggtggctttttttctgatctctaaagtgagcagggtgaatgaatgggtagacgagtggatgaaggaatgaatgaatggccccacccaggagttatggaagaagctgaatgagtgaaagcgtagaggaggggatgctctagatggagggagacactgcatgcctgtgattgacacaagggctgtttgcaagggagtgagataagatggtttattgacaattccgtggagaaggaccccaggacagctgggtagctattttggtagaggttggaggagggtccttgtgcagagcccgggctggagtgaaagccttgctggatgggacgggtgggatctggctgggttaagtacaggcttgaccagcacctgagatctggctcatgctgaggaatgaatagtgtgcaccctgacagttaaaagttgacagaaggaggaatgcgtagaaagaagcctcttgccaagtgtgaacctgctcacgtgggaaccagggaataaggaggcattctttaaagaggggcttggccccttgagtccagttgagaaaacaatgcaaaggcagagatgtaaatcaagcagtcctttgcggagcagagggtgataagcatctgaactggcaagcagtagaggaagacacccgcacccagagttccctggcactactgaaggaacccagaagtcctctgctagatttgggagagcagatgttttaacagtagtccaagatggctgtgcagtgcacatgaactcatgccctacccttcctgggcttatttagatattattttccccctcatccttttaaatcaagatggagtgtcactttggaaaatgtccttaggatttagagacttcagttcccttttagtagatggaatttaattgtaatgggtagatcagagttcagtctaagcaagtctcaacttctagccatactggagtgttctctggcacgggagagccagccagctgtgggccattcccagcagtagcttctgtcggctgcagtctccttatctcttgtcaggcttggtttctgtgttggttctctaggaatgttcctgatagtgagtgtctgatcctgtgaaagaagtcagcgttccccagcagggaggaaaaactgagttccacaggccctgtgctcagctagccctgaaggtggagactataagcaggttcttagtatcaccacctccaccccacaccctaaataataaataaataaataataaaaaagacacacagaaactgcatgtatttattgcgtacctggtgacattcgaaccacgactctgtgtggagctcactcacctgtctctcatttgcgagcatgtaagggtaaagccgttgctggggggtagactccctactccctgggggctggaggcccttcctacactcaagcccttagctcttcccccattctctgtgcagagctttgcacacaccacaccaccctcattgttgcttttgaagtcttctaaaatcagaacctttgcagcctgactggccagagggactgtgaggtcgtgaccccgctcttgatgtgaggttgacatttctcctaatgccctagggttttgttccttccattctttggctattcaggtcattctgtaggcttatcccagacttacagcaaactcggggccttaaatctcactcacatgaatctttggcaagctgagtctgccatgggttcttaccagctcgaggggtttttgtgtttgcaacttataatttacttatatcactgtgctcctgatgtggaagggtcttcttttaaactttctatctaatagctttctatctaagctcttacctgtctatagtagtcagtaactttgaaaagactggtttatacattttttggtgacagtgccccaaatgggacaccttcaagcccacacagacccacctgcatctgcctcccaagtgctggaattaaagatgggcatgctgcctacagactcccaatgtgagcttcacagttttaaaactctttaaagattgtaacactaacatgtatgatatataggggagaataccgtataagtatgaaaataacaaatttcttccctcaccagtcacgtaccctgtgtgaccatggtgtgaggaataacaccgtgtcagaaatttggcttctcttttaagatggtgttcacagagcagggtgaagaattgttggtcacattttccccaaaactatagggaaagctagaagttgaagtctttctgttatttgtttccattttaacctacagtgtttacctgtagcacactggaacattttcaggtaactcttgtgaattgaagtgaattgctatattttccattttatacatgtaaggtagaaaaactaaaagctgccattcttgtgccatatatagggcatctgcagggtccacggagacaaagcaagcatgacgtggtctccactacaacatctggggtgagacggagactcgcaggcagttgatgggaaagcattctagagcgagagtttcttgcctgactgtcagaagtgaaccgcaacccaaacagcagactcttgaagggaggttgcaaagattccagctgtcagggatgacacgaggctgacagttgaaaatgcacaaaatcctgccaattctgtgttggattaagttacgtacaaggactaactggacaatgaagtgtaaattgttaaattaagttgttacttgtaacatttggaacaaggtgtaatgtgtttgcattgatgaatttatagcatatggaagcccattttggtactataataaatacttgagttttgttcacaatttactttcttcaggaattacattttgtccttttaagtgagagacttcagttatagctttccatatagctgactttgggatggcagggatgtctttggtcatacatatacatataacacacacacacacacacacacacacacacacacacacaccatggttcaaagggagatgaatggtgggttatggcactgggaggcacaacttaacattgttgatcatataccctaggttctctgcacaggtgcagaaaaaaactttgagaatgtcagtacaaagcaaaatgttgagtaaagcaagcagggaagtttattaagtaaaacgatggtgtttcagaaaagtggagtgctctcttcaggagacatgaagagatatcaagagagtcagatcttggggggttttaaatagcgcatttaatgggcgaacgttaatggaatcagggaattatttttgagtattgttggttggatgatggaggaaattccagaaatggaaggcttttctgtctctcaacatgtttttcccagatatatcttaagtcagatgcatgatgtgagcagacggttttgtaaagccaaggacatggagatgccattataatacaacaaaggaccttattgctaagccctctggagattttcgtcagccatgttgttcctagctagttttgagttgtcttgctgtacagggacgatgtggttgtatcagcctccaggccccttgctccttgccccccagcccttgagtctacccagccttctttagtcagagtctttcctggggtcatcctctcctggactccttcagttcagtggtcattaatctgggctcagaggataagaggttgggttcatgcagttggatggggaaaacatctctattttcatcaacttccaactaaaatctacattattcctttgattgttaatgaactcagtaagattcattagcagctcctgtaatcgtaataacaataaaaccacagtactatgatcttctcgcaacatttttttttttttttggtatgtggtgtatgtgtaggccagaggtcaatacatcttctatgtctttctattttgtgtttttgagacagtttctctctgagcctggagctcatcaggtggctagactaagttgccagggagttccaggattcctcctgtctacatatatatttccacctccacccagcgctggggttaaaggagttcactgccatgtccaattttgctaagacactggatcgagactcggtcttcatgcttgtgtggcaagcactttactacctgagccaagccttgagcactgtatgcactgcagggctcagtcccacagcactgtatgcactgcagggctcagtcccacagcactgtatgcactgcagggctcagttctacagcactgtatgtactgcagggctcagttccacagcactgtatgtactgcagggctcagtcccacagcactgtatgccccacagcactcagtcccacagcactgtatgcactgcagggctcagtcccacagcactgtatgcactgcagggctcagtcccacagcactgtatgcactgcagggctcagtcccacagcactgtatgcactgcagggctcagtcccacagcactgtatgcactgcagggctcagtcccacagcactgtatgccccgcagggctcagtcccacagcactgtatgcactgcagggctcagtcccacagcactgtatgcactgcagggctcagtcccacagcactgtatgcattgcagggctcagtcctacagcactgtatgtactgcagggctcagtcccacagcactgtatgcactgcagggctcagtcccacagcactgtatgccccacagcactcagtcccacagcactgtatgcccctcagggctcagtcccacagcactgtatgccccgcagggctcagtcccacagcactgtatgccccgcagggctcagtcccacagcactgtatgccccacagcactcagtcccacagcactgtatgcactgcagggctcagtcccacagcactgtatgcactgcagggctcagtcccacagcactgtatgcactgcagggctcagtcccacagcactgtatgcactgcagggctcagtcccacagcactgtatgcactgcagggctcagtcctacagcactgtatgcactgcaggactcagtcccacagcactgtatgcactgcagggctcagtcccacagcactgtatccactgcagggccatttgtaagccccaggattcccttctgaccactaccatcaggttcactcccacctattctggattcagtgatttgctagtggcacatgcagttcagaaagttcttttcttatatttccccgtttaacaaagatgcatctggggaggagccagatggaagaaataaatagatcaagttttccattagggaagagaccatgcctgggttcccgtgccctctggatgtgccatctctgtgttcaccacatggggagctctggaccccattgttttgggggaaatttttgtaggttatattaataaagtgttactagttcattaattaacttggttgcaacctttgcccagttaagaggttatgatggaaccaaatttctttctttctttctttctttctttctttctttctttctttctttctttctttctctctctctctccacccccccccttccccttccccttccccttccctgtcccttcctttccttttaaaaaaggaaccaacgatttattataggttctaggacataagataaaatatttattgggtttatacaaaacttcaccaataacttagttatggttttacacctttagtgaacctgtggagctgttacaggtgatagatgtttagccagataattactcctagtagatatgcatgtaaacagaaccaaatttctaaacctcatatcattctattggctctggctctctgggggacccaccctgagtcacttattaccataaatgtaggtatgggcaagtgtcatattatgagtaactaaggacttaccatttgccactcagcaagtcccaagaattccgtattgtgagcccttgcctggagccactgtcgtcccttactctgtattctgtatcgtgagcctcttgcctagagccactgccatccctcactctgttagcattttcaccctgtactacagatgatacatttttgaaaatgctctgtgcatcattattttgagtgatattaattacagtagaatgcgactcaccagtgagtattgttaaatatggcaacaagatgttatatcaaaattatttttattagaatatcaaattcttcctattccctaggctaccattttttagatactctaaaacttaattttgagaagagataggcttcaccagtctttgaaaaaaataaaactaaagactcagtttttgtttttcctggtgtgtgtgtgtgtgtgtgtgtgagtgtagaaaattaccttgagatatacgcggtgagccacaaggaggaaagaagccctgtacctgtttctgggcttggattgtggctgatgttatgttccagggcttctcttctctgtgaagatgtattaaatgtggatcatctttgggggtgtggtggcatatgcctctagtctctctcagcactcaaaaggcagaggcaggtggatctctgtgagtttgaggccagtctgatctacagagcaggttccaggacagccagggctacacagagaaaccctgtcttcacctctgcctcctccagcccccctttttaaaggatggattattgaaaaatgacaatgattttgtttgtttcttccttggttcttgagaattcttgtggcccatggtgcccaccttggtcagttattctcctgtgctcagtcttctccctgtgtagtcagacttggtagctctgtctctgacaatttgcccatgtctgtgaaatgtggttggaactcaccacacagtgtggttgggggcccaccttgcggtgtggctgctttttgccccattcatccttggctgaagtctcaaataaattgattggcttagccttgcacagaggagacattcctatgatggaaaagcctcaccttagggtctgatgagggacaactgataaagacctggacccagctgacattaggaaatggcacaagggatgggtctcttctaaagatgcagatgttagggccctgcctcccaacagacagccccctttagactctggcaacagacataagggttaggagcactgaccattctggtgcaccgccaactttgagttaagagttggtgtattcagtgggaggggttagactgaggagccatgttttgtccaggttatattcagcaagctgaagagttctagcagcaccagtgctgccaaccaatgtcccagcttgtcagattgttttagaaactgtacagactaatttattaactttgtgtgctctgtgtgaatatatgttggtatcatgtgtttttctctattaactctcctccttattttttgagacaaggtctcttcacttcaaacctggaccttcttattttggctaggcaggacagccagtcagacccagtcataggcacatgctgccatacctgctgtttacacaggagttgggggtctgaactcaggtatgattgtatagtgagcacgttaccactcaattgtctcctgtgacccacacttaactttactgagccacctgtagctacagggttgttgttgttgttgtttttggttttagttttttcgagacagggtttctctgtgtagccctggctgtcctggaactcactttgtagatcaggctggcctcgaactcagaaatccgcctgcctctgcctcccaagtgctgggattaaaggtgtgcgccatcacgcccagctgtagccacagttttttacctcataaatggtatattttactcttctttttcataactccgacttcttaggagacagccattaaagtgtttctcaactctcgtttataagtttgtggggtggtgttggcgtggtggacagttgccgagaacttccctgacttttttttgtttgtttgtttgttttatgactctgggttttctgtttgtacatcttctgcatcttcctgggatgtagaagctactgatagaattggccatttcaaaactagggacgctgagttctgtttctctttcacatgtgacaaaagacaaaggcgttggggatagaaagataaggcagctgtaagtgagggcacatggctctgggttggggtgcactcattatcattatccctgccacatgcttctggacagccagcgagcttgcttagactcgtttgggagacggactgagtcctttagttaatgctaagcactgaggtactgattaacccagggaagctgggacagacaggatggccctaacatgggatcactctctgtgctatgtatgcagttagctttgtgttctggtatctagctagagataacatatgtgcatcttatttccctggctgggagccccgtagggtcacagggagtcgctggaggaggtgtattcgggcctctgtagttgagtttcatcctgtgagccgaactagtacacatcacaaatggtcatgtttgttatgtatggagagtggtggctggttttggttttccctgttaaataatatattgagaactgagaagagttttatttgaaattaaagacatagagggtgtggtgaggaaaaacttgatttaatgtagatttaatgtagattctcccttatgatcaacaaacaatcactaaactaattcttattatcagcagactatttttctattatatttttttaacaatatgaaacatttcctctgagggacaaagctttatttcctgcccccttttttgcagtttcaaagtggtttccctgttatgtaattgggaaagacattattgttttaaatagagcagtaatggcttttttttttttaaatgatttgttttcttttttttttttaagatttatttatttattatatgtaatacactgtagctgtcttcagacactccagaagagggagtcagatctcgttacggatggttgtgagccaccatgtggttgctgggatttgaactcctgaccttcggaagagcagtcgggtgctcttacacactgagccatctcaccagccctttttttttttttttttaactaacttttagctgcgcttattttatgctggatttacttcagtggtgtaagtttttgtttcttctggggtgtctttgtctcttccttctgtgcagcctcctcttctagctttggaggagtttattcctttccagggaggaccatctctgtggcagggcaactcgcgtgtgggttactctgtccctgggctctgagttcatcggagtgtctcaggtgcctgttcacttcaagtaaatccttcaggctagcagtacttacttaggcgcgtacagcagaaatttggcaaccctgtgaccagccccactgagcgcacctgctgttatcccactggaatgacacattgcttcttcttcttcttctttttttttttttttggtttttcgagacagggtttctctgtgtagccctggctatcctggaactcactctgtagaccaggctggccttgaactcagaaatccgcctgcctctccctccggagtgctgggattaaaggcgtgtgccaccacacccggcttgacacattgcttctttaaagtgactttgttcagttacttggtagctttttggacatatataccatttatagcctgggtagttttgtgagtgttcataaagtgaacacagaggtttgaacctcttgactttcatgattttgtagggttctttggctaagagaggaggggaccgtcttcactggtcactgcaggcctcggacaggaagcagacgctggagactttagattttcaaagagttgttaaatagttatatgttaacagccagcaaacctgtaaatgcagaatacaagtgacttttctttatattctaaagattatttcagaaatgccttcctaaatctttgtgaataaaattacagttacagtgtgcttataatcccttaaaatccccaaatccttccaaagccgacccaagtgcttgaataagggctttatttacagatttatcgctgattcttgaatatcgttttccctctctatgaaatagtactgacttgcgcctgccccaaaacctgcctttacttgcagccattagtatgaggattctctacacctaaacaggcctgcttaatttgggacaattgatcttaattacctaacatttttgttgtggttcccatagtatcagaaactttaaccaaacccaaatccttattagatttatttattccagggaaacattttcagctcctttcctcggctctgttagtttggatttgctttatcggcttatctgcaaacaggaatgacgtagctcttagccctctgaccgcactaggcaagattttcattaaaagtaccagatcttatcagagggaataattctccagttcatttgccccgaaaaggtctttgtttgttttggcaggagtcattgtcacttgatgtatatgtatgtccctataacccatacaggctggtttttggttgtgtttattgtgggcttaatattgacaactctccttgtacgtatctgtgagcttcaagctccaaccggcctactttcatgtgactggtctccctgcctttaagacatctttgcttcacccttgccttgcctccatcctgcctcactgtgtgctcttctctagtcccttcagtcttccaggacccttttgttcccttctgttgcacccctcccccgcaccccacccccatctccccccaaccccttctcctgcaggagctggtctcctagctggtctactttactcccaatgtactaccttcctggtgttgagtggcaggaggcttgagagtaaattgatgtctaaatagtgaggcccaccagagcaaggaaagatgggccttggtctttgaatgaagtctatctgttttttattctaatcaaagcactggagaaatctgtggttaggaaacaatggcagcctgaactctgaccagggtgtggtgtgcccgtcagctccttctgagtccggaatgaaggggccacttgagtgccttggtctgaatctgttccattcattgccgagttgctattagttcatctggctaatacactttccccctctttgaaacacaatgaaaaccatcattgctctcttgaggtattggaaggtgtaatgtatggaaaaattggatatttttgcagacttcagaagatggaataagctgcatttttctgctcagaaagaacagttaataattgggaaacatttgactcctataaaatagtctcacaccatcactaagaaagtggtaacacttccaaagtctaagtcggcaattttgatttgaaggaacaccattcttaccgtgcagaaccaactttttcttaggaaatcttcggtgcttctgatcttacaagcctctcttccccagagagaagccatggcttttgttttttgctttgatcctgtgaatcattagcaaagttgtagctgtagcgtagacttcccgctgtttcttttctctgtgatatcttctctccgtagccttttctaggctgccacacgatgtacacactgatttgcagtatggaatgagctatagcaggagcatgtaaagtcctcaatgcagacaggattaccaggcaaaacctcagcctcggactgtcaggatggctcagctggtgtggacgcgtgctgacaaagctaagggcttgagttctgtccctgggtcacatgacggagagaaagaactgaggccacaggttgtcctctgacctccagggcacaccaaagaatgtacccagtgcctcctgcacttgtaccctatttttaaaatctagccatttgtttgtttgtttgctttggaggcagtccctctgtgtagtcctggttgttctgcagtctatgtagatgaggctggcctaaaagttacagagatccacctgtgtctttctctgcagtgctgggattaaaggcctctgccattgtgaccagctaaaaatacagcttttaaatattaaatctgtgcttcgggaatcactttttttttttaaagattgtgtgtgtgtgtgtgtgtgtgtgtttcctacacatatttttgtgtacttcatgcatgcagtacccaaggagaccagaagagagttatatatagatggtggtcagccaccatgatgctgctgggaattgaaccctggttttctgaaagagcattaagtgtctttacctgctgagccaactctccagacttggaatcatattttaaaaatgtgtctctaaatataactttgactcttcagcgggtttttgagagttatgtcatggcacagaacacaagcttgctttcaaatgaactggagtcatctttctttacagtgcacactggttggaatttttacctgaattggaaaaagggattggaattttctggttaggatgttaaataaacaagggcctataggtgtttgggcttcagccagaagtcttagacacagaaaaaatactgggaaatactggtccaaatacatgtgtccagtcaaagcagaaactgtcccagcagccagaagattaagcccatggcaacaagtccagggttcttgcaaaccatgacgtcccacaagtgctgtggctgctggtcacttggctctggtgtcgcacccctcttatatctgaagctgctgaggagaacctagcataagtggacaagatggagtggcagggatgccgaagggtgggagagcctctcctctgagatgtttacgatgggaaagcaaagctgtttgtgagaagcctcagtggtttactgtggcaggaggcatgggttctccgtcctttatcaatccacattaggaaatacaggatcaagtcataacttgttagttgccaattaaaagaacaacggtgccgtaatttcaataagcgtaagagcctttcgcctcaccacatactgaggaaggcttttctaaggacactagactcttcagagtgagctagtatgtttaggtaacagtatcagagacaaagcccagtggagatgccctgaggaccttaggggttacaatgcaaggccaccctgggacttgtcgtttaaccttagagagtgctgtgatctgtgagccagtacagcccagcccctccatcagccagggtccctgctcctcaagctgtggttctgagctgtgaccttggtatttggtcccactgctgccaggtgtctctaaccacaccctcttttgcacaggtgcctgagatcatcagctccatccggcaggccgggaagattgcccgccaggaagagctgcgttgcccctccgagttcgacgataccttcgccaaaaagttcgaggtgctcttctgtggccgggtgactgtggctcacaagaaggccccacccgcactgattgacgagtgtatcgagaagttcaaccatgtgagctgtggtcgcagaacggactgggaagcgcccaccgggcagccatcagcgcctggccccaggcccatgcgcaaatccttctcacagcctggactgcgctcgctggccttcaggaaggagttccaggacgctagcctccgcagtagcacctttagctcctttgacaatgacatagagaaccacctcatcggtgggcacaatgtggttcagcccacagacatggaggagaaccgaactatgctgttcacggtaaaatctgtcggttttttgcagcttgaggtctgaaaaatctgtcttacacatccatgtttgtagacaccctttcactgcagaatatagttatataaaagaggttcaagagggatgttagagcaatatgtttcaacacaattttaagtgggaaatattaatttataaaacacccattgttaatcaaggtaacaggatttttttaaattaggtatttatttcatttacttttccaatgctatcccaggtaactggatttttttaaataacctgatatttaaaacttataaccaaactaaaatcctagactagttgctttgttgtttgttgtttgttttgttttttaaacagaaaattgttaaactgataaccacagggaaggaaaggaatggataagccatactcagtcagctaaggggttgcatgctggcttgtggttttccggatgggtgattttcctgggtgtgagttgacaggaaagtgagctgtctgtcgcctataaaggaagtgaccaaagctgccttagatgtagtgtatagccttactgtgcttaagctaaggcagtgaaatggcccaggactagggaagctgacacaggttagtgtggtgtggatagagccggctttaaaagtccagatgcttggatctggagagatggctcagcctctaagagcacatactgcctttacagaggagtttggttcccagcacccacatcaggcagcttgcaactgcttataatttcacatgcatccatgtgcgcatgcacgtgcgtgtatacacacacacacacacacacacacacacacagttaaaatataataaattaatctttaagaagtccagatgctgtgtcagggtactctacctagtacactaaggatgctgggtggctgtagcacttgggctgcacacggtgatctgtgtgctcttccccagacactgcagtgttgttgagaaagctgctcagtgcatctaagtggctacaatctgctagaaatgcatctgcaaatagactcagcccacacagaatgcagattccagcaatgcagacaggcacctgacgcaccagtaattacgattaagttgacagacactacggagaagtagtggacgctgtggaaacgcctggggactcaggagaggcatcttcgaggatgtgattctccccaggcagaggttccctgtggccgataggcggggtctcctgggctcagagagcagcaggtgagatgggagaagggtgggaaggagctgcactgcagattcctgaagacactgctccactgctctgcctggcagcccctcagccgccctggctttacttccttccttcaggtctctcctgaggtacagatgtgacacgggaagtagtcgcctcagagaccaatagcactcacagccctggctctaagcttaattacaagtaaacaaataaagaactttgtgttcctgtgatccctggaatttcagtctccatgaggctggagacctccgtctgttgtttgccgccatagtcaccagggcctagaccttggtgacccaggattctcaggtagatccttagtgagacggtcgacagactacagaaattgggaaagtgactggggacggggctacagtgcttagtcaggctccattcttcacaaccttatagctcacgctcagaattttgtttttagtcaaaaaaattggacagtcactgaaagatttaaagtatggcattaaatagttctggctgtagagcaaagaaatacatagggaaggaaaatgaacagagggctaagaagccattgtcatagtccaggtgagaggtagggagcttagaatatgaagacagtagggttgaagagaggtggacagaggtgcaaggcctcaggtagataagggtgtaaggcctcagggaaacaagggtgcaaggcctcaggtagacaggggtgagaggcctcaggtaggcaggggtgagaggcctcaggtagacaggggtgcaaggcctcaggtaggcaggggtgagaggcctcaggtagacaggggtgcaaggcctcaggtaggcaggggtgagaggcctcaggtaggcaggggtgagaggcctcaggtaggcaggggtgagaggcctcaggtaggcaggggtgagaggcctcaggtagacagaggtacacagcctcaggtaggcaggagtgcatgcctgacatgggacagagtggtggactagatgtgagaagacccccaggctcacatctgactttaaattgtcatttgttccttataacctagctatatccaaataagaatgctgctcagctgagagagtttaaaaaaaatgatgatcctcttcatcatatagatgaaaacagaagagtgctaggatgaaatgtacacaatgtggggatgcagttactgttgtcgagtaagggcgatgctgagtgggtgcctccctaggacaacccagagtctgggccacttgagaagtgtgctgctgtctcagtgatggtggctactacccttgagttctgtgcaccttgtcagtcctgcttgcctgaaggatacctcagaaatactaagcaaaaactgctctgtacaaacctacagtctgaactacagaatgcatggtttggacatcttcattaagggtgcagtcccttttggtttgtacctctgactgtagtccagatccaagggtaaagagcttggaagaggagcttgagcgttaagagtgccccgaggatgtgactgctaacttgtggatcccaaggagggactgaatctgcagaaaccaacacacaggaagggggagtgccagcatgtggaggcagagctcaggcaccttccacagccggccaggcactcggctgccgtaggtgtttggaagttttaaataggcacttttgttttctggaatattcacttgtatagaaaactatatatgaaggcgatgcgggctttgaggattgtttggggattactactattacggtttagattctggggtcttttcttctgagaatactgatgtatcatgtcgctatttgtctgctgtcacgtgcatcagtggcataagctgtaacctctgaaactcctaacagtgatgtgttggagttttataagagttgcctctacttcctcataggtcatgacatgtatattgaattcagtttttaggagaaccacatgtctttctttttgtttgtgtttttaagattggccaatctgaagtttacctcatcagtcctgacaccaaaaagattgcactggagaaaaattttaaggagatatccttttgctctcaggtaaattcacagggattattgatttaattaggcaggggagggggatggactaggggggttccggaggggagacctggaaaggggaaaacatttgaaatgtaaatcaagaaaatatcccgatggatgcagtagacatacatgtgtaaaaacaaagcatgcttttgatgcttgattggtggtctctgtcttacagtgtaaggcaaattataatcttgaagttaacaattttgcttttttggagcaatactggagaaaataggtctgccttcctttctttttttttttttttccttttccattttttattaggtatttagctcatttacatttccagtgctataccaaaagtcccccatagccatccacccccactcccctacccacccactccccttttttggccctggcgttcccctactggggcatataaagtttgcgtgtccaatgggcctctctttccagtgatggccgactaggccatctttttttttttttttaaagatagatttatttatttatttatttatttatttatttattatatgtaaatacactgtagctgtcttcagacacaccaggagagggagtcagatcttgttacggatggttgtgagccaccatgtggttgctgggatttgaactctggaccttcagaagagcagtcgggtactcttacccactgagccatctcaccagcccctaggccatcttttgatacatatgtagctagagtcaagagctccggggtactggttagttcataatgttgatccacctatagggttgcagatccctttagctccttgggtactttctctagctcctccattgggggccctgtgatccatccattagctgactgtgagcatccacttctgtgtttgctactgccttcctttcttttccctgttattggtactaatgctttccagggacttatattgtgtgcatgtgttatttataattggtatgcatgtgtgtgcccatgttttatatataattgacatatatgtgtgcatatggcttatacataattatatatgtgtgttttatatataagttgtagagaaacatatttctactttcttgaagttcttattttttatgttgtcatcatttcttctgtgaactgtgagagatgatacttatctttgaggaggttttcacccaggatgcagtgtctgcttgaaactttctgtgtttgatagttagtcttccagctgtgattcatagacagatttgggggggatctgtcactgtgatgagccaggtttctccagattgtcctgacaaataaaatatcatttacataactgtttggtgacttattttttttcttaaactctaacttttcatgtctgtaatacgatgcaaaaatcttggttgtttgttaatcaaaaatgtaagctagttaagtcatcaaaaagataatactttcaattatgaaaataagcatcgtccttaacaagttgaatagaaggtactttgataaatgacatcccccatgcagcagcctctgctactgcttagtttgttgatggaggacactgattgggatcaggatatatcagcaattactgactggaaatgcttgcctaaaagtaatggtatccacagaaccttgatttactcctaattatgtagaaatattgatgttagatcttgtcttctctctctctctctctctctctctctctctctctctctctctctctctcgataaagtttctctgtgcagtccctgctgtcctggaactcactatgtagccattctggtctctgaactcacagagatctacctgcctgcctctgcccccgatccccacgccgagtgctgggactagagctgggcaccactgcactgggagacctttgccttttttagagccgtgtggtgctttagtctgtcttaaagaagtgaggttggtcagatcatctcagcctaagttactagcacccacatttctgcgtggtgatgctttcagaggcttgatacattgatagttatagtgggggaagtcaccgtggacacgtgcatgcaggtgctcagcttcctctctttcttgttcagtccagggtgtggccatgcgccatccacattcagcgtgggtctactcagctcaagtgatgtaataaaatccccaccgatactctcagaggcctttctcccaggtgactctccattacctcagttgacagtgacagctaatggttggtgctggagctaggcttactgttggagagcacgtgctgctttgctgagggcccaggttctattccagcactcacatgggggtttataactgtgtctcattccacttcagtgtccactggcaccaggcgtgcacacagtacacatatgtacatagaggcaagatactcattcacattaaataagtctaaaaaagttaaagagaccctgcacagttgttctggtagatttgtgaggcagcaaccaaggctgtctctcagcatctgttcctggcaaatttaagtcatgtttgtgtgttaagaagagcttgtggggcattggcagagttctcacctttgtttccaagttttcgaagctgctcttctggatttataagtcattttttgctcattcttcatgcagttccgtttactattggcttgcaattttagtacaaatgcattttgatttgtttttaacctttatatatgtgaattgtgtatacatattgttcctatgtcttggttgtgaatgtgtgtgttaatctcttgtgtgctgttgatttttatttttagtgtttacaccttagtgttcctcctgtaccacctccccaaagttctagtttttctgtcagctactctgcatatcttttagtactaaagtgagcattcggacttgaatgtgcaaaccttgactctcgcatgatcaaagtgatattttgctatgatgctaatcatcatttgaagatatgtgctcagtgctctataaatgggcagcgtcaccaggggctgtcttcagccagcacagcagtgctcagtacaacgtccccccttctccacagggcatcagacatgtggaccactttggattcatctgccgagagtgctcgggtggcggcagtggcggctttcattttgtctgttacgtgttccagtgcacaaatgaagctctggtaagaggacgacactgcccactgcaaaccttgtgagcaatttcaatcctgctgagtcttccaggctggtcaaagctggagagccttgctgatagagcagtatttgccttaattatccactcgtgactaatacctttctgctacgcatccgagagactcatttgcattttcattttaaatttcaatatttttgaaagatatgcttgctttcaccctctgctctaatgctgcatttagagttctaatgcattcattttacccgagtgtggtagccctgttcttgtaagtcccagtatgtaggctggaggtaggaagactggaagctttagagctgtccagcaagttcatgaccctctgttgtgaggaaagaaggaaggaaggaaagagaaaggaaaggaaaggaaaagaggaagaaagaagaaaaagagagagagaggaaggaaggtaggtaggtagaaaaggaactcctgtggactttggaccggaggcccttgctctatactcagttacaatgttcttaccttgtgtctcacctgttttaagagtgctgacgctagaggagtcatcctctgacaacaaaaagcaaccctagcaattatttccactatttcctgtcagtctgtgaaaaatagcccagaaaaaacaatttaccacacaaagtctgtcctgtgagcttgctgccgccgtcggtcagccggtcggtcggcccagctgacttgctgttgacccttggctcctctgtgcaggttgacgagatcatgatgactctgaagcaggctttcacggtagctgcggtgcagcagacggctaaggcaccagcccagctctgtgagggctgccccttgcaaggcctgcacaagctctgcgaaaggatagagggtgagtagggggcacttttagcgtgtagcaccaaggccttgggtgggagtgcttgtggcactactctgtagggccatgtcagagggatcatagacgacctcacatcgtgcagtggatgtgttctgtgtgacaagaatctttcctgggcatgatggagacaaagctaaggacccacaccccctcttgccatctctcctccaagacaccctgggaggaataaagaggttaggaatgcatgtggtccaacatttactgagctgtgtgagaatggtgggtctttcagattgaacaccacagagatctagtgaaaggagacctaagaagtttaccatgttttctagtagagagtcacctgcagttctgccagggcagttttaatggaggagagcagaaaacgggtcctgattgagaagtgagtggggaggaataaaaaccaaaaccccaaaaccatggtgacaatcttaactacagtttctagaggcttatgaaatgtcaccatttgcaggatttatttgatagtaagagttactgtttggtagtaagcctttctatctaggtgtatggtttttgagattgtcacatgatttaaattatctgattgtagaaacaaaggcatgatcatcttgtgtatctagaatacttgtcacaaactataattcggtaaagaaaaactatattgacatttagacctagtttctctctctctttttttcctaagtaattgtgggaaacagtgcttagaggtttttaaaagatactgtcaattttaacttcatcatggtgtgaagaaaaagtaaaattatttataattttataaataaattgagaggttagagccatctagggataaactcgggtattgcaagccccggatccactgtctgactaccaggcaggcgctacctgcagctaccctctcagaagaggaaggagctctcttgggtgagaactgttcaggctagggtgaagtctggccctggtcatcagggaggggcagcagatagggtggtagtgagtggtcaggactcctatggaggaatctgggaagaagtattgtgtgccctttttcttcactttgcatctaattctattttgtaggtgtatggtttttgatattgtcatatgatttaaattatccaattgtagaaacaaaggcatgatcatttcttatgtatctcgaatacgtgtcacaaactgtaattctataaagaaaaactatattgacatttagatctatttcttctttttctaagtaattgtggggaaaagtatacccagatatacaatgtatcgttttcaccttttttttttttttagagtctggttcttgagtaaggttcccactgctctcctttcatcttcctgagtcacagctctctcccccttgtaacttgccacagccccaggcagccaccgttctactttgtgttttcctctgtgtgtgtgtgtgtgtgtgtgtgtgtgtgtgtgtgtgtgtgtgtgtgttggggtaatttgtggtgtgtgaatgtatacatatgtgtgcctgtgtgtgtagaagccagagcagggacatggctgttttcctttgactttctctgccttgttgacttcagacaggatttctcactgaaccagagctggttttggctggattagtccggctggtaagtgctgagagtctatttgtctctgttccctgtgcaggagttagaggcccgagcagcgtgccctgctttgattggaggttcagtgacttactgaggtctcttaccactgagctttctccctttctgattctacaatttgagttaatctaggtaccctgtatagtggaatcagtaggatttggtttcttggttttggtttctttcacttagcattgcatcttctgggtttgctcattttatacatgtcaggatcctatttctttctttggctgaataatattctatcagttgattcatttattcatcactggacattccggttcttttggccttttcctgtgtgagcagtagtgctaagaattttggtatacacacatctgttcaggtttctgctttccattctttagagttagtgaatttgctacttcatatggtgagtgttcatatgggtttctgttgctgtggtgaaacaccatatccaaagcaatttggggacgaaagggtttatttggtttatacttccacatcaaggttaattattgaaggaagccaggataggaagtcaaacagggcaggaacctggaggcccaaggtgatatggaggggtgctgcttacaggcttgcaacccatggcttgctcagcctgctttcttatagaaaccatgatgactggcctagggatagcaccgcccacaatgggctgggccccccatcaatcactaatgaagaaaatgccctataggcttgcatatagcccagtcttatggagacattttctcaatcaaagttccctcctttcagacaacttttgcttctgtcaagttgatataaaaccagccgcacagtgtgtctgtttaactttcaagccttcctgtactcttctataataattatatccccattattcactgatcctaacttctctgcatccttacagaaatgatttttataatggtagctgtcctaataggtatgaaatgttacctggttatttttttatgagataaattaatataaacatcataaagcctgaaaagcttcacgttggtcattacagtgctctagaaagaagcatgattgattcatttaaaaaaaaatatttccatgtcgttactgcttgctgacagcatataaactatatctggaatgagagttttgctttaacgagagagcgcaactgagaggctcgctagcgctttccacacgagctgtcaagataaggcagatgatggtagaaatgaccctacgggccagcagtgacttggcccttacaggcagaggagatcttgatctgcagagctggctcctgctgagttccacttggtaaatcagcattgggcctgagcatgcagaaagttacagctggaggttctatttgggaccaagggtttgctgttgtggtttggagaataatcattcacttcccttttacatgttaacatccaaccgcggcagaaaactgtacagctatagagagcatccattaactattaaacagagccacgaggcgtctgggagtgggtgttttactcactgtgtgtgaaacattactagcggaatagatggtgagctatgaaaggccaccttggaagaagaacaaattttgggtcctttaatttttatggttgcaagtccaataaggagaatggaatgatttcttggaagccgttgtaagggtggtcttgggtggggacggatctcagtggtagcatcctgacctagcatgcgtgaggccccaggttctaggccaacaactcccaccaagcattttatcattgccagttgagcatccctaatcctgaaatataaaaggctccaaagtcagcaaggctgtggctcagtggcagagtacttgccttgcttgcataacaccctgggttcaattccgtatactgcaacccccctccccactcccaaagaaagttcttctatcaggaagttatgttctgaccaagcagtccacaaactataggaaggaccagtaacatgaccataagaagaaagaattagagaatttttttcattattttatgtatatgagtacactgtagctgtacagatagttgtgagccttcatgtggttgttgggaattgaattttggacctctgcttgcttcagtcagccctgctcgctccggctcaaagatttatttatttattataaataagtacactgtagctgccttcacaccagaagaaggcatcagatctcattatgggtggttgtgagccactatgtggttgctgggatttgaactcaggacctttggaaaagcagtcagtgctcttacccgctgagccatcccgccatcccgagagtgttttcttaatgagttgatgtagttgagttatgtcccagaatgtataaaataggagaaatacatgtgtatttattctaaatacacaaataatgtatgtgtgggtacaccacatactcagtgctagcatgctagcacaggttctaagaatcaaagctactctggagtatgtacttgaatcttataaccataaagccgctatgatacttaaagaacattttgcttatttccaagtttagaggaataggagattgctaaaattaatcatgctctctctgaaaaacaacatattgagttggggtagacgggtataccgtggtgaggtgaggtatcttgagtttagctaggcccagtcagaggacccgaccatgagtatggtgaagaagaggccgaggcttaggattcagcctgaggttttcagtgtgtggtctaactattctagtctaactttcctagaggcctgaagcttccctgactggctaacagtgcagagtttgttgcttagactagatcagggaccttttttttttatatttggaaaggtttttagttggttttcactgggtacttattaaacttagacaccattgtgcttcagtattgaagtattgctacagaaagccttgagcctgcccctctggccttttctctacctcatccctcctctgtattcacttatgtcctggagccatctgtgtgttggaccacgtgattctaccaatccatagtgatctggttctggaagcagacaacttacctccttagttggacaaaatatatgattttagcatcttggtttcttatctatacattgagattactaaaaacagggctggcaggatgactcagtgggtaagagcactttctgctcttccaaaggtcctgagttcaaatcccagcaaccacatggtggctcacaaccacccataatgagatctgactccctcttctggttcatctgaagtcagctacagtgtacttatgtataataataaataaatctttaaaaaataaaaataaataaaccatcatgtaaacattaaaaaaaagattactaaaaaaataatctgtgattactttgagatctcaacataggaagtactgaatgaaatggcattagttttatggtggccttgtagagttcatcttggtttaagacaaaataaggaaaaaacattctggaagcggaagtgcctgctggactttgcatagggtcagtaccttgtgcctgtgtagccagtaaggagggctgggctgacctccaactgaaagaagagagagggacactggctttgggacagagtagctactgacagacttctggcctctcgtgagttcccaagtcatgagctgtggacacgcacactcagctgtgcagtggaagtatgtttcctgagtcacccggctccgtgctctggcagcctcctttctctccagccctcctccgtggagatgctttgaccactgcccctgctacttaactaagtagtcacagtctttacttagctgccccccagggccctgtaagcacatcctgctgtgcagaagttcccatgcagccttagctgccgctcaggaggttcattgtttgacagagtgaaacaaaccgtttaaatcaattgaattccattctttgagtctccctgctccccactccagctctacatacctggttttggtatgatgtaattgtcggttttatttataaaacctaccctgcctcactcaattcagggccaagaggtttttttggtggcaggagtttgctctttgtcaccatcttgaataaaggactcttgtttggccttatatttctggtggccataaattatttcactataagctttgtccagcccctgagcagggctccttcctcagcatggggagacttgggctagcagaagctagcaataggtctttattccgtggaggtcagactaaccagttctcagacttcacatgttctctgactctatacctgacatcaaaaaaccacaaactaagccctgtactgtattcatgcagggatggaatgtcttgagattgtaatcggtgctgggcttttatgtggtcatttttatagcgtttcctcagaatcctcggtaatggcaatggtctggtcttaagacaattaaacacgcgatgagtgtcagccacacaagggcgtgtgtctgttgggatgtaagtggaagtcaagggagaggtaggattcagtttcaaatcagcaccagctgcttgttattaagagtggattcacgttctcttgtagttagaagagtttgtcattgttgaaggaaatgtttgggttgccttcagcattttaacaccaaacagtaatttggagctgtgtgcacctcgggcagagtatacaagggccgcatttgaagtggctttataaaactctgtgtccttggtcttcctgcgtatgagatttggataatatcacactcgtggagttgtcttgagaattcagtgaaattcaagttgggtctcggagtgcagctcctcacacagcagcattcagtgagttcacagtgatgctattgtcaaatctagtgtcctgaagtgggtggtgagaaggtgaaggaaatgagtttgggaggtggtaaatccaactcaggactccccccacagaccccttgtctttttctctcttctcgacaggaatgaattcatctaaaaccaaattagaactccagaagcacttgaccacactgaccaatcaggagcaggccaccatattcgaggaggttcaggtacagtagccgggaagcacagcagggagcgtgcttgtggagtgtcctgtgggtggtgaggagtcagcggtgccaccacttcccaggggcatgagccagtgtcctgttaaaacctgggtagaccaggaggcaggaggccacatgctctcctttgctcctgggagcctccgtcagtctcttcccatgaagtcacaaggcatttgtacatgggtttgagcacaactggcccttctgtattttttgttgtctgttttgaaaatgtatgtgtcatatgttagagccttaaactgaaacgcaaaaatcaaaacagactgaaaccagcaaacacagaagcacacacatgagctgcatgcgttagacctggaagtctgcttttaccatgcttgaagctgctgcatctggggaaaccaggccacagtgtcaggcctgcctaaggcctgcttgtcaggagggagctcaacacggatttcatgtctgccagaacctggagccatttttgtggggttttggcaagtgcagtaagacaaagaattaatacgtctttgcgtgtgtgcatgtgtgtgtgttgtgtgtgcccactagtgccttgtcaagttccacagttaggggccaactaaaccagacaagcaggtagccatgcctttgttctcatccctgtgagggaggggatgaaaaggctcagctttctttctgttctcactaaagttcttcagttcccttgttctgtaggcttggcatacatttgtagaaagaataggaagattttgtggtggttgttttcatttagcagatggccttgagggttgttttatttgcctgtgctttgcttcttattcttaatgcattgcaactgcagccaaggccatcagtgtgaacccacttaggccacggtgctaccaggtcactcgagagcatcttcctggcaggcaggcaggcaggcagggaagatgcacctcccttccctaatggttttcactttgatgtagacagcaccacgtagctttccctgagcagaggggcggtgccttaggaaggcagttcccaaaaccctcctgcactgcaaacaggctgtttgatgtcctcctgcagtagcaaggagtctaatggacatgccccctctcgtctgtgagcagagacatgggaaaacagcacataataaaaggacctggaatatggcgagaaaactgaaaatcacggaaaatgannnnnnnnnnnnnnnnnnnnacccctctcgtctgtgagcagagacatggggaaaacagcacataataaaagtgtacttgaaaagcagagctattgtgatgctattgcagagtgcaagttagtgctctccgcagctctagattctgatggctctgaagagcagaagcagtcatgttgttcactggctgagaaaacccagctcatcctttaccttccaccgatgcagacgtaggcttttttgagagatacatatttgatcttccatgatggcatgttgatggtcttcctgaatggctttcatggtttttctagtcttggtcacttatcagtgactgtccctactaacgtatttgaaaattcacataggtcaaaaaggtcatataaaaatgtgatgtaatctttcctggagggcaatttatttctgaaaagctctcccaaaggtcaattattataaagccaatgtaattaccattaacaatgatgcatactgtgtcgttagtaatgatgcgtatcatactaagtgtttttttaggagaaagctttaataactaggcaaatgtgctggagatgatggtggctgaccttgaaccctcagagtactcaatagcggacgggctctggggtgttagcctgtcctcacctgaaagacctcaggacaccacacaactaccattttatttacaaggtgcttgacagaatatttcaaacatgagcaggggtcacctgtggcagggacatccagggtcctgctctcttctcctgctgtcctaatcgtctttgttttgtttgtttgtttgtttttttgttttgttttgtttttttttttttgaggcagggtttctctgtgtagccctggctgtcctggaactcactctgtagatcaggctggcctcaaactcagaaatccgcctgcctctgcctcctgagtgctgggtttaaaggcgtgcgccaccaacgcccggcttgtcctaatctttttaagtgccccagattgtactagccatcttcagcagaaatatctgccttcaagctgacattgcaacagtgatagtaaaaacaatggctccaagtctttagttaaatccttagcgtggtattcaagcaaagcgcagcttacctggcattctcacagcaaagcaaggcctacctggtgtccttgcagcgtcttatcccttcttaagctttctcagtgtttgcatcctcactatcagtgtcagaggtttctctgttgcttttatggtactctagaggacccttggggaaacaaggttgagaaactaactttcagtacttttcccaagcagcttggctgttttgattgtttaaatggacatataacacatttatagaaaagcacacaagtggatgctgtatgcaccatttcggtcagcactgagggtgagcatggagccttttctctgctgctgaatgcacctgtcactgtcctagatatcactgcccctggtaactgccataccagcttctggcacctctgactgtgaacaaattattgaccacaaagtgatgctactcaacttgattcataatcatttttgtgattgtcactctgattaatggatgtgaataaaaactgaaagaagtagtggtttagccactgtagagaatggtgaaccacaggagagattttagggtggcgacacatccctgatcttcttgaatgcagtgggagggtagcgtcgccatacttcaaaaagattctgaggaagtatttatttcttgactctgtgacaccacagataatgcatttctgctgcgctgcagccattgcctggggtggttaatgagttcgttgggggtctcctggctcctgcagtacttccccatgcctgcttgttacttcatttttctgtcagtttgaagttttgaccccctctctctggatctctgttgttggtatgtgtgtgcacgagcactcagagttgcactgcatagttcccgtgatcagactgaggtcagatggttggcagtgagtgcctttatccgctgaggcatcttatcaacctttaaaacttgcaattccaaatgaccttttccggaaggctggattatcagaattctggattaagctttccttatcgttaatgcttgtgactctaaggataacgccaatgtcccttcgttagctgggaagaaattagccagtggtggcactgacacagactctgctgcgtgtgtagctgatccgtccgctcgtcattcctgacctgttcaagggcaggccacagtctggagttagagaagaacaaggcggatggccaggaactctgtgtctctctggggtgatttgggcaattggttttattttcattcacagaaaggaatgtgttgaattagatgacttctgaaaataccctgtggctgataattcaaatgcaaagatttggaaggtggaggggagagcccacagtattttgtgaaccactatggctaggtgggatgagtggtaactaaaacctgcatgttctcatttgttaagcagtgtgccttgccactgctggcaaattaaacgtccttgtgaatttaaaaaaggagagctaaaggaccagagagagggtagaaagggagggacagagacagaggaggaggggagaggagggcgtgggaggacgactgagaacttggcatacacgtgttcatcaaagtgtctgcttcacagggacacacgggccacatgacgggaacactcaccccgtaacagcttgaccctggatccaattgacgagttcctttctagatccccagtcttaagagcttataaatgtgtaaccattatgacttgactctgggtgtttacatagattttgttttatctctttttaaaagctgtttatttattaactattttgacccccactatttgacgttaaaatttttatcttgggtaaaaggacatcgaagatgactcctaaatacggcccagttagctctgccctccgttcggttaaacagttgcctgcactcttagggtgactggtgccccctagtgaggtcatggaagaaaagcactcgttcctgggtggaggttgttagcacactgcagttttgtcgacaataagaaaagaaatgtaatgtttatgtttctgatctttttccccccaaaagaaattgagaccaagaaacgagcagcgagagaatgaattaattatttcttttctgaggtgcttatatgaagagaagcaaaaagagcacagccacactggggagccaaagcaggtgagcgccctctgacccggggggccccttatggggctgcttacttagacacagaagctagagagcctcctcctccccataggcttccttttcattgttgcacagctggagaaaatgagggacggttggttgtgtttaaagatggcgagagatatttcggagccacagcacgtgggagaagctggtctttgttgcttttgccctttgaattgagattacattatctcacagaagacatagagtcttggagtagttaagacatgttttaaatgtgtcctagcagtaggaattaggccacagtcagagagcggtctgtatccatcatttggcagaagtgtaagaacgctgcaggtgtcctgaaaaggcattctcttgtgccccagtgccatggctatgacctggaagcatctcaggagagaaacttgaggatgcctgctgtcgctgtggtgcttagaccctgtgacccagcagtgttgtccccattatttcccttgcaaaaccttttatgtgagtgcttcaggagctatgtacaagagagttcactgcagcctccatcctaaaagtcggaaaatggagtaaataatacttagtagcagggccaggaataggtttgttatacaatgcacttagactgtactctggctgaagggagtcagccagaagcatttttgagcatgaataaatatttaaaacaatattgggagaagaaagataattgcagaaagacttgtgtggtgtggtatgacagtgtgtgtgtgtgtgtgtgtgtgtgttatttaaatcgagatttcacatatgagagaaaaagtgacatttgttcttctaagtctggcttatttcagttaccatgtttatctctagttccatccatttccttcagatggcataattttgttcgtttatgtggccgaatgaaactctgttgtatgcctgcaccacatttgctttattcattcatttattgatgggcatctaagctgattctgttccttgctaatttgactagcactgcagtaaacatggatgtgaaggtggctctgtgtatgctggcttagaatcctgtgagtacacagccaagagtggcctgcctgggtcacgtggtagttctctttctagagttttgacgaatcttcatgctgactttgatagtggccacactaatagtggcatctattccttaggtggttatgtacatgtgaggcagcatatgttttatgaatagatgtaaattaaaatacaaaatatgaattaatataagcaccaaattcaagagagtgcttgccatggtgggtggtactggtggtcgggagattccagtaaagagtaacagtttcccctaggggcagaagccagaacgtaggtagcagccatgataagtgacagacgtgagtagacactctgttctgtgttggaatgactattcattcatttaaaggtcatggcatatctgggaagacagttccgtctacaggtgggggaccgaggggcatcagggagtgcactggctgtgccacacagctgaggacctgacagttccagagcaccctgctcctctcacccctcagtgtctgggggtgctaacttggccagacttaagtatggcagaggtatttgtgttagtctctatacgttctgtgtgcttgcctactgcagagagtgtgctggtgtttagagcaatggagaatctgcttgtctttcctttctagcagacagagccgtcagtgaaggtccgtgtgagcaggtgtgctcagattggggcgtaacttcttggaaacatacttccttgctaacaggagcatcacgtattcagtgcctgtggggttccactgtgctctggctcagtgttagcatagctgagaaaaagcagactgctttcataggagaaagaccggaagggggagaggataaaggagaggaattataaaaagatatgggaaggatggattcagttgataaatttaatttttaacttagtctctcaaatgcccccctaggtaagatactgctttattttaaaaggttgtcaaagtaggttttgtcccagatcctatgttcggtgcttgccatatccccacctgttgtagtctcgtagcacagtgatctgattggactatggtactcccagtttactagggaagaaatctaggctcagttagaaaacaaggccacagttaggacatcgcaggtttctgattcagtagcctgagcgagctggctgattaggtctgagcacattttctcattttatctgggggagtagaatgtgcacgaaacttgcaggcgtgttgctaaggagcacatggggccccaggctttcaagaggatggggccccacaggccattccctcctgtgcaccaaagggtagaaattttaatggacttaacttttccttgtttttcttttctagacactacaggtggcagcagagaatattgggagtgacctgccacccagtgctagccggttcaggttagattcgctgaagaacagagcaaagaggtccttaacagagtccctagagagcattctgtcccgggtaagtggcaccctttcttctcactgaggttgaatcatttctaaagcagagtcaactctattttatgtttcatcagacttaaagcaattattatctagatgttatttatttttattatctagatggatttatttattgaagtagtgtcacgctatttagcataccctgacttcacactcccaatctgagtgcctagggctcccaagtgctgggaacttacactcctctttttggtctatcccatgggatttcctgctcccaagagtgttattatttatacagttcctataaaggacatggattatgcatgccagatgtaggtcctatttccctggtgtccctaaggacaacttgaaaaactatcctgtcagctcctttcgttgggtatttggaactccctggaagcagattcatgaaatatttgacccatgggccaaatcctatgaacctctttgttttcgtaaattaattaatttacacagtgtcattcattcagttacctgttatctaaggctacgtttgtacaaaattgaatacttgtcacagaggccacatgacttacagatggtaagatgtttattagacacttgctttcaagaccaaaaaatgtgccaatgtagggctctctaagaagatccaagtaccctgagcgtcacctggagttccttaggaaagcttcctcctaccctatgagtgtgaacagccttatgttgcttctaacaaatcaaaacttgattttatgttaaggaatcacatctctggagcttaccctattttgtcatagctcttccagatgttagagcatgttccctctgaaacataaactttagtcagttaaagatgacttcatgaaatgctattgctgagatttttttctaaatcctttgagataattcaaagcaatccaattataaaccaagactgaaagggcttgcctttgagagttcccagagggatgcaggttgattgagtgacatccaggtggccagttatgatcgcccatgactcaggaaggagctattgagtgtgctttggggatcatgatagatgtattaggccaccttgctgtctgttgtccccagcaaatgactgatccatggggctctgtggatcatctaggttggtatgattcttaaaatgatgacagaaatgtgatggttagtgcagggttgtgctgagctgtgcttgtcagtgagtttattttccgggcttatttaacaaggccaggctgcttccagatgctgatgactttggggctgtggctcaactgccttttctcttcgtagggtaataaagccagaggcctgcaggaccattccgccagtgtggatctggacagctccacttctagtactctaagtaacaccagcaaagtaagcatgtttctttcagtggtcccctgaagatgcagccaacaggcctgcccatcttgactctacacagctatcaggacaaaaaagcccatgcccctctagtcataaaacacttagtgcttccagacttctctacaagtagagggcaagctgtgtgaaaagttttaaataaaaaggccaataactattgctataaacagagaatcaagatcatatttttagacagatgagacctgatctgtaacaaccatgggcttcttatccaaagtagagtttgtaataataaaagattgagacagcttcaaaggtggggagggggttgtgaattcagggaattgtgcagcagaaattcctgagactgtggcctgtagctgatcccatgaccgtgagaaaacatgattgttttgtttgaataagcagccaagccttgccccgtggtctgccgcaggacacaggtatgatgcattgcccgaccgccttctgtggtgacacacctacttgtccccttgctttctatcttgttccagggtcatttacacgtgacgggacctggtttatttaaccctatgactgccagtcaggaggcagccttcctccatattgtcagcatgctctgatgtaagaacaaggaagcttatgagccccagcccctcaccaaagctctgtcctagacttgaagttttcaaaggcttcagatcctcgccaacaataagaaagacatttaacatttgacatagtttgcaaatacacatagccctcccacacaaaatgaaaatgagttaaaatgaaagcactctcttgataatgggctgcatacactgttatttctgctcatttatttttaagatgctcctggcaagccactaaattgatattactacctactggggtgtgtagtgtgtggtttgagactcattcctttagatgagcatgactcagactttaagctgcctctgtgcttcacttgttctggctgggatctcaatgctgacaccactcggcagcaagaccgtgtcgctgctcctgctgcttttgtagctggcgttgtgccggaagacctggaagtcagtcttctccatgtagcgttctaagttaaggcacagcaggccacatcatcatccagccttcacaggacacacactgattgtacttccacgttcaagtgtgcaaatgtcaagtgctgctggtcacctattgtaaaaagatggctgggtccataggtgagaaggtacagttgaacaagtaaaccccacatgagggggagtgtgacgagacgagagctgcagacaacagatactggtggcttggacctcagaggagtgaggggaagaggtgtggtttggtagtagaaagcttggagaagggaaggtactgatgctacgaattaaatcctgtggaaagcctgggcattgtgccaaggaagtagccagggagtcggaatttcagataccttagtgttgattatgaagttcttaagactcccatcctttgtttttatgtgtcccctccatccccttttctggttttgtacctagctcaaggtgaccttgatggcccagaactcctgatcctctgacctctgccttcaagggcagaaattataggcatgaccaccaaggttgatttgttaggactcttgttgaatgtttgagcatacagtaaggagggagtactcagtgaaactttagcttatttctgtagcatcagtcggaatacaagccactttaaagtggtctcatcttgcttaattcaggaaatggtgcagtgaattttcactgtactcttacagaggcagacagtggaatgcagcaagaagttaaatgacttcccctgaattatggcaagtcacatgtgataaacatgtctttactccaggcagaacatacagtatagttttagcatcaagagtgccaagttaaatctcaacattagatcagagtcagaaagagccttgaactgtaggtaaacatccatgaacatactaggcaaagataaagaagttggttaagtggtgggaactctccatacaggaccatacttcctataagcctgtgaaaagcctgttctctggagttagcaatctggtcatggtatttgagcagtcagtgctgcagcttgtgaacttcattattatttttggaactttccccatctttgcaggaagcaagaacttgtctctgagaagcaggtgttattatataacagctttaatacccttatatctttggtaacctctagatgacattctagtgagacagtcctatgaatgtaatgtatctgtgtgcttagattgccagtccccccattcccctgtcacatatctaatctgctgtctgtctgctgttaggagctgtccatgggtgacaaggaggccttccccgtctctgagacctccttcaagctccttggctcctcagatgacctgtccagtgactcagagggccacattgcagaagagtctgccctgttgtcaccccagcaggcgttcagaaggagagccaacaccctgagtcatttcccagtagagtgccctgcgcctccagaacctgcccagagctctccaggggtctctcaaaggaaactcatgcggtaccactccgtgagcacagagacgcctcatgaacgcaagtaagagttgcttaaagtgtcagacttactgtatgtgctgcatacacttttcaggcaaaagaataccccgagccaagtttgacccttggcttcaaaagataaaacttgaagcagtgtcaagttcttcttggctccctcaggaagtgtgtagaggtaggtgcaaacatggctagcaagcaggtagacaggagcaaaaatggtccttatgtgtgtcagacagtccttaatgcatgagatgttgtctttggaacttgcctgctggtttgggggaaagtggcacgtgggtgtgagtggaggagtttcctccttcgaacttctcgatctgggctgtggtgggatggggacgccatgtccataaagcagggagagaaagctgtgcgtgggtgtccacgatgacacccagaggcctgggcacatctgatgactggctgtctatgataaaatctgagtcgatgctttctgaaatctgtcactgtggggattctagattcaacactcactccttgtcttaggtagggttactattgctgtgatgaaacaccatgaccaagttggggtgaaggggctgttttggcttacacttccacatcatagtccattattgaagacaagttggggcctcctgagggaggcaggagctgatgcagaggcagaggagtgctgcttactggcttactcctcctagcacgctcagcctgctttcttacagaacccagggccaccagcccagggatgacatcacccacagtgggctacgccctccctcatcagtcactaactaagaaaacgccctacaggcttgcctacagccagctcttaggaagccggtttttctcagctgaggctgcctactctttgatgactctagctggtgtcaagttgacacaaaactagccagcacattgcactcaagaattgggctcaaataaacagttaaacctttctggctgtagagaagcataagcaatgtgttgaaaagctttccccgtactcttccaggtctgtaccaagtaccagagactgactgggccccaaattatcctttaaaatacattgaaaaatgaggccatgctcatacatggtagcagcctcccactggctggtgacagcagaagctggggacatgtgtgcccatgtgacttgtaccaggagcagccatttgagttgtgacttgtaccaggagcagccatttgagtcagtgcagtggttggtgtttgatgagtgtggcgggaaggcgtgacatgtactgataatcctgagccacacacagagccaccagctttgttttcctaggccgctcgttgggcatcatccttgggtctttagagttgggcaggtgactgatgacaggggaggtcttcctccaggatctgttgacaagtctgacgtttctgagacagactccgcactttgcagcaccctgtgagcacaccccctctcgatggcatttgtagtgccagtcctcaggtgaaaggaccgagtgccgggattctctgattttcctctcagagagtatggctctgtctgtcctgggctgtgatgaaccagccgtgggagggtggggacacgcctaccttttgcatatttgttttgctttctctcttatgaactttcctcctcagtctataggaaacgggactttgaaatccagggcaagatgtccttaagggaaatgtggcttctaaattctgagttactttctaaaatcttatccatcatttcccaacaagggaaatgagcagaaagtattactggaagcatagaaccgatcaaggtcctgacagggttcgtctgtgacagcgctccccgactgctgattcattcctgtagacactcagcaaagcctcctgtcctcgtgtctgtcctccctttgcagtggaccctgtccagtctaatcccactttttccgattgctgtttagtgtggaccatcttcctgggggtgagtctcagggctgcccagggcagccttcagctccgcctccacctcgtcttaacccctccgcctcctcaccaaacttctttaagtacctaaaacacaattccagtggagagcaaagtgggaatgctgtgccaaaaaggtgagcacactcgcatggcaagttgagtgtcgtctgtctgccaggcattcgcacggagtcagcccagccgcatgagggctgtccctgcagaaagccccaacaccgcttgtgtgtgtaggggggccttttgctattattcggatttgctattttcagctgtcctttgaattgacttaattttactcttagttttctttaagctgttgtgaagcgtctcagtggtgaactgatttaacacgtaacctgcacatcccttaatctttatgggagcacacacgtgcatgtgcgcaagctaacagctgtgtttgtaatttgtaccacgtcagaaagcttctgactaatttagataagtgtgtcatgtggagggtggtgatttttcttttttttttaatttaacttattgactgaaaaggagagtcagtttcagtcacaaaatattttatatgtcttacctggcctacttcttagcatcacagtgaagagctttcctttttaagcttagagtgtgtattttgtgtgtttatatttctttatcctaaactctttttttaaccaaactcttagtgtctcctaccgtaatgccctgcggaaaaaactccattcttcctcctctgtgccaaattttctaaaatttctggctcccgtagatgaaaataacacctgtgactttaagaacacgaacaggtagggctccgtttaaatcgccaggtctggatgcagtgcgctgggtgctgagttgtttgatagatgggacatttctgctgctctcctgccatttggaactctagctaagccctttgtgtctacttaagccatttctcctcacccctgccctttgtaaagcacgtagccaccttgtggttttgtatagggctggtttgctggctctgttatcatatagtctatggttctgtggggctgttaaagggcagtagcctatgcctgtcctcacgcggccagtgatccaatccgccagctgtgatcattgcctcactgtggtgtagactgagtgtgaactgcaggatcctgctcaaactctcgtgtgagtggaaagaaaattatgagtgtgaactgcagagtcctgctcaaactcttgtgtgagtggaaagaaaattaatgagatatttatatattaacaattatactttgttttatagttttaaagctaaaggttttaaagtaggcaacatcatcagtgattgtatcattagttccttgatttaattagttccttctaattaaattatagctgcttttctgttttagcgtgcatgcatgagcgtggggaagtgggtgggaggaaggactgggggtggtgtgtgtatgtgtgtggatggtgtgctgtgtaggtgtgatctgggtgtggatgtgtggtgtttatgtatgctgcgtgtactgtgtactgtgtgtataaggggggctgtagggaggaagaagagggagggagagagatttgtggcagtcatgggatagaggctgggctaaggaacgtaaccccacaggatggctagtgtggattggggttctggtgacagtgccccagctaaatagtttttctcttttgaagtagcacccagaaaggctcaattggaagctatggtctgtggagcatacgtgttaaatatcttctatgatagccgtacagggcatgtgaacttgttcttttcacagtgtcctttaagagtactgatccgctgtgactctgagttagcttctgtggtctgtggctatcgggatctgttcatggaaagagaaagccagcggaactataactctgacgcctcccatcactcatgaatcggccatcttgccattttagggactttgaatccaaagcaaaccacctgggtgacacagatgggacccccgtgaagacccggcggcactcgtggagacagcagatattccttcgagtggccactccacagaaggcttgtgactccccgagcagatatgaaggtaaggccaccccttgtgaacaccgcagaggtctcggacaccctgttactgggagggaggtagagagaggaccacttggctggagtgtcacaggcagtctctgagatgaaattagggaaggacaaaaggtcactgaggaccctgctcccgtctcagacagggacaagggaggctctggagcccttattcagactctacttctccctggagagaacttcaacctggattgagctctctaaaattctcagagtaacttaggcttatgacttttgccacacctacataagggagcagaaagctaattagaaacattttctgtgtgtgttggggcagggggtggggcgtgcggtcctggctggcctgtgactctatatagactaggctggctttgaacttagagagatacacctgccactgcttcccaagagctgggattacaggtgtgtcccatcactcctgctaagtatttaaaattcataatataagaaagaaagtcatgaagtgtgggtagtaaacaactccggtggttccttgtacaagctcagccgctccatgattgtccattctgtgtttatgctccacactccaggaggccaactatgagctaccctgagaggaagccttactgcttccttaagtaaaagaacaaggcagagacagctctcagccttccttgctcctaacacaagcctgcagtcgttttaaaagcatgtgtttgctgttcagtagtgatactactgcaagagcagcggtgtggtctgtgaactaggggttctgatttttatgtctgagccaaatcctgtggggaggattagtttctaaggacaaaattcataaaaccaaggggaactagagggtgaacagtgagatagtgttgaagaaacctatctaaggaggggttacactgtacttacaaatgcactgtctaataaagctaaggaaacatcttcaatgtgtctgcctcccacccgtgctatggatagaacccaggtccttgcgcgtgtcaggcagctactctaccactgagctgtgctccggcgggccccctccccttctgagttcagcagtgactagttggagttttgtgagactgacaagtttaaattagcaaagtctgagagggctagcactgctcctgagcctacaaagggttggtacatctcagatggttaaatgaaatgccgcactcaccacgtggaagcaaagttgtgtgataaataggaaaccaagttctatccagctgtgacgagacaagtgtttccacagcgaagcaaacagagactgtgaagggagatgctaaaagctgcttggtggctgaaatatgaagcccagggcttactggtactcccacacagtagtggctgcttaccattgttgtctctgaaacccagggaagccactggctctctgggtgagggctctcagcactgagcacttggaaggaccatacttggtaaagattcactctgtcccgggtggtatggcagaggtgctagtaaatcagagtgaagctgtggcaggcggagtgtgctcatccgagggctaggccgagggcacgcagacacactgctttctctgagtagaggacagcgatgctccaccttcgaattaagtctctggtcttcagagcctcactgttgtccctaccacagacaagtgggtggcagtacacttgtccctgggcaaagttatgcacacacttgtctcttaagtggttttgtctgtggatttcactagctttcatgagattggggtcctttggtgatcttgttgaaaggtggattgttgaggtgggaccagttgcatcccaagctctgtctctgaaaggctttctttcccactgatactgctgtgaatagcccattttgagtagttagggcatagagtaaagcagccacagtgggtatgatatgagtcttccaggcctagctagtctctgggcctctgcagtctacactcagggctctccaaggtccaagagcctccaataatctcggttctcaatgaatttcttgttttctttgtggtggcaggaacgaagacagggcctgctgggccagtgctcaccactgagctgccagtgaccttttatgagaaggatgcgtgtgtaagaaagcagggtgcactggagaacagtgataccgagtaagcgggtaaacatggacctgggaaagcagcggtctactggcatcctctgcaggcaggctttgcccagtgctgtgttccagagatgcactgtctacacaagtctgctttccttgtcgagggctctctcctcattgtcaggacagcagaggatgctggaaaccagctcttaactagctagtctgtgctgcgtgccctttagtttcttttctcagcgtatcatatgaaggagaactctttgtcattatgaaataatttttaggcagctctccacttggaacagagagaatctttttgttctgtttgtgccagggaacagttttagccttcatttagttcttttcatttaagtatttcatatcacagtgtgcattttaccaacaatagatgccttcagattttgacatgttttgaaaaggggaaggaaactctttttggcataaataagagtgatttattgacttgaagccctttatgtgagtatatagtccagtaaagccaaggctgagagttttgttttgttttgttttggcttatgagtacagctgggtcggcctaaaccctgaagaactttaggttagatagcacatgaaccaagaagtaaacgtttaaggccagactaaagcgcgtaagggatcttcggtgtgacttctgtgttactgtgcaaaaggtgggaagcacttagtggctgatttgttttcaaaaattgatttacctcggggagattttaatggctaacataagtgaaataatgcaaacgccgtctccatctctgcattttctcttgatcaggagtgcttgtctttcactgggcacggggacttcattgttgagactgggtcagccaggctgcccctgagctcactgtatagctgatgctgcccttgaactctcgaatctccctccacttctgagtgccggggtgccacaggtgtgcccccgtgcctgatttttggtggtggtggtttttggtgctggtagcttgtctttctggcttttgtgttgtgtgttgtttagtgcggaggttggactaagggctgcatgcctgcggggcaagtactcaaccatatggactttatccctggtcttctggggagattcttaagtacccaggctgtcctctcacaggccagactcatgtgagttctccaaaactgggattgctgccacatcaagaccaggcaacctcgggtgactggagagcctgtcaccacttggtggcagtgtttctccctggtcttggtggctctgctctcccatccccaagaaagagcttgctttcttccccagtactgttgtgtttgagttaagatagttgtccttctgcccacttgtaacttatttgaatagggagttgtgggttctgtaggactttatgggactagtctccctttcttcagggttttatggcaacggcagaagcaggtagtgtccagttgacagatgtgattatttttaatttctcctctttgagatgggtctggctctgtagtgctacttggcagcctgtgccctagcctcacagatactggagttccaggcatgtgccacctcccctggcaagattggttttccttcagttttatttaactttgcttttcggtggtgaataaagatctgtcttgagatggagttttcaaaccaaggatttgattgttcatgtgaagtttttggttttttggttttgttttgttttttcttctgttttgtgtttgtttttgtatgtgttgtctttggcatatcatcctagaagccactgtgactggccttggctggctgctcctgcctgcacttgttaacactgctaaggcagccctgtcagcttttcctgatgcacctctggaattcagacagcaagttcgaccacttctgcttgctagcaaggctcgaggagtagagctgaggcttctatactgcagtgtgggagctgggggtcctgggagtcaggtgaccaggacttgattgcagcatccagctgccagggacttcctccttagggtcaagtgactgctcagagcatgcccccaggacaaagtccaaagtggacgttttgatttgtcattctcattttaaattttgtgtcgaggacagggtctcacatagttcatactggtcttgaactttgtgtagctaaggctgtccttgaactcccaatcctgtgagtactggaattacagatgtgattttcttctctagcttaatttgttaccattcaaggtttcaataagctgttgagtttaaataagacaatggcaagaagtttacagtgttttcaggggaatcaaatctgtggacttagtgcagtctggtctgagtatgaccagcacagaggctccatgtcctgtaggtactgttctgtacccccagctttccctcccgtgaatgtctgctgacagttcctactgcaccagcctgctggccccgaagctctacaccctctagcgtccctaggtacagggatggccccgaaggggagggcagcatgagctctgggaagggattctttccttggaaaacacagtttatttttacttacaaagcaactctattgagatatattttgtatactgtacaaatcacccatttaaagcccacagttcagtattactatttttagagatgcagtcagagtactgagcagctattactatagtaattactgtagtacaagttaaaaatccttaaatcactagataaagaattttctaaccatcacttctcagtccattgtccccacccctagctgacaggcagccactaatctaccatgtctctgcagatttgcttatcctggacacttcctgtaaatgcatccacagaatttgtggtccctctgctggctcctcccacttctcatgatgttctctaagtcttgtgtcatgtcagtgccttattctctgatggaaactaatgctccgacctgtggacatgttacattctgtttaatgtctcccagtcagtagacaatgtgagttgtttccacctcttggctattaagaatagtgctgttctgagcattgatggaaaaggggttttgtggatgatcattagtcagctataggatggaacacaggacccccgatggaggagctagagaaagtacccaaggagctgaaagggtctgcaaccctataggtggaacaacaatatgaactaactagtacccccagagctcatgtctctagctgcatatgtagcagaagatggcctagtcggccatcattgggaagagaggccccttggtcttgcaaactttatatgccccagtacaggggaatgccagggccaagaagtgggagtgggtgggtaggggagcagggcggggggagagtatagggaactttgaaatgtaaataaagaaaatatctaataaatttaaagaaagaaagaaaggaaggaagggagttaggactatgggtgtgacaccatggtagaggtttgcctagaatacatgtgagtctgggtgtgatcccagccctgaagaaaaaaaaaagactttaattgtgaattggtgcagaagcccttcccgtggggagagactgcactgctgacgctgggctggttctgccaagccagagctggaggaggcacttaggttcttgctgtgggctggccttgtttgctttgctttcacttcagtctgattctcttgggtactggtactgtcctcgtgagctcatgggaagcctgatctccaaagagccttccctggggttcccacagtttgccttcacccctgggaaccagtcagagggccataggttagtggtatttgcaaagtgccgcgtctctttcagtgatccttaagcttagcacaccccagaatgctttgggggagctgtagaaacataggctacggggcatcaccccaaagttctggagattaaattatttggggaggaagcctcaagccccagtgacttacaggaaagggcccattatttccgacctaaactcggcttccaaaagttttaagtgaacagtaagatagcatcagaatgaaaaatcgatatatcctatagcagatcgggtgccattgcacacccacccactcattgaatactatcagtagccattgtaattatccccagtgtgtcttacacagttagtgtctctgcttttacacatactaaattccagggtatcattactcatctttaaaaagatagtgggcagcttgattgagatacccatggctcctctgttctgattagttaatgcagcccagttccagtcaattctgattagcattaaattcaatctccagttgcccagataaactgttcacagttttaggaatacatacctgagagttttgacgggtttgctcacttcagctagcccctgatcagagtgaggctatgtcacagtaaaagaacacgccttgacttggaagttttacagacttacatgataattctctaataagcacactttaggcattaccaggaaccccaaaactctggcgggggattagaatctgcctagtaagatggtttttgtcctttacatttaaaggaaggaatgtttgtttgtctttcagtggtggcaatgcagcgtatgcccctgtgcgtgggctggtggcttgagagttatagctcttggcacttgtagtgagctcttgcttttgtaaaaatcctgagacagagccaagagatgcattatgctgttgtctaaatggacttttccaagtaaattcattttaacgctttcatacaaatgaaaatatttgcagtctaagtcctaaaagtttttaaacctcttttaccaacacaggagcactgtaattattatggtcttatataattctgaatatgattggtagtggcaaacgataaattttatacttgagagaatactgaattttccccagaatactgagaacaggttcctgtcagagtgtaggctcggttttaccagcatgaacagccatgtctgggctcatgtcaacagttggactgttgttacctcagcccccattctaagactgtgtgttgcagttctgtcttccccacttatcaagagaaagtttactagtggcagccttttctcttgccaaggcttgagttaaggggtgtggtggggtaaaatagaagcatttggctttctcagcgctgtaggagttccatggtgccttggagttagatgggaaggcacagcagggggagaggggattcctcccttctcaaagtcttgttcattcttaccaatgcttgcaaagaaagaaggaaagtttggaactcatcatgaaagcgtgcatgcaacacactgaggaagtctctgcgactctgcctaactctcaaattccagtacactgggcatctgtccccacgaaaagcaagctgcatacacctagcccatgtgttctcccaggatataaccagcctggtgaattgcctttattctgtagggtccctccttgcatcctggtactcagtttgctttgtcctgatggtctctcatttccagcctcaaacgagatcatttagagatttttgtctgagccagtgcacagtgatgtaaccagagagactcgtttgtcttctgtgagaagtatggccaagaggagtgtaatggctgttcctggttgtcaacttgactatatctggaatgaactacaatccagaattggagggctcacctgtaatctagatcttgagtctggaagacacaagttctgacttggatcttggcatggagctcttaaggcatggtggccatgaaaagcttaggcccaggcaaggtagtacatgtctttaatcccaggagactaaggcaaggagatctgagttcaaggtcaacctggaacaaagcaaatcccagatccagccataatggtacacacctttaatctgagccacactgtttgctggaggacctacataaggacattggagaaggaagattcgctctttttcgcctggttgcatttacttgccagcacatctgttggagcctcctactacaagaagaccagctgaaacagctagcctcgtgggactgaataactactagctccttggacttcccatccacagctgctcgttgttgggttgattggactatggactgtaagttatcacaaataattcccttaatatatagagactatccataagttctgtgactctagagaaccttaatataagaagcaatgccccctctctttgtccctgtaatgttaccagtgcacctggccttgtctctcttttcccttcccctgcctctcaggcatccttcatccatttcccaccatgtccaagccaaacaaggaaccaccaaggaggagggctgtgatgcccaattgtaagcccttatatccagaaagtgaagtcctcccacaaatgcctagtggactgtcttttgcatgtcattgtctgaaaccttgtcacctggccacatatagtgagcagggaagctgggaggctttgtttttgcctgtgttcctgctgcctcgtctggtatttggggagtaggaatggcgtagggcttgaggattgtagtactcactgcctgtgtggagctctgtctatcgcttcctgaacattgggctgtacgttcaggcagccatgatttcacagggtgatttctcttgcccataaagcacctcctgcttattttctccccttggcagacaacccatcacgtagtaacactagcagatttccctacatccttccaggccaccgcagtaccaacatttccccctttcctcatgggacatagtgggcctctctctgttcctaaccagtttctgatggtccctatgggcgagctttctttcttacctctggttatttgtggtacctcatgacgctggtacagtcactcaaatgtaagcataaactaatcaacaaaaatttagctcctagccgggcgtggtggcgcacgcctttaatcccagcactcgggaagcagaggcaggtgaatttctgagttcgaggccagcctggtctacagagtgagttccaggacagccggggctacacagagaaaccctgtcttgaaaaaccagaaaaaaaaaaaaattagctcctcatggtaacatcattttaggtgctcagaggccacaagtaagatcacacagtattcaagagtacaggtttagaatatgcccccgcacccagttcagtagtatcatcctgccactcccctgcctccttagatttgctgcccaagaaagatctaaggagatttctcattgtactgcctgccactcagaactactgatggaagctgcagagcccaagtgtgtgtgttctctgttcgctgatatggtcatctataggcagagtcaagattgcccatacttctcccccaaaatagcattgctgaaagtgtgtgatagatatcaagtgtaccactttcaaggaatcctaaaagcaggtgaggatgttgaaagtcatctattcaacttccttatagatgaagaagctgaggcttgtgagaacaggacctgttggtcaccaggccttttggtggtagattcttctctccaattcttgcctctttttgtggcagagtgtcaccaagcaggttgtcttccctgagcctcttcctgtctcactcatttccagttcaatgacaggaagttgttctcagcttcttagccatctcctgtgctgtgtagctgtgcctaagggcactcaggaaacaatggaggactataagcccatcttcctcagtggctattgaattctaagatcagcaggtgactccagccagctcactgtgggtacagctcagtgtgggtactggggaccaaaactgtgtcctctgtaagaacagtacatgctcttagcaccaagccatttctacagacactgatggtaagcaaggtggaaagattctttttgtacttgattaaatcttgtcatcaataccctaaggctatagattgtaaaaagttcttcttgatagcctggaatttttttttcatgtttaaacaaaacaagaaaattcttatagtgcctcactttatatatgagaagaccgagacccatagccccagtgctcacagcagtcttcatttgtcctttacttagaagagtctgggatcagtgttctttggggaccatttacagagtagcctgtcagatgcttggagatgggctggcatggtctagcatgggctagcggggctgccctgcttgtctcctctcagctccgtgcctggtccctatctcagctccttgttgtgtcagatgtgttatggtcactgtggagctgtgagggggcagcattgcacagctcctcagagctcaggcctcccacacaaggcagaagtgggagtcttcagaaaagaacggggaactttccacacacatccacacggagatgctgagctctggactgctgtgatgtcaaagtgatgggacctttgggaggccgcgggcttacagaagtcttcctcatgccgggcctcttcctctcatgccctcctccccttcccagctgtggtgctccagaggggaatctgtaggctctttccactgccccgttccagcctgcaagcctttgttttcaaagcaaagcaaaactctaggcctggtgtgagagggcactcccatagtctctggaggctgaggcaggaggagcagagagttcaagggcagattgtaccacattgcaagacttgtttaaaaggaaaaaaactaaaaagtaagattccatgctggttactaagacccgctgtgataataatttgcttctggccatttgagagaaagtgggtgaccttggaggtacttgggtgaccttggaggtacttgtgtgaccttggaggtacttgggtgaccttggaggtacttggtgaccttggaggtacttgcgtgaccttggaggtactcgcagatcagagtagtgccctggcattggtttgtgtgtaaaacacacacttacacctcgaagcggctgagatgctcagctttggttgtgagtttcctcttgtaaaagtgaaacccttaaagccattagcaccctcccctgtccccagcccacactaacctttgttctactttctatttctatgaatgtggctactttacatggttcctgtgaaaggcagcctttgtcttcttgtttcaagtttatttaagtagtttcctcttgctagctcatagcaggttttccctttcaaggtcaaattatacctgcagtgttttgtgtgccacgtgtggttttgcttacttatattgactggccttttttagtacccatttcttagcagttgtgactaactgtgaaccttggtgcaaatgccagaagtgaggcgcctgaccaaatgacccttgtatttttaatgtgccacactcttttcacagcattggtgctttcccggtgccctagggttccacacacacacacacacacacacacacacacacacacatcttctcttgctattttctggttaatttgctagtggtcagtctagtgaggtgattaccccattgtggctcctctgtgacctgtgtggctaacactggttttgcgatgtcctccatagatatgcaggtatagcatagagtaatgacagcgtctacctgataggagggatgtggaccagtcagtggaagctgtaatcacataggatgcagacagcctcttctctttggggatttagaaaacaaaagtaggcacctcccctacaaatggcagccacattgttcagctttgttttctgacacaaactcttgcagtgtaggccagaccagccttgacctcagaagtcctcctgagtgcttggattataggctttactgccacacctatgttcagctcacacttaacatcacagaggctgtcatttttgcagaagagtcatattgtcaaaaagacatcttctggtcccttagactatgtgtggccatttgcatggttgcctcagtctgccagctgcctcaacagttgcgggtacctaaggacgatgctgtctcttaagctgatatgtccaggatgtttgcctggtcaggaaagccttagtgctgtgttttccatggagagaggccacaatttcacatttaacaagctgaacattataggagtcgggcaaggactgggtccactagtttaaacttctgtttcatagcatccctctatgcttaaacttcctcatcccctcttcccagcaagcacaaaagtgtttcccaactcacaggcttcctttcatggattccagccttagatcacacccagataagcattgtgtaataggtgggcgggactagaatttcagcgacatatgcccacaaggcaggtgggcgggggaggagggcagcagaggtcctggctacagctgtgagccactcaggcctgcggtccagcagcgacttagataaaggtccctgtggaattccggttgttccctagccatggcttttctgactcttcccttgctcacacatttcttccctgtactcctcctgggactttctccctgagagtcttctcacaccgcctgcttcctttcctacgttctcccgtgccccagcacttatgaatgtctgccctgcatgggctgccatgtgactctgctcgttcttccgtagcttctggatataaagcttcatctccggagcggagtggagtccccagtgcaccccagcttgcccttcaccattgccctgcttcagagccttgccacaacacgcatatgctcaggggcttcagaccctgcaccccatcatggcaaagacttagtcgccagagagctgcttggagtgcagtgctagcaaatgctaacatgcagcaggagttcaaggacaggccgggggacagtataaggaagtattaggagtgtgtgtccttgggaagttccactgtagcaagcttgcccattaaaagtgtatcttgtcattaataggtaaaggtatggaagtatgtagataaatatcttacaatttccctggcccagaaagggaaatttgggcgtttttgagctgttatgttagtctgcttgtccttcccaccagagttcagaccatccttttggtctctgagcccaaggcacaactctcttctgttttgtttagaggtgtgtgtgtggggggggggggggtgggggggcagggggaatcatttttataaaaaatgcttcacaagggctcatcacgggcttcactaggggtgtacctccagcccttgtaatagtctttaccatgcccaaatgaaaactttaatacatgtctaaaactataggacatgccccctgccctgggataatgcagtggacacaccatgtttgcaggactcctccctgctggtgtaagtagaatgaaggggcccttgcctctcctatgggttcaatgtttgctccctcccagatgcctgtgatgaagccctggcccctactgggtaggagattaggaacagcatagaagcccagcagctctgcttcccactgctcccctgctcccagccactccctagctcctcactattccccagcccctggcgagggcttatttgaaagcatactctccctcctctctcctgctccataacttaacctcttgactctttccaggcctccttttagcctccatagcacccgtgccaggcttacacctgtgccgcggctgggagaggcttggggacaaataaggaagtaggtgtcttctctggttctttttaccatgcctccgggtttgcagaggccagagctggggagaggtgcacaggcagagtgtgtgtgtgtagtgtgtgtgtgtgtgtgtgtgtgtgtgtgtgtgtgtgtgtgtatacattcgagcacacactccaaacaagctgcttcactgcacttagctaataacatgggttgggcaatggtgcctttagctttctgtggtatatttttctgttgtgtgagtgactcattggtttctgtccctgactatttatgttcagatctggagggttttttgaagggaatttattattgttcgatttgtgtgggtggtagatttgggtcagtagggaggagcccctttctgagtgcatttcttaagaaaatggtgttaatttgagttcaaacaattgcctttgactaagatcatgtgatttggccagtgtttgaaaagacagatgtatttttatactttatttaatagtcacggtgtacatgatgggtagagtcattgtttaatctgaaacttatttaaaaggtacccttggggttaagaggttagctcagtggtagaatactttacaaaaccctcattaagatccatagcactgcaaaaataaaataagtccaagacgtgcctgttgtctcgtattacagtgtcacatagtatgatgctaccagttaagataaatatataaaaacttaacttcagtgaacatactgaatgcccagatccagggccttcaaacatgtctgtgaattagaattcccagttgtgtaagccttgtttgctgggtctaccctagagtttatgattgatttatcaggccttggtgtttgggactgcatttctcacaagctctcagggttgcctcttgctgatgctattagggccatattctgggaagcagtcccggggactcagctcattgacactgcgacccacatgctcttagggggactctgaggcagcttttgtcttctgtgcctctggtaaactgcgggaagaggtggcttgatcagcagctgtagtcctggacatcagcagtgtaaatgacgaatgctgagtgcttggacatcttttaaaagctctttgttgggcttagggtgaataccagtaagctaagtgcacatggtccctgccttcaggctctggcacagaacttgtagcatgcccccttgttacttcttcactgcacatgcatcgggatggaggtcttgcttaacaggtgaccctttgtttgtgacccacgttaccaacttggcctatttcttgcaatatacctgcacctctctccttttcctggtcttggtggaactctttgtggtctctgattctatctgctgctttgcccatgctgcacttctcagggagaagctttccttggccttggcagctgccttcactcggcacgtgatgactgccccaactctatagaagagctgttagggatggctcattcatcagtaatggcccctctgaactcctgttaccccgctgacctgtcttcagccactcctgacactgactggaatggggcccactcagctgtctccttgggaacagaacttgattttatctcaccattgttttgggctgaagtgggtggatgcttggtcacaggaggattaagactgaatcggccatatgtttcttataaagtcatatgtgtataaaggtatgtatgtgttactatctctgtagatttcaatgaggagggggggatggatggatggatggatggatggactgtgtaatttaagaacacaattgtttttagagagccccagcccagtcccttgctaccaacataacatgctctagggccttgctatgttctgtccctctgatttctttctcttctgctccgtcttctcaggatgttccaggctgccctggttcccttctctgggatccttgtatattgtttgtgtttggggttcagagcagtggagagaggcttgcaccagtgctatggtagcagagggtaggtgcctacgaccccacaggcaggaacaggaagcaagagcgagcatcctgaggggggctggtggggggggcatgaccttaggactgagctttatggtggtagtggggagtcagccagccagagagggctaaaaggccatccgagccctcacaggcaagatggtccatccctgacaatgctgttaagcagccatgggtcctgggcatgccaaagcggggaggaaggacccctgttgttgagggagggccctagggccttactgttagttttaagatggagcaagcatttctcttccccagtgttttcagtatgtgagtgttcctttcaaaaaatctgcagtccaggttggagtaacagctcagcattaagaacatgtattgttcttatggagaacttgtctctgacttccacccagcactcacagcatgcagctcacagctgcctctgacatgtctctgaactagttaggtactcacatatgcatggcaggcacacacacacacacacacacacacacacacgcacacacaaagtaagaaagacatacatataaataatgaaaaatttccagtctatggagaaatcttagctgcacaaaggttttagtcactaatgttagaatcaagcactgaaccttacccaataagtgctcttggaactttgcttataattccgtatgtgcctgtaggtgaccagggcgcagagaggcctggagcctgctcgttaggtgtgactgacttggcagcatcggtgtgactcggtcatgcttctctctggctcctctttgcctgtattcccacacctgaatgaggcgggcgggcggcggttagtctgggctccgagttctactcctggctccacggactgagttgccctatgttctgagtgtttcccttgagccctaaaaatgtttctgggttatctggtggtatggaggtaaaattggtaggtacttataaatcctgccacctagcatctaggaattattcagacacatgactttgagcctcagtttccacactggggtgtgaagagtgttcagtgaagtcaccttctagaatagaatctctttgcgttcggaatgctgaccattctgagtagtagtcacattcattaccagttcttccatcaaacaatacacagacactattggattaagtaaattaaatttcatttgtttgggaattaatgtataactatttcctttaaacttatttttcttttattggccatggattttttttctctcataatacattctgatttcagtttcccttttctctactcctcccagttcctccccaaccccttcccatcccaacccaccgctttctgtctcattagaaaacacaggtttctagatataacaatataagatacagtcaaacaaaactaacacatcatagtaacacaaattagcagaaggaaaagaacttcaaaaaaggtacaagaaacatagagacacagataaccactcacacattcaggaatcacataaaaactctaacctggaagacatgctacatatacaaaggacctgtagggtaaaaagaagaaaaatgtttaattttttttttaaaaggagaagcttgacaggccctgagacagggagcctctagaggtgcctttaagatcattttctgttagccatctactgctgggcacgcaacctgctctttacagtagtttccccagtaagagaagagaaaactgaagtttcgtgtgcaaggggttatcagttggagctcgcttctgagctaggggtggtgggggcatgtgtccacttctttcagctctcagactccgtctgatatagagccatgcagacacggcatgctgcctcagtgtctggacgtgcatatgtgcatcagtcccattgattgagggccttgtttccttggtgtcctctgtctcctctggttacatttcttctgtctccccttctgcagagttccctgagctctgagagagggatctgacagagacctgccttttagggataggtgtttcaaagtctcactctgcatactgtctgattggtttcttacttgttcccatcctctgcaggaggaagcttctctgacgatggccgagtcaggcactgatctgtgaggatagcagaatgtattagaagtcattttatcgatactttttcttgttaagaacaaggatatagtcttttttggtagcatccagaacaacttccgataccaaagatgctagcgtatccgggtaaaggttttatttaggcaccagcttgaattctctttgctcaaagagttgtgtaggtattgtgggccttgccacaagtttgtgaagagcaacctatagtcttggcaataccctgaattgtttgggagtttccatgggacctttttgaccaacaactcaaataaatataacccagtttcagtactggaaacttgatatgatgatagagatggccagttgggactctatctcccccattatttgattatttcatttagatccccttcatacatatatatatattttttatgaattttctactacttgcttttggtttccctaagacagccccttaattttagatgtctctccccatatttgtagaaatatcttttattctcctggtaataatagttgtcatgttcaaggctgactgcctctgtctgctaactaggactagtcctggaagcttctagcctccttacaacctaatctaggcgtagaatgttcccagcctctgagacttactgctgaataagctcacccttcctagttctttctgaagtctggttgactggttcaactcagctgttttgtcttaaactctcctccaagctgactggttcaatctggcttttctctcagcctctgcttagccttaaactaactctagcaatctgctctaaatttctttctcctcattctctgacttgttaagtctttacctatgtctaccttgttctatttctacaacctgtctctttataactgccccataaaactgcctctccttccttccccatccgctcgctctctctctgtcactctcttctgctccctctatgttacctctctttcctgtctcttcccctgagagttgggcatatcctgttctgtcaaatctttctctgatttgctactttgtctgccgatcaataagacatcactttcaaaacatgggatctacaaactaagcaaactaacttgactttcattgtttgggattaaaggtgtatactaagggaatgtctgtattctagccagagtgattaaaggtgtctgctaaggctgagccataccacaactagaaacagaattttttttttaaatgaatctcagagttcacactgtggtcaaatatcctgcaacacatattccctcccctgaccccttccttcttcccttccttgtccccctcttccctccctcctcctgttctatccccatccatccataactattttgtttccctttcctagaaagatctgtctgtctctccctagtcctttactctataaacctgcggttgtatggattgcagctcggctattgacttagcagctaatatccaaataagcaaatgcacatactatttgtcttgctgggtctgggttaccttactcaggatgatttggattttccgagacagggtttctctatgtggccctggctgccctggaacttgctctgtagaccaggctggccttgagacctgcttgcctctgcctcccaagtgctgggattaaaggtgtgaaccactaaacctggataggatgattttttttttctaattctgttccatttacctgaaattttcttgatttcattttcttaatggctaagtaatattctactgcataattgtactgctttttaaaaaaaatccattcatctacaaaggggcatcttcatttccagtttctgacttatgaatagagcagcagtgaacatgggtgagcacgtgtctctggtcggatgaagcgtcatttgactgtatgcctaacagcagtatacctggatcttgaggtagatggatcgcatcttcctgaggaaccgctaccctgattcccatggtggctgtacacgtttgcacttccaccaacaatgggtcagtgcccctcttactccacatcttcaccagcatgagctgccctttgttgtattaatcttagccattctaatgggtgtaagatgaaatctcaagggagttttgatttgagtttccctaataattaagcatgttgaacattctttaaatgtttcttagccatttgagtttcctcttttgaaaattctgtttttatatctgtaccccgtgttttaattgggttatttgttttcttggtatccagtttcttgaattctttatatattttggatattagccctctactgaacatggagttggtaaaaatcttttcccataatgtaggctgccgctttgttcaaatgatggtttcctttgccatgcagaagcttttcagtttcatgaggtcctgttgattaactgttgatcttagtgcctgtgctaacagtgttctactcagaaagtcttctcctgtgtcagtgagtccaaggctattcccactttctcttctattgtgttttgtgttttatgttttatctttgatccatgtggagttgaattttgtacagggtaataagtatggatctatttacagtcttctacatacagccagccagccagccagtttgaccaagggtgtatttctggcttctttttcacgtatcgggtgctgatatgtgtaatggattttggtctgggtctttctttctgttccaccaatcagcgtgtctgcttttgtgccagtaccatgttgttttattactgtagctttgtagtataatttgagatgaagaaaggtgatacctcccacacttattttatttttttaattcatgtatgactactcttctgcatatacattcacagaccagaggagaacatcagatcccattacagatggttgtgagccaccatgtggttgctgggaattgaacacaggacctcatgaagagcagtcagtgctcttaactgctgagctatcttaccagctgttttatcattcaggataaaacagctaattttgttgctaattctggaatttggggtttgggtgtgtgtatgtgattttcatatgaaactgtaaattgtcctttcaaaatatgtgaaagagttgtgttggagttttgatggtgattgcattgaatctgtaggtagtgtttggtagggtcaccatttttactgtactaatcttactaatccatgaacataggaaatctttccatcttctgatatcttcttcagtgtcttaaagtttttattttacaagtctttcacttgattgcttagagttacccatgacattttatattaattgaggctagtataaaaagggttgtttcccttatttctttctcagtctgtttgtcagttgtttggggagtgggggtggggctactgattttagtgagttgattttgtatatagctactgtgttgagagtatttatcagctgaaggagtttcctggtgaaattttgaaagtcacatgtatactctcatcatctgcagataaagatactttgacttcttcctttccaatgtctgtccccttcagttactttatcgctgcagcaaagactccaagtgctgtattgagtagcgttggagaggctaaatgaccttgtctgctttctgagtttagtggctctgcttttgagtttctctatttaagctgatgctggctatgagcttgctgtgtattgcctttattaaggtatttcccttgtattcctaacttctttaggatttttatcacgagggggtgttggcttttgtcaaaggccttgtgtgcatctaatgagatgatcatgtggtttttgccttccagtctgtttctatggagaattatgtgtctcagtttacagatggggaactatcccagcctgtttaggatgaagcctgcttgatcatggtagattatcttgttgatgtattattgggttcactttacaagtatttttattgagaatctttgcatctatgttcctaagagaaattgatctggaattcaagatcaagctgggcctttatgtaatttgaatatcaggatacctgtggcctcataaaggaaattgggcagcgttccctatgtttttattttgggaagtaatttaaaaagtattcacatgaactctttggaagtctggtagaattctgaattaaaaccacccagcctgggatttttgttgttgttgttggaagacttttaattactgcttctatttcattaggggttataggtctgtttaaattgattatctgatcttaatctaactctagtaagtggtacttatcaagaaaactaaccatttctttctaattttccaatttggtggagtaaaggtttttaaagtatgcctttatgatccactggatttcctcctgtcttgctatatccctcttctcatctctattttattcatttggatcttctcttcctgccacttagttcatttggataagggtttatcaatattactaattttcacaaggagctaactctttgtttcattgattctttatggtggtgttcttattttattgacttcagccttgaggttatttcttgccattcactcctttggggtttgatttctttttcttattctagagcttacagctatgctgttaagttagtagtaagagacctgtccaagtgtttttatgtaggcacttagtgtgatgagcttgcctctaagaacagccttcattgtgtctcagaagtttggctatattgtgtattcattttcattccagggagaaagtctttactttcttccgtaattttgtcttgacccactttttttcctcagtagagagttgttcagtttccatgagtttgtgtaagccttttgttgccgtgatccagctttgctccatggtgatcggatgggatgcagggcgtcatttcagtttccttgtgtctgttgagacttgctttatatcagagtatttgttcagttttggagagaatccatgaggtactgagaaggtatactcttttgggtggaatgttctataaatacgttaggtccaatatttctctactgagcagtctgttggtaaaagtaggatattgaaagattccactctcactgtggggtagttaacatgtgattgaagctgtagtagtgtttgttttgtgttgttgcacttggtgcgtagatgtcagaattgcagtgtcctcttggtggagttttcctttgagtatatatgtccttctccatctcttctgattggttttggtttgaagtctatttgacaatcagacaagcttatttgtattacccaatgtattgccccagtgactggcaaatagacaaaggccgagaacactgggaaggtgatttatgccttaaatctcacatcatcactgtcaccaaacggtacttgcagtgttgcagatctaatttctgcaaatactgaagtcaaagctggtactccagaaacctctgtagacggctccagtcagaagccaccctggacctgagaccaagcagcctaagctactaagattattccctgttcctggctgagttgcaacacagtattactaggagttcagttgggcacgttactagaagaaatgaagaatttgcgcttcagtgtgagctcaaggatctcatggcagggtccccattcaacttgggaaatgagagctcgggacggttggagctggcagccaaagcagattctgtttgggtaattttgaggctcaactcacctgtgaatgttgttgcacttgcagatgttaaggttccttaagtttagtgtgcacgatggctcctgggactgcttcttgtcatgtgaggcccacttgtatgacctctgctgccttttagttcgagggtcactgtgaataggtatggcattgtatatgtctgtaagatatttgagaattacactatcatgtgtaccaagaacatggttcctgtaaagaaaggaatgcagttcgtgaaatgtgaggcgttaaaacacagacatttagaactgatgtggggaaactggaagttgcatctagtggtcagcaggagcttctgagccaggcacacagtgggatggagcgctgtgcacctgcttgcttactagattttcttctgggcacgagtttccttttcaggcaattgtgtgtcaggataagtgactacctgtagaaatgcccagtaccactggcgtcctgcagttgactgggggtctgataacagtcccagttcatactgtctcttaaatatattacctttctcagagcatctaatgggacagtgaaagtgtgtataagccaagctgctgtgtttccatgctgggtccctgctacctagctgtgtgacactggaaagtctcccaaacacctgcaccttgtttatttgttgttacatcaggtttttaaaaatataaaactagacttacaaaactaaataccggagtcttcgggtggttgaattccataagtgattataggaacatagtaacaactctatgattaattgttattagataacccccaaaagtcaacggaaaccgggaaagtctctccagacatttccccagctactaaagcttttgcttcctagtaaatgtgtcatttatttcgtgtttgtggctcatacataacctagtgtggtgaatattaaaacacaatttttaaatcacatttacttatgtgtatgtgcgggtcggaggcaagcatgcatagaccacacagcactcatgtgaaaaccagaggacagcttttgggaatgagttcttttcttccttcatgtgggtcccagagattaaactcaggtttccaggctgatgacaagtatctttacctgttgagctgtcttgctgtccccaaaacttacattctgaggctggtgggatggctcagtgggtaaaggtgcttactaagcccagtgtcctgagttcaatcgcaaggatccacatacaggtagaaggagagaactaactccacaacactctcacatacacacgcacacacacaccacgcacacaagattttaaaaggaaagaactatcatcctgcaatgtccttcttgtttgtctccagattattccgagctgggagagctccctccacgctcccctttagaaccggtgtgtgaggacggcccatttggcccagtacaggaagaaaagaggaagacgtcacgcgagcttcgagagctgtggaaaaaggccatcttgcagcagatcctgctgctcaggatggagaaggagaatcagaagctacaaggttggtttggagagtgaagctgagcaaaactgatgctcttacttaatccttgcactcaggatacagtcgaggtggcctcacggacatggacgcctgtcgtgtctgtttacgttttcaaagtaatagtgacaccatttactttccagacatttaaagtgagtcttaccaactgtcacatattcctgtgtagcatgagaagcaccacgtctagaacttgtgagtctcagaagtggttttgattgactggctggctggctgcttggttggttggttggttggttggttggttggttggttggttggttttgttgtggtggttggtttatgggatttttttttttctttgtatccccagccataatttctgcctgggtagtgaaactagactaatcctatataaatccttaaggtatataattccattttgtgtggctgtttagtgagttcctgggtaaaagtttacctggacagatatctccattatcaaaatgacaggaacttgggaagtttagatcttttgtaagccactgtctagatttgaagtcctaaagattctgagtgggaagtctgtgtataccctcccaaagggaggcaggctgtggcaggagggtcactcacggtgccattccttaatgcagttttggaattagtgtgtctcattgagcactatgcttggtcacaggtttttgtctttgaataggacgccgaagcttgactagaactaaaagttactaagacaccagatcttaggaataaactctcagaaggtgttctgccccatgaagccctgctggctagaactctctgccactcttcttagctagtgtcacagtcttagtgtcacactcttcttagctagatgtcctcctcatgatcaggagtctgtgagttaccacagcactgtacacgaggaatacagtgcctgctgctgagaagggcacagactgctgagatgtcaaaggagaaacgtagacgttacttttgatcaggaggaagtgaactgaagaaataaagccctggatgtgatggtagcccagctgttggaacagctgcctagagaagaagccagtgctcttctgttcacagtattgccactgagaacaggttgtgtagtcagggtgtagtgagcagcttttaacagctcagtattaagcttttttctacttcattcttctagtgtgtgtgtgtgtgtgtgtgtgtgtgtgtgtgtttggcacggggcctgcccttacgagtggtttgtaaaccccgtgagactccattggagaaaactagtgtttcatttgccagttgttatcaattagagataacttctgggttagggatgagggcttgtgtccacttttctcagtcctgggacccatctggcacagactcctgcaggccgtgtgcatgctgccacagtgtagagttcctatgtacatcagccctgatgcgtttagaaggccttgcttctgtggtgtcccccatctcctcctgcttttacagtcctgcctcctcttccgtaaggttccctgagctctgaggcgagggaatcgaccttctgtttacaactgagtgtacatcatctggatgtggctctctgtatttgttcccatttactgcaggaggaaacctctgtttactcagggcatttatttatttactttatttatatttttaattttttttaatctatgggtcctttatgtacacattatggcttcaggttttgtggttttatgggattcctgtgtgtgtttcttgtggtcattctttggctctttttcttctgtttgtttgttttgtcctattccaatttgtttcttcttttattattattctttaaatgcctgtttgttttctaatgagagtcagaaagagagtaaattcgaatggatggatctcagaggagttgggagatgggagatcatagtcagaatatattgtataaaaataataaaacaataaaagaaaaatagaaaataaataccttgtgtatatcaaaaatatataagaaaatataataaacatttaaaaattaaaattaacaatattttatgggcctgtgagatagtctaataagcagagatgcgtgccacacaagcctgatggcctcagaacccacagcgggagcgagaaccaactcctgaaggttgtcctctgacccccatacgtgccccatggcgcacacacacacacatggctgggggaggggtagtcataacattacaaagtgtggtatcaagaaaatgacagctgtgtatttggggacctttgttgagaattgagaggtgactaatgctcattctgcggctcttgaggctcagtgctttttagccagtcctgcaggtggcagcccagggaagtgagacctgagatacacctataaggagagagaggttggttgctctcaggcatgttagaagtcatgagtagagttggtgacataggatcagtatacctcagaaacaaagtgcctgctactgtgccaggaatggctgacagacctgcatgagcaggggagtgtctgctgggttgccttggtcaccttgccaggactgtgctgtgcccactgttgactttaccaggctatgggcagtgtttgttctgctgctcttactgctttgctgcttgggttcatatatcttacctctgtttaacctgggatgtttatcttgtggtcaaagtgtaatcaactttctaaatttaacataggaagtgttaatccgtttattagccttgctatacctatattgttgagaaataatcaacagtagcaagttgattgcttcaaaatatttagtaagcttgatagcagtgaattgagttggggccattaaatatagaagctaggtcagataggacccaatcagagcgttgactgtgtaaacaaaaactatattactctgtgtttttttttttttttcatacacttcttataagaggcttaagctgtggggtgggtgagtggctcttgagattgatcagattcaagctgacttgcatgctcttcagaggagcacacatggcaaagtctttctctggctaagtcaattttctgcttttggaatctatagatacaatactaattactattctggaagtgtttcatcccagacagacgttagccccattgtctaaatctgtagacacttggcagctgggactgtgggtttctttcccagtgacacagatacgctgtcctcgtttgctttctactgctgtgcttggggaggaggacgtttatttgacttgtggtttatagtccatcatttcagcacagcagctgaaggcaagagctgaagcagaaaccctggagaactgctttgttctgcctggcttccttcgcatgccttgctcagctacctttcttaaccttgggcctcctacccagggatagcactgccccacagacaagacagctgggccctctcacgtcaatcacaggcagttttccaattgaaaatcagtccccagatgaccctacctgtatcaatttgataaagatttttttaaaaaaattaaaaaacagccagcactcacacatcacatctctgcagggcatacagccccctgctgtacctctacataaggtcactttccctgtattttaaaataaagctgtgaacagcctagtggagtacagcataacattggcccaggcatgccagtgcttatcagactacttcatctaagataatagtttatgcctaactagtattacagagttatatagtctacaaatccatggtgatacattacatcttaaattgtagttgaagccctttcaacttacactgtttttcttaagtttgttgtagaaaataatttaaagtattataatttttcttaaatctctttaagcataagggtcatttaatttctgagcccttgaaagtttactttcccagctagcttacaagggatggtaatagtttgcaggagatttgtggaagggtcagggggaggagtttgggagcctgggtactgagtgccaggagcttgccctgccctgtgggtatacctcagagctgaacagcagtcatagtgtcaagttagttcatgtggtcactgctttgttgggaaaatcctgcaaagtacatgtgatttcattctgtcctgtttgcctcagtccaggatgggtgtggacacgaaagcttttcagtagtactgtgaaggcttaggtgtctgtagctatgggtcttgccttagctgataaggcatttcacaggccactgactgtaggcagcagtgtccttgggaatttgaggcaggggatgctacaataagatccttggattaagcctctggccaagtcttctggcagcttggggggggggggtgctgtgtgaggttctgtggacttgagatggagttctggttgtttgctgggcagtattggggaacacagacatgcttatggcaaaggtcactgctaatgaagccactggtactcagagcccaatgctggcccctgtcagcctaaggaggctagtgatgatcctgatgtgccagatgtggtgagctcagctctagtgacatgctttctcatattggggagttttgaaaatatgagaccctaaaggctttcttcactggtttctagtttctatttggtaatttgtgtgattctcattgaggctttggtctttcttggtgagatatcatagctagctttagctttctaagatgccttgtgtaaggggatctctgctacagatatgtcactaatggttgacaacacctacatgaggcctgcctctcaataaggaggaccttagactgtctctgcagcttagtgagcagaagttactgggactctgccgggccaagcagtgggaacaccagtaaggcattgagaagaagtgggtaaaccttaggagtaaggccagaaggccatgatgggagcgaaatcaaggcaatttcctaggcttttcgtatttgttccatccaagtcctgaccaggcgtgactctgcctgagggtctggatggggcatagtaagggtgaaatggctgaggagacatgccagtgtgtctaagaggaggaatgggtgggttccgtgtgagctgtgctgttggctacaactcgggagctcctgctcacctgccctccctcacctcttccagcctctgaaaacgatttgctgaacaaacgcctcaagcttgactatgaagaaatcactccgtgtcttaaagaagtcactacagtgtgggaaaagatgcttagcactccaggaagatccaaaattaagtttgacatggaaaaagtgcactcagctgttgggcaaggtgagctttaccagttgctatgtggccagcctcaccctctgtgatgacgagaagggtggaataagggtacttgcaagtctggtttctgtggtaggctggcctcttcatctttactcacagtttttccagatgtctaattgattgatgtaggttccatcacctttcgggatcttagttacattaaataaaatgcccggaaaaccaggcaccagtatgttgataggaaaactccaggcttagttgcctgtgaactcaataagtgatgagttaaataggaaactaaaaaggaactgtgtggtttcttgctggttgggtatcccagggaaacaacagagcgctcaactcgccttccaggcccgtgtttggacctcagtccaggtagcgtcttgtggtgtaatctttagcaaagacccacctctctgggtgagccccacttggtttttacatttttctaaaaagttgtatttgtgtgtgtgtgtgtgtgtgtgtgtgtgtgtgtgtgtgtgtgtgtgttggcacatgtgagtgccagtgcccactgacgtcagaggttttgcatccctggaggctgagttatgggtagttgtctttacctcatcctgaaatcaaatgaggtcctctctgagagcagtaaatgctcttagctgctgagccttacttagtacacatggaagacatgggtggtgatgctggctgtgaaagtaagtgacctgagaccccagagcatggcacacgagtctgtgtcccggatggcttggaaggtgggacatgtggttgcctttcactgtggtctgccagttgggattgctttgtctgtgaagaggtgagtgcagaacttgagaagaatctggaaacatttccagcagtttgtcacagttcctcgaatgccatgtgaggctgtgtttcctcattctgcttctctcattctgggtttttgtttttattgttactgggttgactcactaaataataggcttgccgttttcatggatatacaccatgtttaccctgtcctcggctgtccctctcccctagtgccctccctgtgccccctgcatgtctctcattttgatttgctctacctcatttttactatgtattataaaaacatcagtctgaggctggcaacgttaccaggagggtaagagtgcttgttacataagcaagcctgttagccagagtttgaccccatggaacccacataaaggagggagagagaacatctacacagctgttccctcatttccacatacatgccacaggacacatccacacatacattgtacacccacacaagtaataaaaaattaaacacatcaggcttttatagatgagaaattctcaaagaatgaaaaactacattttagagcttaatttagatggattttggtattgacatatagcagtagtgatttctcttaccgtgagcctcaggaaacattggtatgagctggaagcctgctgatagccatttgctttcagtgccattgaggacagctcactctagctctaaatgagggttccaggtctgtgtggacatcacagggttttcctgtagctttgtctgttgtccagaggaagcagcctccacgtgtaagtcattgctaagaaggttactagaactaaacagtgtctctatcatagtcttcttacaaaaataaagatgagttgcgtgtaattttaagatgcatgcttgctccttgcctggtgccagcaatggccatctcacccagctcccacggctagcttcaccaaacctccaacgaccaccaagtggctgtgccctttctctggcccacctgagtcaccgtggatggaaaacaccagacagccttcatattttaaaaacagctagataacacaactgctgggcgaagaatatcctgccccatcctccttagcttccaccacctgtggagtccctgagacccacatgtctgttgcttcctatcctctctacagccttgtccaaatccttctccctctctctcctcctcttcctcctggggcccagaaatcccaccttatcctttgcccagagattagagtctgccgtctttattgaccagttaaaatggggagaaggttcccatgggatcacccgagtaagtgatccactcctctttggggcagcccctcttcaggaagcagaattagcatcaaaatacaaagagtaccagagcaatccacaacaaagatttattttttttaagtatatggttttcttgattacatgtatatccgtatgccatgtgcatgtttggtgcccaaaaaagatcagaagagggtgccagagcccctggcactggagttatagacagttgtgagccacaatgtggctcgtgcctttagccactgagctgtcagtccagctcttttagccattattaaaaatattttactatgttgggagatacctcagtggataaagcactttttgtgcaaagtgtgagcactggagttcacattctcagaatcgtgtaaaacctaaacacctgtggtaactacccataagtccagcactcaagaggcggagccaggggattccctcggaagactggctagccagactaacccaaccgccaggttcaatgagaccctgactcaaaataaagtggagcgctattgaggaagacacttgttgtcagctttgggccattagatgcacatgcctgagcatccccaccccaccccccatacacacacattcaaacctcatgcaaatacgtaaataaacaaacgcttttactgagctttgacagggtggcttctagtattcatgggtaggtattgctggttttgaccttcccttcctatggattaaggagacttgagtgacagtcaggccctcagcttgcaggagttctcaccatcatgccaagctgcctctggttgacacgtgttctgtacaggcaacagttgccagtgcgaccctgcgttggtgtcttcacctctctgtatttctgcctcctcactggcagcaggagaaagcctggcccaacttactgttgctgcagtgttgtacagctctggtgggttttacacccattgtggctgctgcagtatgacctttacatggggggcttgcgggtagctgttttgaaaacacagaaggcagagatgaacacacccatctttcccttttcacagtaagctaggcagtgttctgtagtggcccctcagaagcaattgcttgctctctggcagctgatcagaggcctggcatctgggcatgtggttcctgttccgagtgctgagggagatgataagctccagatatctggaccctggggactggggttcggcagggctgatctcgaattccttttgacctctctgatttggtcattccctgaaggaatgaatacatgcaaacaccagagcctctgtcatccattttcaatacctgaagacttagaaacttcaaacaaatggccactggtcacctatgagtttttaaatgatcctgaacatgatttcgactcttcgagcagaggctaagtcacctcagagaccatgagagagagaacagtccctgtgtgggtgatgagtcctttccctctgtagggatgtagaaattgttccaagttgccatgagaagggagtagcggattaaggagtcagcttgggaagagaaagggttctgtggagtattaagtcactcaaagtttgatgtgcatcaaatgatttcttgaaagaaaacaagggctttgcagaccccactgtcactttttgctgcttgctgcagccatggtcaaccccaccgtgtgtgttcttcaacatcatggctgatgacaagcccttgggccgcatctccttcgagctgtttgcagacagagctccaaaaacagcagaaaacttccatgctctgagcacgaaaggagagaaaggattggctataaggattccccctttcacagaattattccaggattcatgggccagggtggtgacttcacacaccataatggcactggcggcaggtccatctacagagagaaatttgaggatgagaacttcatcctgaagcatacaggtcctggcaccttgtccatgctgaatgctggaccaacacaaacggttcccagtgttttatctccactgccaagaatgaatggctggatggcaagcatgtggtctttgggaaggggaaagaaggcatgaacattgtggaagccatggagcgctctgggtccaggaatggcaagaccataagaagattgccatttctgaccatgaacaactctaatttcttttgacttgcgggcattttacccaccaaaccatttcttctgtagctcaggagagcgcccccaccaccccaccccatctgctcgcagtgccctgtcctctctgctctcactgaggttctttgggtttccctccttccccttcaagtctagctggatcgcagagttaagtttatgattatgaataaaaactaaataagaacaaaagaaagaaagaaaacaaggtaccgaatcttagaagcaagtagctgtttttctcagatgttgtgaagtgaccacataaacaatcggcaggatgtgtcagatgcagactccacttacctgtgacttactgtgctatgtttagtagctgaaaccagaacaaagtgacccagccatgtgaccattccatgcatattccagggaaacaacacagtaggcatttccattgttgattgtactcatgtctcactcacaagttggtactttcacacgtagaggaactcccacaatgcatttgcagatgtagaagttataggtacatgaatgtgcctcctgggttatttggcacagacccatgtaccagatcttgtcctggtaaaataagcaatgggtctcctcctcttcctcttcctcttacctctccctcctccttccccttccttccccttcctttccgaagcgttctgtgttggagccgcatgtccactctggttgtgggtgggtttttcctttttgtctttataccctttgcattgccagagttttttcttttacagagtaagcatgcatcacttttcacattcgtgagaatgaacagttgttcacatatgaactgggcgagtgtctccctgcctgctggcctctgtgaccaggcttcctctggaaattaggaggcaaaccaacctgagcgtggggagggtggtttaggacaacctgagcggaagcgctgcgtctgactgcaggacttgttgcttcaaaccccaggctcagctaatcctgcaatatgagactatctggtattgttgggtaacatggccagtgttctcttcctcccccaagtcattctgacaagataatgggaatgatttagtaataagaggaaattggacatcttgggaagaatttccagtttgacagaaagtatttggtgaaaaagcccctctataaatcactcaacatgctggctgtgttctagttcactgtttgctttcagtcagggtctacagtgttacagatttgttcttctctacctacccccatccctctttctctgtatgtgcacatgcacacacacacacacacacacacacacacacacacacacccctaagacagatctgagcaggatggtaaggaaggagagaaggagccgaagtgatgtaagaaagcagccattagggtatgctagtttctggttgctaccacagcaaataactacagatttgctgactaaaacaacacaagttggccagcaaggtcatttggtgtgtatacatttgcatgtaggcgtgatgaactgaattcaagctctgcattccacaagaaggagagaaccaattcctgagaattgtcttctgactgccacacaaagtttttgtttaaatttaaagaaagaaagaaagaaagaaagaaagaaagaaagaaagaaagaaagaaagaaaaaagaaaaaaagaaaagacctgcacaggttcaagttacacaaaatttcatattgcaaaggggaagtggacataaagccccacctctaaccaagatgttatttgcaattgagaactgctggcccaggagaaatcacttttctccaatggtgtatcagtcaagttccagggcaggcccatgctcagaagcaggtgaccaaccaaaaatagactccatgggtttggagaggtttttgtttcctatggcttgttatttcttagctgctgctcctgctgctgctttttttttcttgctttattttggcaggtgtgtgtgtgtgtgtatctttttactttgagagagagagagatgaagttagcagagttggaggttctgagaggagttgaagggaaagaatatgatcagagtggattgtatgaaacatttgtaaaaactgggaagaaaagtgtgagtgacagtaattcatgtgtgctgcacacatgcccagaatgatcaaatagaaagttaaccttgagagttacaaaacacatgcacacgttttttctttgtctttctttctttctttctttctttctttctttctttctttctttcttccttccttccttccttccttccttccttccttcctttctttctttctttcttgagagttacaaaacacatgcacacatttttttctttgtcttccttccttccttccttccttccttccttccttccttccttccttccttccttcctttttctttttttttcttgagacaggtttctctgtacagccctggctgtcctggaactcactctgtagaccaggctggcctcgaactcagaaatccgcctgcctctgcctccccagtgctgggattaaaggcgtgcgccaccactgcccagctatctttttttttttttttttgacagttgtgaagtctctagtcaggatgtcagccccactctacctgggcccagcttctgctggctgtagcagactatacttgtgtaacttcccgcctcaaagctgtcttcctcagcttccatgggcacactggctcctcttctcaactcctcctctgggtgctgctgtcagggacatttgtcttaagatacaaagtccaggttttagtcacgatgacgtcatcctcagtcctgactttagccacatctgcagaaacaaggccaattttagaggttccaggggtgaggagatggatgtagcctttagaagcccactcttcattccctgctcagagttttcaagttaatgctgaggtaaacgtttagggaaagtgtggaatgcagttgcttagcacagggcccttccttacagttctcccaagctgatctacagggtggagaaaaaccaaccactgaccaaggtaccctgactcactcaagataccttccttctggacagttctcttcccttttccttcacctttaagggttgcttgcatgacggaggctgtgagctcctgattgctgagatgcagagggccagctctttcccctgagctctacctcactttgcttctcttcctgctctgagacatgtgcatcttcctttcattgcctcggagcattgttggttggcttcaggttggcttgggttgggtcaggattcctgccataactcaagaatcccgtaattggagactaggggtggcatagtccatgaagtgcttgccttgcaagtgtgagggcctccatttggttcccagaactcacaggaaacctgggagccatagtgcctgctgtagccccagtgctcgggatgcgggaggcagaggtaggtacaaccctggggctgactggggaatgcagcctggtgagtgaccatgtctaactaactaaagtgagtgagtggatggcgttcctgaggttgtcttccggcctccatgtccacgtgtacccatacccacatgcccctgaatgtctgtacacacaatgaatttgcagtcatgaaaaaaggcacaactctttttttttttaatcaatgagctgagttctgtgtataaagcctggtttaatattttccactcactctgttaaaggtgtgccacgtcatcaccgaggtgagatctggaaatttctagctgagcagttccaccttaaacacccatttcctagtaaacagcagccaaaggacgtgccctacaaagagctcctgaagaagctgacctcgcagcagcacgccattctcatcgacctcggtgagtccaccccgccccagagccaagagggaatgccccacccttgaggagtgtagagagactatccaggtcatttagtgatcacaggtgccctctgagagcatacgcgggctcccttcgtgcctggcggctggcttgttctgcttggcatgttgtaggtgtgaggaggccttgagtggtcattaagtctgttcattgacacagaactctggttcagctcagtaattcatattttccaagggatgctttacagtacactgaaggagcaacctgggagacacatcggcttggattggctacaggagaaacacacaagcttggtttgcttttagaagcagtctctgggctgtggtgtacaaacagaacttgtcagaataattgtagaaaactgtgtgttggcagtttcgtcttggaaagtgggcagtgccttggttctggaatagcttttaaaacgcagaaaggaagcagtgtattggatttgcagtttccatggaaaagacctcgctgacttagaatgtaattatgtggaacaagagaccctctgactgttggtggctgagcagcgatggagccctgccttcctacttgctcccaaggcctgtctctgctggggggagctagctccgtggccttcccgaaggccagttctggatgctgaggatgtcgtcccccctccccaggacatgcgcctgtctctgctcagtgcactgcactgcccattctgtgggtctttccccgtgttacagccgcagtggagacggtgagctgggtcaggccggagtcagagccacacacagtatcttcatgcttggaaaagtccctcagactactctgcagggctggctttgaatgtcatcctcagaactgtcctgactgtagcttctccgcccacaggccaagcccacccttcctaacccacactctttctccctggtactcaactactgcagtgattattattattattattattattattgctgttattgtttaatgctaacacttaactttaccttgagttgaatgttgtatgaaatttactcaatccatttcttttcattttcacaacagtacacatagacaagtgcagagaggttacataacttgttcatgatctcataactaatttgcatgagaactgtgttcatcccctcctagcccctacctctgctcagcaggatggtgccctccatgggctgcacttgggctgtattagagtgtactctcaactccaaggacagtgcccgacacatagtaggtactcaatgtatctttgccatgttgatggcgaggcactgagcagtcaagtggcatggccatcagcgcagaggtgcagggacctatccaccatcattctgacagcctaagacttccaagccctacaggctccatggtgctaagagatgccagtactgggcaggtgaagggggaggctgactggcatggccaatcgatctccagccaaagcccatctggcctggtgaccctgtggaggatatttgtacattatcagcagctgaatttgttagtgtggtaacagaacagtggcatcgtgttcctgttctgtgaggtgaactgaaaactgacctgggggtaggggtgtggaaaggagtggcaggtctctctcctgccttctccactcccccatggcacaggaggagaggaaacacaagaaattttgctccctgttttgcattttcttcctttggcttcttgtctgcattccccttactcttcctggacaggtcagccctctgcctctgactgcttgaatgtcatcccttttctgcagaaagagaatgaagtccagattggccacactcccctgcccctgccccctccctccccagccagccctctccctaggaagcactgtttgtctgagccccagctcactggcctttcccctagaaaacagcgcctgattcacatcctctctgcccctgttcagccccaccctctcccttctgcttccaaggccagctgcacacagcccccactctgttggccctccttttttctcacctctggcccagtgctggcctggcctccactttggatgacctccagcatcctcccaggggcctgaagagcctctatttgcagcaatctgtgtcgcgacttacctccaccagggtcctagggtttatccagggatcctgccagcatcattttgtccctatgtgaaccagacatcctggttgctgacctagacccagtggtgaagtctggcagccttctgcaggactcctgttcttctgtgagtcgacatcaaataaggcctagcatggtaggcctccagctctggccatgacatgtgtcaccatcttttgtttagtccacactgtgtatcttgtctgttgtgtatattccgtctgtactgtggcggtctgggcccagtagaggtgtgtggtgtagagtgatggcacagtccatgcctttcagtgtagctttcctacagtaagcggctggaggaagaacaccacaggggagaaggactttggcttttcagtggtttgctttctgtctcttggtttatgagactggccttttactttttgtaacagctttttgtaagacttgttccttcaaagaataaaaacagtagactttatcgtttggtcatattctctagtttacaaaatgtgatttcagctgtggcctggcttcatctttacccagcctgttgtggactgtgtggcccaaggactggaggaagtactttggcagctctgtgcagagctccttagcctcactgcttgtcccgctggctctgtttcctgctttcttacatcttgccctctgcctttcccttagtatagactgcagccagccaggagaaagctgctgccaggctcagcaggtgccatggggctttctctgtctccagctcaatggactgctctgaccttctgatgactatagcctttctcccctctgctctgtaggcgtggataacatgggctgccaaagtcctaccttctgtttggggctcctgctcactttctgacactgttactggaaggtactggggatcccagacattctcccgggccccatcctagctggccagcaatcatctgcctctacctggtgactccgtgtagcctcccctgggatgggaggactagtaggaagaacacagtccagtccagacacaggaatcccattaagtcacagcaggagctgaaactgccgctgtcagctccttacagtctcattgtgattgttaccatgtgtaaagctgtggcactacgtagactctttgaagatcccttgggtctctcagtgggtctctctgcagtagctttactgttcttttcctgagtcaggatctcactgtccaagcctaaaaccatcttgcctcagcccagcataggtgtgctaccatttctgatgtcagaaatactgttggttttttttatttgtttgttttgttttgttttgttttattttttagttttctttatttaatgtatatctgggtgtacacctgcataccagaagaaggcatcagatccagttacagatggttgtgagccatcatgtgggtgctgggaattgaactcaggccctcgggaagggcagccagtgttcctaaccactgagccatctctccagcccagaaatactgttgttgatgagcttcttagagagcacagggaaacccagatggtcagttactagcagagtgcatgtctggagagtcacttagataaaggatccaggttaggtgctatcatgaattgtctttccaccaaatagatgttttagccagagacctcaagcctgaggaagggagaagtctgcccgcctctcttttagaattaataaaagatgtgtaggtctttattgctaactgtaaatcaggtaaaaacctttatggcaaaagacagaagcatgcctagaacttgtcatgcatccacactagcctgtctgtccagttggagactaaactctgttctgtggaagtcacagttccagagtctaataaattcctgtaccaacaacagcacaagttatcccagagtgcgcacctttgatattatcaagatctcaatatgaactcgcttttgtttggtcattctaaatacaccctgggtggtgcttagtgtgagttgtcaacttgacacaatctgtaatcacctgggagaccagccggcctctaggcatgcctataggaaataatctttattatgactaaccaatgtgggaagacctatctatctacactgtgaacaagaacattctctgggctggagaccctaaactgtgtgaaatgcaggtggtgagctagacactagcatgcatgcactcactagtacgcgtgcacacactaccatgcacacattcagtagctcttctgactttggatataacatggccagctgcttccagccctgctgcctgactccctcccatgatggagtacacctcagctgtgaagtgaagtaagccctttctctcaggttgcttttgccagaggacttcatcacagcaacagcaggagacactaagttgcctgtaaccttgcagggatagagcgtgagtgctgagatggatgaagcagagtgtactttcattccttcacagatactaaagtcttcctgcacccgctcgccgtcagtcagttgtccgccagccactggttagcagccatctccagcacctcgaaagatgtctcgaaagtgtttagtagtcagtgtcaagactcccacaatattcaggcttaagctgccacactgaaatcctgtgaaaacctgtagcaggttgtcacagatgctcacatgccgagccccgagagcaggtcccagcagccactgctcactctggggcacttagacagagctcagatggtgtcactggctgcaattgcaatgggtcgtcttgagcagctagacatgttgtcactttaggaggcacagtttggtggaagggcacacagcccaaaggaggacatctggtgcctagctgtgtcactctccacctcatgcctttgagacagggtctctctctgaagcgaccgttctgtctccatccacccacagtgctggagttacgggcatgcatgtgaccatgcccagctttctgtgtggcttctggggcttcaaactcagttgtctgtgcttttgtatagcaagtgctcttactctctgagccatctccccagtctacaggagtttctttgtgccttttgacagtttccatttaacaatctctttcggtgtatgaaagtggnnnnnnnnnnnnnnnnnnnntgttgtcactttagaggcacagtttggtggaagggcacacagcccaagggaggacatctggtgcctagctgtgtcactctccacctcatgcctttgagacagggtctctctctgaagcgaccgttctgtctccatccacccacagtgctggagttacgggcatgcatgtgaccatgcccagctttctgtgtggcttctggggcttcaaactcagttgtctgtgcttttgtatagcaagtgctcttactctctgagccatctccccagtctacaggagtttctttgtgcccttttgacagtttccatttaacaatctctttcggtgtatgaaagtggcctctccttaacagagactgaaagggcctgcagttctctacctcatggtgaattataaagtgtagtttatgaaggaaggaagtcccctttttccaatggatttgccaaggactcctcagtttctacttacgattctctgacgagggactttcagatccagtgctatatatacacctagtggttattctgccaggcttgtcgcaggagagacttagccattgtcttagtcagggtttctattcctgcacaaacctcaggaccaagaaacaagttggggaggaaagggtttattcggcttacacttccatactgctgttcatcaccaaggaagccaggactggaactcaagcaggtcaggaagcaggagctgatgcagaggccatggagggatgttctttactggcttgcctccagataagggtcactggtgagccttccaattccgaattgtagttcattccaaatattgtcaagttgacaaccaggaatagccactacagccatggactttccttttattcttcctgaagtctggaccaacagagcaaacagctggcagtgttttgtgtatagtcacccagctttgagtgagcagtgaggtacaccgagctgacgttgtccttggagacacaaggctcaggccctgcttcagcaggctcttccataaggtcttctgaggaatgtcctccctccctcctggtgctggcgtcacaccatctgaccaccttctgatcatggcgggagggctgccacactctggcttcatgagagtgggttgtccaggaaacagtcttaatccaactggtccgttctctccccagtagcctgccttgctctcctttctggatttgcagccaggaaagtgtataagctgtgtgggcctagagcaagtgtttcacaactgggaggtcgggacccctttctcttttaagatcaaatagcccaaagagcttcggcttatatggaaaatgttatattaattatttactacattagaaactaaaactgacaaagttaaaaataagtttttattttaaaatgactataataaactcattatataaacatacaatgaaaaacaactgttttccaaaagaaaaccagtgatgactgtgacattatgttgtactttttaaatatctttcctagcttatttaataaatcatctggactatcatattatctttatctagtttgttggaattatattatttgaaataaacaaagaaaaggctgactttatagagatctgtagttataaaaagaaaggttttgaggctggagagatggctcagtggttaagaggacaggctgttcttccagaggacctaggttcaatcccagcgtctaacatggcagctcagagctgtttataactccagtttcaggtggtccaacaccctcatagacacatatgtgcaggcaaaacactagtgtatgtgaagagagagaagagagaagagagggagagacagacagacagacagacccatgaacttgtgaaccctgaacaagcttcacggagcccaggatcccctggccgcagcaggagcacaggagcggtaggtagcacagagctagaacacatagtgggaagacaagaactcccagcttgcctccaagcctggcaacctgagtttggtgccagaacctataaggctgagagagaactgactcttccaggtcgttctgactggcacgggtgagatgtgcatgcccttgactcacccaataagtaagtagaggattcctttttagacagggaagagaactatccatgcggggaggactgttccatgtgcgaggggcctagtgagggaatgggaacagagtgagaagggtgcgacctgttctttctctcctaagaaagcagttctcttagcctattcaacacaggagccggaagtggctgttgagtcctcaaaatgtgatgagcctaaatttaggtgtgctgtcactcagaagaacccactggaattcaatggcatggaaagaggaggcaaaatgccttgatgtttttgtgttggttacatgttaggatgataatattggatctgttgggttaaacatcttattaaaatggattccacgtgtaactttaaaattattgtgtgtgcacatgatgtggccatgtgggtatgtgtgccatgtgcgtatgtggaggacagcttggctgagtcggttgtctccgtccaccagtgcataggcttcagggattgacctctggttagcaggcttatacaggtgcccttacccattgagccatctcgttggccccactgtaacaccagaactgtgtagattccctttagctcttgcatcatggtctcatgtagctgttaactgagagctgaacaaagataccttgcctcttctgctcacgtggacatatacaatgctgtatgtagccacacatggtcagagactccaggagtcttcactcagccctgcacctagcctaggggacaaatctcagggtgggaaatggatgtgcggatctccaggttagtggaggggaactgtgttgtgtgtgcacagagcgtttgggggaatgtctgttgatgaagagagtagcaaaagcaagaagggagtttggaatgcaaatgtctgtcttcttcaatccaagcgcagatgtgttttggggtgaactaaaagctttctaagggaatggaggacaaacctgtggatttgcaggatctcctcctgccccactgaggcaagctcagtaactccagctagtattgctgtggcccagatgtgcctgctgccattgatgacgagctaggccatggttctcgccagtgtcaaagctgggcccatgcacctctgcacttaacgaggcaccttcctgttcctagaaacttccttctctgtctatcgctttggcaggcttcagcaatgaaagcctcctgggtgaaataaggcacacacagaagaagtgccacgtttttatttttagcagttttctttattgtgtctatgtgcatacttgtgccgtagcacacgtcttgattagaggacaacctgtggggttactttccttctaccactcgggccctggagatcaaactcaggttgtcagcttaactagtgcctttaagacccactgagtcctcttgctggcccatggcatgttttattttgatagcaactttgtggaactaatcaggattctaagacccatttttaattcctttccaggaggtcactgtgggaagggtctgttccaatatttgagtgacaggctagggtatgtgtctagaaagtaccgtgctcttgggaagtgaggttctatggtcaggacaagcagctttcttgttttttattgaaaaagcatatattcactagactaaaggtcgttataacttcttttacctaaattagcactttaaaaacaaaatnnnnnnnnnnnnnnnnnnnntgccccactgaggcaagctcagtaactccaggctagtattgctgtggcccagatgtgcctgctgccattgatgacgagctaggccatggttctcgccagtgtcaaagctgggcccatgcacctctgcacttaacgaggcaccttcctgttcctagaaacttccttctctgtctatcgctttggcaggcttcagcaatgaaagcctcctgggtgaaataaggcacacacagaagaagtgccacgtttttatttttagcagttttctttattgtgtctatgtgcatacttgtgccgtagcacacgtcttgattagaggacaacctgtggggttactttccttctaccactcgggccctggagatcaaactcaggttgtcagcttaactagtgcctttaagacccactgagtcctcttgctggcccatggcatgttttattttgatagcaactttgtggaactaatcaggattctaagacccatttttaattcctttccaggaggtcactgtgggaagggtctgttccaatatttgagtgacaggctagggtatgtgtctagaaagtaccgtgctcttgggaagtgaggttctatggtcaggacaagcagctttcttgttttttattgaaaaagcatatattcactagactaaaggtcgttataacttcttttacctaaattagcacttaaaaacaaaatcactgtgcatgctgatacgcacctttaaaatctcagcacttgcgcaggaggctagatgctttctgtgaggctagcctggtctccacagcaaattaggggccggcctggtctacacagcgagctccagaccagccagagctacaaactccgagccagtctcaaaaacaaataaacaaactaaacactgcaaaacttggtaagttgctgggttttgttgcaaatattatcctagaacccagctgactacattcactgatcagaggtggttggtacttaaggcacactgatgttactactgatcacctataggtctcgttccctgacgctgcatatctggttccgtgggcctcttgtatactacccctaacttgtattcttttcccagggcgaacctttccaacacatccatacttctctgcccagcttggagcaggtcagctgtcactttacaacatttctgaaggcctactcgcttactggaccaggaggttggatactgccaagnnnnnnnnnnnnnnnnnnnnctttcttgttttttattgaaaaagcatatattcactaaactaaaggtcgttataacttcttttacctaaattagcacttaaaaacaaaatcactgtgcatgctgatacgcacctttaaaatctcagcacttgcgcaggaggctagatgctttctgtgaggctagcctggtctccacagcaaattaggggccggcctggtctacacagcgagctccagaccagccagagctacaaactccgagccagtctcaaaaacaaataaacaaactaaacactgcaaaacttggtaagttgctgggttttgttgcaaatattatcctagaacccagctgactacattcactgatcagaggtggttggtacttaaggcacactgatgttactactgatcacctataggtctcgttccctgacgctgcatatctggttccgtgggcctcttgtatactacccctaacttgtattcttttcccagggcgaacctttccaacacatccatacttctctgcccagcttggagcaggtcagctgtcactttacaacattctgaaggcctactcgcttctggaccaggaggttggatactgccaaggtctcagctttgtggcaggcattttgcttcttcacatgagtgaggaagaggcgttcaagatgctcaagttcctgatgtttgacatggggctgcggaaacagtatcggccagacatgattattttgcaggtaccaagcatccttgcggcataagtaaaaagatgccattcctctatgggcagatctaggctcctgtccactgctggctgctgccatctcatctgtgttaggtgttgctctgtgtgctccccatgatggctctcaggacgatgctgttaattcactcagcttgtagccagggaaactgaggtgcaaatggattatgaagttggcccagagcacacagctagaggttttatgttttcctccttccttctctttccccctccctggaaggtgggactagaggtggaatttaaatccaggcctgtctggctctaggaccttccctcacgtcccttcccttagccttctatggatgtctctggtgcttcggaccctgtgatctgttctgttttctgcctggcatcctctctccatccactgtcatcatccagggttcagctccactgtcaggaactgtatcccagaagctcctcctgcctgtgctggcactgggtccctcatttccactcttgacagacagaccatgtcatgctaccttgtctcatgccttcaggacaacacagttcctgccataaaccaccctagttatttacttcctagcttctcatatcctgatttccttaatgagagaagattttgttgagttatacccctagctgctagcagttcctggaatggaatagaaaccctgtcagtatttgatttatgagcaagttcatcaacagaaaagcaggctgggctgggtgctgtaagcccacctttaggaggctgaggcagaagaatccaaagttgtaggctgtcccggcctgtatagtgannnnnnnnnnnnnnnnnnnnaatttaaatccaggcctgtctggctataggaccttccctcacgtcccttcccttagccttctatggatgtctctggtgcttcggaccctgtgatctgttctgttttctgcctggcatcctctctccatccactgtcatcatccagggttcagctccactgtcaggaactgtatcccagaagctcctcctgcctgtgctggcactgggtccctcatttccactcttgacagacagaccatgtcatgctaccttgtctcatgccttcaggacaacacagttcctgccataaaccaccctagttatttacttcctagcttctcatatcctgatttccttaatgagagaagattttgttgagttatacccctagctgctagcagttcctggaatggaatagaaaccctgtcagtatttgatttatgagcaagttcatcaacagaaaaagcaggctgggctgggtgctgtaagcccacctttaggaggctgaggcagaagaatccaaagttgtaggctgtcccggcctgtatagtgagtttaccctataggtgagcgccatggaaggcccggtctcaaaaacaaacaaacaaacaaacaaacaaacagaaaagtctagatgtagcgcagtggttgtttcccagcccctggtgaagtcctgggttccagccccaccttccaggcagggcgggaggagggccagacacaacagtacacccagctcatcaagcactgtgcttgctgctttccagaggtggagaaagctctgggcccttatctgggagtatccagagcattgcttattagctggtcatccattcatttcccagcagggttctgtaacttcagggctttagaatgtaccattggagctaaggactttgtttgaaaatcccaggatgcgttattaaaagttcatttggtttttcctgtaagcttgaactatgtgaacatgaatctcacaaagggaaggcagctactgtgagacttgactctcacctgtagactgactctgagagttgactgttgagcacagagagagagggctcactctctgggaccatgatgaaggggcccttggttcactcctagcaggagatttttgttccaaattccccttggttagagtttttctaagaatgtaagggaattgtttagatctttgcacaggcagatgtttagggtctcttagctggggagcacaaggggaggacgctggagtggaagcagacccagcactagtgctctaggcttctactgatcaatgggagcctgttcccaagaagcttgggtggatgcattaggtcagtggatactctaagccaaatagagaattgacagggctaaacaccgcccccccccaatgagtaaatctatacatgtagttggtgctcagttcccagcccctatggacgtgtgttcctacagatccagatgtaccagctgtcacggctcctccacgattaccaccgagacctctacaaccacctggaagagcacgagatcggccccagcctctacgcggctccctggtttctcaccgtgttcgcctcacagttcccactcggctttgtagccagagtctttggtgagcttcctccatccatctgccagccagcgttcccctgtcacaaagcagcgtcattgctaccctgggggtttgcttggtctttatagctatctagtcaagcttggaatggagnnnnnnnnnnnnnnnnnnnnggcacttagacagagctcagatggtgtcactggctgcaattgcaatgggtcgtcttgagcagctagacatgttgtcactttaggaggcacagtttggtggaagggcacacagccccaaaggaggacatctggtgcctagctgtgtcactctccacctcatgcctttgagacagggtctctctctgaagcgaccgttctgtctccatccacccacagtgctggagttacgggcatgcatgtgaccatgcccagctttctgtgtggcttctggggcttcaaactcagttgtctgtgcttttgtatagcaagtgctcttactctctgagccatctccccagtctacaggagtttctttgtgcccttttgacagtttccatttaacaatctctttcggtgtatgaaagtggcctctccttaacagagactgaaagggcctgcagttctctacctcatggtgaattataaagtgtagtttatgaaggaaggaagtcccctttttccaatggatttgccaaggactcctcagtttctacttacgattctctgacgagggactttcagatccagtgctatatatacacctagtggttattctgccaggcttgtcgcaggagagacttagccctggactttccttttattcttcctgaagtctggaccaacagagcaaacagctggcagtgttttgtgtatagtcacccagctttgagtgagcagtgaggtacaccgagctgacgttgtccttggagacacaaggctcaggccctgcttcagcaggctcttccataaggtcttctgaggaatgtcctccctccctcctggtgctggcgtcacaccatctgaccaccttctgatcatggcgggagggctgccacactctggcttcatgagagtgggttgtccaggaaacagtcttaatccaactggtccgttctctccccagtagcctgccttgctctcctttctggatttgcagccaggaaagtgtataagctgtgtgggcctagagcaagtgtttcacaactgggaggtcgggacccctttctcttttaagatcaaatagcccaaagagcttcggcttatatggaaaatgttatattaattatttactacattagaaactaaaactgacaaagttaaaaataagtttttattttaaaatgactataataaactcattatataaacatacaatgaaaaacaactgttttccaaaagaaaaccagtgatgactgtgacattatgttgtactttttaaatatctttcctagcttatttaataaatcatctggactatcatattatctttatctagtttgttggaattatattatttaaataaacaaagaaaannnnnnnnnnnnnnnnnnnnnnnnnnnnnnnnnnnnnnnnnnnnnnnnnnnnnnnnnnnnnnnnnnnnnnnnnnnnnnnnnnnnnnnnnnnnnnnnnnnnnnnnnnnnnnnnnnnnnnnnnnnnnnnnnnnnnnnnnnnnnnnnnnnnnnnnnnnnnnnnnnnnnnnnnnnnnnnnnnnnnnnnnnnnnnnnnnnnnnnnnnnnnnnnnnnnnnnnnnnnnnnnnnnnnnnnnnnnnnnnnnnnnnnnnnnnnnnnnnnnnnnnnnnnnnnnnnnnnnnnnnnnnnnnnnnnnnnnnnnnnnnnnnnnnnnnnnnnnnnnnnnnnnnnnnnnnnnnnnnnnnnnnnnnnnnnnnnnnnnnnnnnnnnnnnnnnnnnnnnnnnnnnnnnnnnnnnnnnnnnnnnnnnnnnnnnnnnnnnnnnnnnnnnnnnnnnnnnnnnnnnnnnnnnnnnnnnnnnnnnnnnnnnnnnnnnnnnnnnnnnnnnnnnnnnnnnnnnnnnnnnnnnnnnnnnnnnnnnnnnnnnnnnnnnnnnnnnnnnnnnnnnnnnnnnnnnnnnnnnnnnnnnnnnnnnnnnnnnnnnnnnnnnnnnnnnnnnnnnnnnnnnnnnnnnnnnnnnnnnnnnnnnnnnnnnnnnnnnnnnnnnnnnnnnnnnnnnnnnnnnnnnnnnnnnnnnnnnnnnnnnnnnnnnnnnnnnnnnnnnnnnnnnnnnnnnnnnnnnnnnnnnnnnnnnnnnnnnnnnnnnnnnnnnnnnnnnnnnnnnnnnnnnnnnnnnnnnnnnnnnnnnnnnnnnnnnnnnnnnnnnnnnnnnnnnnnnnnnnnnnnnnnnnnnnnnnnnnnnnnnnnnnnnnnnnnnnnnnnnnnnnnnnnnnnnnnnnnnnnnnnnnnnnnnnnnnnnnnnnnnnnnnnnnnnnnnnnnnnnnnnnnnnnnnnnnnnnnnnnnnnnnnnnnnnnnnnnnnnnnnnnnnnnnnnnnnnnnnnnnnnnnnnnnnnnnnnnnnnnnnnnnnnnnnnnnnnnnnnnnnnnnnnnnnnnnnnnnnnnnnnnnnnnnnnnnnnnnnnnnnnnnnnnnnnnnnnnnnnnnnnnnnnnnnnnnnnnnnnnnnnnnnnnnnnnnnnnnnnnnnnnnnnnnnnnnnnnnnnnnnnnnnnnnnnnnnnnnnnnnnnnnnnnnnnnnnnnnnnnnnnnnnnnnnnnnnnnnnnnnnnnnnnnnnnnnnnnnnnnnnnnnnnnnnnnnnnnnnnnnnnnnnnnnnnnnnnnnnnnnnnnnnnnnnnnnnnnnnnnnnnnnnnnnnnnnnnnnnnnnnnnnnnnnnnnnnnnnnnnnnnnnnnnnnnnnnnnnnnnnnnnnnnnnnnnnnnnnnnnnnnnnnnnnnnnnnnnnnnnnnnnnnnnnnnnnnnnnnnnnnnnnnnnnnnnnnnnnnnnnnnnnnnnnnnnnnnnnnnnnnnnnnnnnnnnnnnnnnnnnnnnnnnnnnnnnnnnnnnnnnnnnnnnnnnnnnnnnnnnnnnnnnnnnnnnnnnnnnnnnnnnnnnnnnnnnnnnnnnnnnnnnnnnnnnnnnnnnnnnnnnnnnnnnnnnnnnnnnnnnnnnnnnnnnnnnnnnnnnnnnnnnnnnnnnnnnnnnnnnnnnnnnnnnnnnnnnnnnnnnnnnnnnnnnnnnnnnnnnnnnnnnnnnnnnnnnnnnnnnnnnnnnnnnnnnnnnnnnnnnnnnnnnnnnnnnnnnnnnnnnnnnnnnnnnnnnnnnnnnnnnnnnnnnnnnnnnnnnnnnnnnnnnnnnnnnnnnnnnnnnnnnnnnnnnnnnnnnnnnnnnnnnnnnnnnnnnnnnnnnnnnnnnnnnnnnnnnnnnnnnnnnnnnnnnnnnnnnnnnnnnnnnnnnnnnnnnnnnnnnnnnnnnnnnnnnnnnnnnnnnnnnnnnnnnnnnnnnnnnnnnnnnnnnnnnnnnnnnnnnnnnnnnnnnnnnnnnnnnnnnnnnnnnnnnnnnnnnnnnnnnnnnnnnnnnnnnnnnnnnnnnnnnnnnnnnnnnnnnnnnnnnnnnnnnnnnnnnnnnnnnnnnnnnnnnnnnnnnnnnnnnnnnnnnnnnnnnnnnnnnnnnnnnnnnnnnnnnnnnnnnnnnnnnnnnnnnnnnnnnnnnnnnnnnnnnnnnnnnnnnnnnnnnnnnnnnnnnnnnnnnnnnnnnnnnnnnnnnnnnnnnnnnnnnnnnnnnnnnnnnnnnnnnnnnnnnnnnnnnnnnnnnnnnnnnnnnnnnnnnnnnnnnnnnnnnnnnnnnnnnnnnnnnnnnnnnnnnnnnnnnnnnnnnnnnnnnnnnnnnnnnnnnnnnnnnnnnnnnnnnnnnnnnnnnnnnnnnnnnnnnnnnnnnnnnnnnnnnnnnnnnnnnnnnnnnnnnnnnnnnnnnnnnnnnnnnnnnnnnnnnnnnnnnnnnnnnnnnnnnnnnnnnnnnnnnnnnnnnnnnnnnnnnnnnnnnnnnnnnnnnnnnnnnnnnnnnnnnnnnnnnnnnnnnnnnnnnnnnnnnnnnnnnnnnnnnnnnnnnnnnnnnnnnnnnnnnnnnnnnnnnnnnnnnnnnnnnnnnnnnnnnnnnnnnnnnngctgagattgttctgtgaccagaactgatcatcagtaggcttgttcctgctccaaagtcccgaaggctgggtggaggcattcacagtaacccttgcttgtgtaatcagaggcaggtacactcatctccccttccattctccaggtggcaaatgctaggatccaaagccttgaagccacggtagagaaacttcttaccagcgagagtaagctgaagcaggctgcgctgaccctggaggtggagcgctccgccctgctgcagatggtggaggagctgcggaggcaaagcgcccggcccagcactccagagccagactgcacccagctggagcccacaggcgattgaccgctgccagaagagactgtgcaccattaacactgtccaagccttaatcaagagagatggaagtcagaggcagagaagagagaacttctcagggaggaaactggctgaccagcctgcagatccttttgagctcagaacttgggattggaggacaaaagtctcagagttattgttgtttttggttctaatccgtcccctttccagtcctggttgttgtagctttagatggcatggacatgaataaattacatttatggttcctcctccttcttgcagagacacagtgtgtggaaagagcattcatgactgcagtgttccaaaaacaagatgggtctgaaataattcctcaggcagaagaaacgtgaccctttgtcagtctgcaagaaaggttcctgggagggtgcccttgatgtcacctgaggtgcagtgggcccttgtccatttttattatgggacctaaggtgaccatgaggaaggaagaaaggggtttatttaaatcagatatattggttgttcctgaatccacggtcactcccattggtactgaagagagctcatcttttacaaactcagtgttttagtatggtttttgcttaccctttcaagtcacaggtaaatgtttcataaggaaatcacagtttttagattccctgttattgctagtgtgggacctgtagctgtggggtctgacatatttatttctttttgattgtttcatatccacactatagggtcacatatttatttttgtctgttgataaatgatgtaccactgccacatcttcctttgagccttgaaccccttggaaatctgatttctcatagaaggaacaaaacataccaagatttccaggggctcctaagatgctgaaacattgcaaaagaaaccagattgcaatcaggtgtatggcagctgacagcttttcagaagtaggaagtgtgttttgaaagtactcaaacacacgcacgccttccttgggatggcgaggaccctgtgccttcaagcagagtgcagctcacactcaccctgcttctagctggtcctgtgtagagcatcacccatgtgtgcaacagcttttttttttcttttaacatacacacaaaggcttaggttagggaagaccaccagccaggagccctggctatcggaattggtcctgccttgggctctgttggccctcctgttcctggaggtctgctgcagcgctgttggtaggaaaggagccttgtaagtctgggctgtaaggagagaccatcaccgttggggtcatttgggatctcctagccctatcaaagggacactaaatggccaggagggatgtaagactcccacatggtcttgggtcagaggagaggtctctccataaaccaacatgcccagtcccagttggttggagcaggggttgtcagaggagggtgacagtggacagcttctttccacattgtattttattatttgaatgttttaatgttgaattttggacatgttattactgttcaaaaaacactgactctacagtaagaaaagagcaataaaacagattattcacacctgtgtcttcgtgttgtctgtttttcaaactctgaattttggctttacagctaggagtgcaggaggctttggtatgcatgtcatcccatttgcaagggcatgtttgagctatcagttctgcttccagtatcagtgccagagtattgatgatgtcgggacacctttccacagagatgtgaatattagtatcaatgacactggcttctcccattgtatgcacaccattcatcagcacaagattccattgggccagagtagcatgcttacatactcctataggtaccgcaccatgtacctatagtaaacctataggattggttggaaatggtcacaactggtgacctagcaactctgtgacttcatgtacacttgggggttgtcctcctttgccactgtttgtcttgtacacttgagtcagtcccttaagcactgatacatagagcctgatgacaaccagatgtggtccctgggtttgggtgccctggtctacatatagacagaaaagcaagggtccatttgggattgggggaattggaagaagggctgctcttgtgattggaagactagatttgcttctcagctggagaagtgagggaccaaatggaggagcatgactcgaggagacgccagttgtctgagatacagactgctgagcctacaaggcagtgtggaactgtgtgagaagctaccgttgccatagcgaccaggagctgtagccaggggcctggtgataggcttcaggcctccttccatcagcacgtaaagcaaagtaatgacactgggattgccaagtgcctccattggcatgctggacaagatggccttcagggacaacaggccttcacttcggtcttccatgtctcatagcaacaggtcctagaccccattttgatctagaaccctcagggtagagggctgtgagaaattctgtcaaccaagttgacagtgcaaactaacaagtaattttggtacctatgtagtctgagtgatagaaagaacatgaatcattttacagaggcccttggtctaaatacagttagggaccctaccgagttcagattcagaggctgatttctgcagatgaaaagctggaagactcctgctgacacctggaacttcctatcctactgtccccttaagtggtgggccctaggctcttaagtgtgaataccgtgtaaggatttggtttcacaaattattcttggactaggaaaaactggagggagtctcctgcctcattttataaagaaaataaagggtgaaaaagaaggttcaaatggttggctagagggtcagggtgtatccccagtctcctgtctgccttgctgtggacacttcccaacttaaattgtaaactgcagtacatttttactgtttgaagctcacatagccaaggctggccttgcagtagcttgagtgtgaccccagacttgcacctccactcctcggtggagagactatcagctatctcactgagcaccctagtcttagcacagttatcacctcgctgccctttctcaggtgctggacaaccacactagatttgggcagcggggagctttaggactctcgtgtctgatggtgtcaattttactaccagggaaaattctgttccctctagacaagggagatcatcataaggaatccaaatgggattgcctcctgaactgcctcctacaactttatcatacctgagttaggggaagggaccctcagtgtgggctccagggtagaagacagctgcagtagagtccgaccccattaggtgtttactgaagtgatgtgcctgatacctatacccctccaactcctcctcctcctcctctctccttcctcctcttcttttttttttttttacaaaaatctttataactaaatgttttcagaagaaaaatttcaacacaaacttgcctttgactttagagaaaagaatgcttccaatgaatcgaatgtttcctgttgtcctgtctgcaatttattagtataactgggggaatacaagcaagtgcttccttacacagcagccacaaatcatttaaacaatttaaaagcacataacaaaacattaaaatgatattctaagtagctagaagatacgtaatcagctggctgttgctactgtaaacctctaatactactatgtgtgtatttatgaatgacccaacaaattagaaaataagaattttgaatgaagcagtttgtttcaaagctgaggataaagtgtggtgtttgcagtactggggtttgaacccagggctttgtgcatgccaggcaggtggtgtctcactggctgttcccagccctagcctgtgttcttaaggagaacaatgtatacttcattattttaatcagatgtcacttcccaatcagcctgatggggtggagagatccccctgtttaaggctaagggtagcttctatatgtgtatataaagatatatttaggaagtggtttgatagtatattaattctgctaggcagcagtcttaggttgcaacctaaggcctaaaccctctttaggaatagattttgtagataggctttacagtattaggtacgggtttcctcatgtatactggacctcaaatctgagcattgagtgcctggttacccccataatagtcatgccactgttgatgcccacatcttgccagattggttcagctcccaaaccatccttttctacaaagccctcccatattactttctcagtaaattttatccgggttcagcctacttagctctctgttctggaccatcgatgtgggggtgtcggtagaaagtcctagtctttggggtttcatttggttttggtttctgttaccacctagacacatgttcacctgtgttccatgtagatgtgctgtctgggttgtatttttcttacgggttacaagaacttcatgattctgggtctgaagttggctttgttgtatagaggagcagagctggggtgggagagcatgagagaggagagaaaaatgtcgccttgtaagtgccctgtgtcatacttcgttatctcactgagcacccctagtctcagcacagttattaccatggtgccctttctcaggttctgggcaacagacattgctatggataatcaaccttatgacattgtttcaagtagccttgctatgttccctaccgccagctttaacctgatgatctcctacctcagccttgtgagggagggatgacattaatgcctttctactcctgtctagagatgtgacatgaccagctgtctctagctcctgcctttgtgactttcttcaactgatggacaacaaccttgacttatgaactaaaatgaattccttgttccctaagttgctttttgtcaggatatttctcacagcaacaggaataaacccagaacagaggcgaatggtgtaattgtggttcattgacctcggggcactcttgtctgcatgggtcatggtgttcttaacggatatttctttaatccctggggccctctaaagaagctccggggacctctaaggtgcttctcctgcactgtttgtgtttaatcgaatgtcaactgtacagctattgggccctgacataaatattcaaagctaaactagcaggcttcccaaaagttagcatgccagtctgtggttctaacccatgactcattctgactctctccactctttactttagtccattttgtttgtgattttattttttgaggggcagagtctcactctatagactgggctggcctggtcctccctacgtagcctaggcaagcctggattcgtttgtgttttcccagtaggtgcactctcaagatatcaggagcaaaatggaacccggtgccagtaacagaaggaacatgccttagttgttatagtcagaggccctggagtcagctgaaatgaacccaagtctataaaatgggaataaatattttgcatgtttattgtgcaagtctttgtggaaagcacacatttctgaggcagaaggcacattagcgagcagtgaaagttagcattgtgttctgataccataaaccaactgcatctaatctgtgagcttgaaattccgccgtggggtataaaatttaaaatagggatctctgagaatgactgttaggagtccctaagatcagttcatactgggccatcgtaactgtatgtttctgagtgtgcttagccaagcacgcgatggaccgtaggaaaccatcctttgatgtcacaatgcttttgatggcagctcttacaatagtaaataaagcttattaaaacctcaagctccgctgcagacattgtcctgtgactgcttaaaccacaagaaccctagatatttgttctcagcctcaattatgtatgcattagaatctcccagcaactttttttttttaagacaggctctcatgtagtctgtctggcttcgaactcaatatgtagccaaggtcatgccacctgcttatcttctccagtacatacacaaacgtctgattctcctgccttcaacttctcagcagtaggataatatacatgctatgacgccgagtttatatatgctatgatcccctggtattggggatggtacccagggcttcatgcatgctagacaagcactatcacctgagctacagccccagagaaaactgtaaaaccccagtgccacgaggaatgctagctgataagccagactccctgtgagagggcacagtgattttaaagcttagctaagatcagaaaccagtgccttagttgataatacattaagatgagcgaaagggctcagggtttaataatgtgatctggactttattaaggattaatttatcagttcttaaccagttgggttcatatctatgtcagtgacctagatgcagcccttgggactatgcctcagacagcatgtaatggatgataggaccttgagactggtgttgacaagcgctacaagtgacctaatttgagcaagatgtacttgatacattaggttttcaatttaaaggtaggcagtggtactaagtgtagacttggaccaaagctactgttgtcagttttaaagaaactagaaatgcatctactggctctactccagactaataactcaggactctggagagccaagttagatcattaacaagtcttccagggaaaatactgatgtgcactaaagattctgaaaccactgtatggaggggagaaggcccctcgacaagaacagcactagaggcatgtgggttagcgatggcagcggtgctgagagttcctattcttgggctgaggagatggttctgtgggtaaaagcagtgtgcaagcttaaggaccttatttcaaatccccaggaccccatagcaagttgaatggtagtatctgtaatcccagtgctcctaaacagagatgggaggtagagacagagaattgggtggcctggtctatagtacaaaaacaataaaaagcccttgtctcaaacaatgtagaaagcaaggaccaacactcaagagtggcctctgacctctatatacgctcagtggtatgaacatgccagaattcactatgaccacacacgtgcacacacacatgcacgcacgcacgcacacttgctgattcttttattattacttttatttatgtgtacgtgccaatgcctgcttgtttgtttgtgcactccatgcgtgctggtgccttgggaggccaggaaaatgtgtcagagcccctggaacagggattacagacagttgtgagagtcctgatgtggatgccaagaactgaacccagattctctggaaaaacaagtcgtttaaccattggaaagcccatattttgcaagctgtgccattcacttatctctgtgtcccacattgcagatctatttattgtaaatctgagcaattccagagaaagttcactggcaagaagtaagcagagatagagtgtcaaaatacagtagcagggaaaacatatgggttgccatgtgccagcgattgttctgagccacccaggtggataaccacaaggaaagatgtgagcgaagttactggggcagcagtgctgatgggtagtgtcagttcacttccttgtttgttgatcactggagctctgtgtgcctgagaatctttgagataaacagtaaagatatagaaatgaatgaccactggggagttaaatattagccctcttgcatacccatttctaccctcgttcccccaaaagggcattgtgggagatataagaaaattctgcttcagcatgtgaagggaatgggagaaggcaaggaagttaggagagatgctacacaaacgcaagcaagtctccctggtccacagcacgcatagggcatgcatgcaccttgagaccctggtaggaagtggggtgctggggtgtagaacacagatactcccccattgtctggtgactgggtgatgtttatacacaagccagtgcaacaggaacacagactccaggacagtgtacaagactttgcctaagagtgaattgctttgtcccaaagaactgtcatatcagagggcagattccctagccaagtgttggaaacttgggagcaggctttgccacagccatggccagcctgagctccctcggctactgtctggcctagggagcttcagggatgcagcactgactccatcatggctgcccaggaaagtactctagcccatcattgcccgagtttggctcctctggagtttaaaaggttgttggcatgagatgtgtgaggctgagaaggtctacactagggaaacctagtttctaccttttctatatgtggtctttctgaagccacttctcggggacagggatggcacgtgcaaaataaagtcccaaatgtaacagaaatgtacaaaagcgaagaaaagccttcccccgctctgtctacccacatcctatcacccaaaagataatcactgcgtctaacccctggctagtataactctccaccaccctaccagggaagcctgttctccatctgtcctcctacccctgaccaccgctgctctcccacagcagattccatgcttgctggcctctgtgtgtgtccctgcctggagaaagcaagattaatgagatgaaggcctgtcctcctcaacctaagattctggagcccccatgtaggaaagactctcccatagtcactcaacaagtgagcaccaccatcttacccttcgaatggattcggccttgcacattttaaatcctaaacctggacaagtcctcagtaagctgaaatattcttgtggggcttcttatgccagggtgtttgtaaataggcgctgtccctctgcctctgcagtgacctcatctctgcctcctcagactttttcccagccccgggtgggagctagagggaacagaagatgctggcagcaatcttcctcaccaggggaccccaggtcccaaagggtctgtgtgacagttacactctcttaatgttataccccccagcagaaaagtcatgttcttatctaaactatcttgagttagaagaactttaatggctacagagtgccttgtcagctgtagctgatctaagaaaataaacattttataactacgatatcgcaagcggctccagacacaagagacacttggtcccgatggatggttcttataaataaccaggcaatcacgcactgcagaaatagctagaatttctatgacttcatagggagccaaagggaaacgcccttgcaaagtgaacgctaaagtcatcccacagtcaaaatgcggtcaggcgccgtgtgggagccaaagacagtttgcttcagccccagcccggcctccagtagagccacactgatgtgaacccctgcattgagtccttatgcttagggccaccccttgccaaatgcactcactgaaggggcctgacagaaagcacaggccgaaacaaacgaccccacggccggtggcaggcctgagatcagctccttaactcgatggctgtgcattgcttgcatatgggttctgccatctggagtccattgccctgcagcccagtgggtcctgagtgattcaagacaggctgcagcatcagtccacaaacagagtttcagcatcactggttaaacttaaagtgtttctgtaaccaaggggagtatcagaaaaaccccatctcctcgacattttaattttaagattttatagtgataagggagaaagcgaattatttttcaagggagggagatgtaacaatctccctgggaaactgtcttcaggaacaaggtacccattggccatttccccccgtaagagtcaaaacaagggaggcctagccctgctcagtggctctggtcccaggatggccagctctgtgagggcaggaatgcacttactttgtcgaggtcagccatgagaggtcatttcagttcagactggtcttgtcatacagctcaggcttgcctcaaactcttaacaatcctccagcttcagcctctagaatgccaggattacaggcctgtggaagtatgtccaaccagggatagtcatttctctcactccccctattacctgagttcgggtcagagcccgggccctggcagccctaacaagccaggctcagccaccatcctcaacggaccaactaaagagacaagtgagagtggaaaaggctaattcactaggaagatgaaggcatgtcaacattcagtgatgaccccgaccgtgacccatcttcaaggtcaattcatgaggtttaggtttagacattggacaa

SEQ ID NO: 1647 - DNA, 3695 bp, Mus musculus
acctcggaccgaccgtctcttcaacccgcaagagaagcagagactgtggagtggacccccaccccagcagcgtggggcggcaagagcacagccagctgaggaccatggacgccccgcccgcccaggccatcttctgggtgcccgggagcacctgcgcgccctagctcagcccggagttctgagcgtgccacctcactggattctgccctcagaagcacgtgaaatagatcacttcatttaaagtaggaaaatagtagcacgttttcctggctctccagacctctcccaggatggaggcaatcacattcacagcgaggaagcatccgttccctaacgaagtctccgtggacttcggcttgcagctggtgggctccttacccgtgcattctctcaccactatgcccatgctgccgtgggtggtagccgaggtacgaagactcagtggccagtgctctaaaaaggagcctaggacaaagcaagtccgcctttgggtttcgccctccggactgcggtgcgagcctgacctggagaaaagtcaaccatgggacccgctcatctgttccagcatctttgagtgcaagcctcagcgtgtgcacaaactgattcacaacagtcacgacccgagctactttgcttgcctcattaaggaggatgctgcgcacaggcagagcctctgctatgtgtttaaagcagacgatcaaacaaaagtgcctgagatcatcagctccatccggcaggccgggaagattgcccgccaggaagagctgcgttgcccctccgagttcgacgataccttcgccaaaaagttcgaggtgctcttctgtggccgggtgactgtggctcacaagaaggccccacccgcactgattgacgagtgtatcgagaagttcaaccatgtgagctgtggtcgcagaacggactgggaagcgcccaccgggcagccatcagcgcctggccccaggcccatgcgcaaatccttctcacagcctggactgcgctcgctggccttcaggaaggagttccaggacgctagcctccgcagtagcacctttagctcctttgacaatgacatagagaaccacctcatcggtgggcacaatgtggttcagcccacagacatggaggagaaccgaactatgctgttcacgattggccaatctgaagtttacctcatcagtcctgacaccaaaaagattgcactggagaaaaattttaaggagatatccttttgctctcagggcatcagacatgtggaccactttggattcatctgccgagagtgctcgggtggcggcagtggcggctttcattttgtctgttacgtgttccagtgcacaaatgaagctctggttgacgagatcatgatgactctgaagcaggctttcacggtagctgcggtgcagcagacggctaaggcaccagcccagctctgtgagggctgccccttgcaaggcctgcacaagctctgcgaaaggatagagggaatgaattcatctaaaaccaaattagaactccagaagcacttgaccacactgaccaatcaggagcaggccaccatattcgaggaggttcagaaattgagaccaagaaacgagcagcgagagaatgaattaattatttcttttctgaggtgcttatatgaagagaagcaaaaagagcacagccacactggggagccaaagcagacactacaggtggcagcagagaatattgggagtgacctgccacccagtgctagccggttcaggttagattcgctgaagaacagagcaaagaggtccttaacagagtccctagagagcattctgtcccggggtaataaagccagaggcctgcaggaccattccgccagtgtggatctggacagctccacttctagtactctaagtaacaccagcaaagagctgtccatgggtgacaaggaggccttccccgtctctgagacctccttcaagctccttggctcctcagatgacctgtccagtgactcagagggccacattgcagaagagtctgccctgttgtcaccccagcaggcgttcagaaggagagccaacaccctgagtcatttcccagtagagtgccctgcgcctccagaacctgcccagagctctccaggggtctctcaaaggaaactcatgcggtaccactccgtgagcacagagacgcctcatgaacgcaaggactttgaatccaaagcaaaccacctgggtgacacagatgggacccccgtgaagacccggcggcactcgtggagacagcagatattccttcgagtggccactccacagaaggcttgtgactccccgagcagatatgaagattattccgagctgggagagctccctccacgctcccctttagaaccggtgtgtgaggacggcccatttggcccagtacaggaagaaaagaggaagacgtcacgcgagcttcgagagctgtggaaaaaggccatcttgcagcagatcctgctgctcaggatggagaaggagaatcagaagctacaagcctctgaaaacgatttgctgaacaaacgcctcaagcttgactatgaagaaatcactccgtgtcttaaagaagtcactacagtgtgggaaaagatgcttagcactccaggaagatccaaaattaagtttgacatggaaaaagtgcactcagctgttgggcaaggtgtgccacgtcatcaccgaggtgagatctggaaatttctagctgagcagttccaccttaaacacccatttcctagtaaacagcagccaaaggacgtgccctacaaagagctcctgaagaagctgacctcgcagcagcacgccattctcatcgacctcgggcgaacctttccaacacatccatacttctctgcccagcttggagcaggtcagctgtcactttacaacattctgaaggcctactcgcttctggaccaggaggttggatactgccaaggtctcagctttgtggcaggcattttgcttcttcacatgagtgaggaagaggcgttcaagatgctcaagttcctgatgtttgacatggggctgcggaaacagtatcggccagacatgattattttgcagatccagatgtaccagctgtcacggctcctccacgattaccaccgagacctctacaaccacctggaagagcacgagatcggccccagcctctacgcggctccctggtttctcaccgtgttcgcctcacagttcccactcggctttgtagccagagtctttgcaggtggcaaatgctaggatccaaagccttgaagccacggtagagaaacttcttaccagcgagagtaagctgaagcaggctgcgctgaccctggaggtggagcgctccgccctgctgcagatggtggaggagctgcggaggcaaagcgcccggcccagcactccagagccagactgcacccagctggagcccacaggcgattgaccgctgccagaagagactgtgcaccattaacactgtccaagccttaatcaagagagatggaagtcagaggcagagaagagagaacttctcagggaggaaactggctgaccagcctgcagatccttttgagctcagaacttgggattggaggacaaaagtctcagagttattgttgtttttggttctaatccgtcccctttccagtcctggttgttgtagctttagatggcatggacatgaataaattacatttatgg

SEQ ID NO: 1648 - protein, 993 aa, Mus musculus
HVFLALQTSPRMEAITFTARKHPFPNEVSVDFGLQLVGSLPVHSLTTMPMLPWVVAEVRRLSGQCSKKEPRTKQVRLWVSPSGLRCEPDLEKSQPWDPLICSSIFECKPQRVHKLIHNSHDPSYFACLIKEDAAHRQSLCYVFKADDQTKVPEIISSIRQAGKIARQEELRCPSEFDDTFAKKFEVLFCGRVTVAHKKAPPALIDECIEKFNHVSCGRRTDWEAPTGQPSAPGPRPMRKSFSQPGLRSLAFRKEFQDASLRSSTFSSFDNDIENHLIGGHNVVQPTDMEENRTMLFTIGQSEVYLISPDTKKIALEKNFKEISFCSQGIRHVDHFGFICRECSGGGSGGFHFVCYVFQCTNEALVDEIMMTLKQAFTVAAVQQTAKAPAQLCEGCPLQGLHKLCERIEGMNSSKTKLELQKHLTTLTNQEQATIFEEVQKLRPRNEQRENELIISFLRCLYEEKQKEHSHTGEPKQTLQVAAENIGSDLPPSASRFRLDSLKNRAKRSLTESLESILSRGNKRLQDHSASVDLDSSTSSTLSNTSKELSMGDKEAFPVSETSFKLLGSSDDLSSDSEGHIAEESALLSPQQAFRRRANTLSHFPVECPAPPEPAQSSPGVSQRKLMRYHSVSTETFRKDFESKANHLGDTDGTPVKTRRHSWRQQIFLRVATPQKACDSPSRYEDYSELGELPPRSPLEPVCEDGPFGPVQEEKRKTSRELRELWKKAILQQILLLRMEKENQKLQASENDLLNKRLKLDYEEITPCLKEVTTVWEKMLSTPGRSKIKFDMEKVHSAVGQGVPRHHRGEIWKFLAEQFHLKHPFPSKQQPKDVPYKELLKKLTSQQHAILIDLGRTFPTHPYFSAQLGAGQLSLYNILKAYSLLDQEVGYCQGLSFVAGILLLHMSEEEAFKMLKFLMFDMGLRKQYRPDMIILQIQMYQLSRLLHDYHRDLYNHLEEHEIGPSLYAAPWFLTVFASQFPLGFVARVFAGGKC

SEQ ID NO: 1649 - DNA, 180540 bp, Homo sapiens
  misc_feature (1)...(180540): n = A, C, G or T/U
gtctcaaaaaaaaaaaaaagataaaaaagagaaattattttagaagtgggaaattatcctaaatgaaggtaaactaaaccaccttataaaaaacagaaaattttgatttactatagaagaagtggaaagaggaagtttgggtcagatttttattcactaatagatttgatcaggaaataggagttgattcttttcagtcttatttttgaaggagaaatataactttcagtttagaaaaaaaagttatttcttgataaaattagtgctctgtcgagtgatgcttctaatgtttccactatgaattatagcaaaatgtctgagtttaaagctaagagtctatgttgagttacaggatggggtgtgggtgtcgaaatcttgactctaaatttttacagtgttttcttttatgagctcaggactgctgggtttttccatgaatttgaaacaagcgcacagtgttttgaaaagaagattatttgcttaaactttatagactgagctaaaaatagaaaaacaccgattctatttttggaatgtcttacaagctaaaaagtaaacatgattgctgttcgtattgaacaacatactgagaacagatgtttaaatagcaaaatgtaataatttagctggttttgaaatatcacagcattttaatgaattgattgctaatgaagagatagacctatgtcataagtaaatttctgtttcagcaagtgttacttacaaggagaaaaaaaggcatccccaagctggtatgaactttactctcaaagggctttgttactatcttcttgtctcctctggagttgcaagttcaggggttcccttttaccctgcagtcttcttagtatttctggtgggactgcagccagctattaattttgcaaggcttttggatacatttaatgaaggtggctggggccgctaaaaatgttctcatgaagtcggcttgctgttattctggctaacaagaaactacaatgtaacgcagaaaatcaaaacataaaattagagaccttgattcaaatgttgacatggatatatcaaggtagaatgttcttgaggtacccacctgaatttataaggtactcctcaataagtcctcacctaatttgttcttctacttctcctctacattttctttccttcatgaaccaatttattgagcaccgtttgctctgaagacggtcttcaaatactccgtcttgtcacctgaagattcatcttgaatccggcatgatttaaaatgtgagtgtgggtgtgtccttgagagaaagtgagccatgtagacaggcaaggagggattggaggtgtggggttgggagagggagtgtgagttccatgtgtgagtgagcaggacccaagcctggggacgaatttctaaactgttgaaagtgtggcgggcaagtgatgcttgtgtgtaccaagtctctgcccagctagtatgataggaatgtaccagagacacttggacgatttgtggcttggcttatggagttaaagtaacaattggagcacagtcttgctgttagacacagcaactcataaaaagggagaggaaaatatcaagacacatcctgcaggcccaccatgctggagtgaattttggctcacacacaatcccttctctgatcttaactgtgtgtcctgtcctattttgtgtgtctataaacccagctctgagcttgaggcctccagcccatcatttgttttacttctacatttaagacatatcattcacactataattccaatatcaatcattgttgctactactaatactattactaccaccactacatctacagccaaaatttgctgtgcatctactataggccagtgctttatctgtgtttttgtttgtttgtttgagacagagttccgctcttgtcgcccagtctggagtgcaatggcacaatctcggctcatggcaacctccacctcctgggttcaagtgattttcctgcctcagcctctggagtagctgagattacaggcatccactaccaccatgcctggctaatttttgtatttttggtggagatggggtttcaccacgttggccaggctggccttgaactcttgacctcgggtgatccactgcctcagcctcccaaaaagtgctgggattacaggcatgagtcaccacacccagccaaaactagcccttttaagtgtgggatccattattacaaaggcccagtgacttaacttacctaaagtcattcaatcatcatcacacagcgggatttaccaaaattaagatgtaatttacattctgtaacattttggtatttagtaaatccacaaattttggtatttagtatattaatgtaaccatcatcaccatctaattccaaaacattgtcatcactgcaaaaagaaaccctgcacccattagcagtctctccctattttctcctctctccagcccccggtaactactagtctattttctgtctctatggatttgcctgttctggatatttcatataaatagaatcatacagtatgcagtcttttgtaactggcttatttcaattggcatagtgctttcaaggtccatcagtgctgtggcatgtatcagtacttcattactttttatagccaaataatattccattgtgtggatataccatatcttgttgatccattcatcagttgaagggcagctgggttgtttccactcttgggagttgtgctgctgtgcacattcatggacacatttttacatgggcatatatgttttcaatttatgcagagggatttttagtattagattttcaggatttggtattatccttggcaaatatgggtttctttggaaacaaatttttctgtttgtaagagatgattgcatatcatcaaacttacactaacattccctctccactatgaagctctgatttctgtcctatctcctcctatgcaaggcctgatttccagagaacgttaatcttctaagcctttctccatgcggatccttcttcctggaaagcccattccctctccaccttctgtaaatggcctgaaaccagccaggaagctgggttttcctttgcagcctgaagttattttccttcctctgggaactcatcgaagcttcacctggactttgagggaaaataacttcaggcttttgtcactcttttccctgcctgagcttccctgctaccctctatgccccttgagggcaggattctggtctgactccattttgctatttcctgcaaggacttctgtggctttccaaaataggtgctaatgaatattcatatttgtgaactgaattcctgatccattgccaagtggttctgattcacttgaaacccagttgaacttccttgtagagtttgtattacaatggctctatttttaaccaggtcttagggtggggaggagcaagctggcagagtgaggtcattcttttgcatgtgtccctgcctcactggcccccccccactagagggcagcctgcctggcatcacctcctaaacttacaggaggttttgccgcccttgcttcttgttcctcctcaaaagaagaaattggcagaagagctggggcaggagtgtcagggtttgttttggtggggatatggtcaggcttagtagggaagcaactcttccagttcccagaccggcccccctgcctttcaagtcctccgttaatgtctcaggagtgctgagatggtgagacattaaagcatccttttaaagttacttagacaacaatttgagatttctgtagggatactgtattagtctattcttatgctgttaataaagacatacctaagactgggtaattataaaggaaagcggtttattgactcacaattccacgtggctggggaggcctcaaaatcatggtagaaggcaagaaggagcaagtcacatcttacacggcaacagacaggagaagaattgagagccgaacaaaaagggttttgccttataaaaccatcagatctcatgagactcattcactaccatgagaacaggatgagggaaatcacccccatgattcagttatctcccactgtgtccctcccacaactcatgggaattatgggagctacaattcaagatgagatttgggtggggacacagccaaaccatatcagatactatcgtgtttagatctctgcagtcctatttggatagcctattgctttccacagagcaactatatatatatattttaaagtaaaggatctacaactgtaagagtggttcttgatcctggctgataatcagaatcacttgctagaatatatttctaagctttaagtaaacccagagtcaacattatgggtcaacaccaataatgacctctgtggctgaattcagtgggctgacacatttgacttggctaggtggagtgttttaataattgagaatgcattctctaagatgctgtagttacttcattctttatcctctcacaccttgccctcttcacacatttatatgacctgcttgctctttgaggtctctgagaatttgacctttgctccaaaacagcccaatcatctgagaccctctactctctctctcacttggccaccttcccattacaggtgactctgatagacaatcagggctggaaactatcagtgtctttgagcaatgactattctgtctgcagaggttctcaattctgactgcatgagagaaacaccttggagatgttaaaaattactgatgcctggctgggtgcggtggttcatgcctgtcatctcagcactttgggaggctgaggcgggtggatcacctgaggtagggagtttgagagtagcctgaccaacatggagaagccctgtctctactaaaaatacaaaattagccaggtgtgacagtgcatgcctataatctcaactactcaggaggctgaggcatgagaatcacttgaacccaggaggcggaggttgtggttagctgagatcgtgccattgcactccagcctgggcaacaaaagggaaacgccgtttcaaaaaaaaaaaaaaaaaaagattactgatgcccagtatacgtacaatcctttcagggtagcatatgcagttccttgtgggaaggatatatttttcagatgggtgggagagtagtattttacagaaaatagtgtatttgaataggccaggcgcagtggctcatgcctgtaatcccagcactttgggaagccgaggcgggtgggtcacctgaggtcaggagttcgagaccagcctcaacatggagaaaccccgtctctactaaaaatacaaaattagccgtgcgtggtggtgcatgcctgtaatcccagctactcaggaggctgaggcagaagaattgtttgaacctgggaggcggaggttgcagtgagctgagatcgcaccactgcactccagcctgggcaacaagagcgaaactccatctccaaaaaaaaaaaaaaaaagaaaatagtgtatttgagtataggattagattttctgatgttaagtttccttttgatggaattccagattataacagaaaatgtctttgtgcagtgtgactggcaagctacatgctggtagtgaattaaaataagagctgtcacgtatatttcttaaaatatttggtgttagagcaccacacattgctatcaaatctacccaattcaaaggctcctcctactttcccatgagattagtgattctgcctactcctggattaggaaggaagacttggatcagagaaagacccctgtgtgcctaaaagataacacaaaccttagacaaattctaacccagactgcaggagcctctaccctggatgtgtatatactgagaattggatccaggtttaaacaatgaacccttcatgtccttatttcacctgcctgcatacgttcccgctgttaactgttacattgaggatttggcctgtttttttgcaagaaatgcagtttttattcccctaaacctaatgtaattttcactttttggcatctctattttctgtggtggaaaatttatcttagtcataggtacttcagatttccttagtcaattctgggttctcctcatcctttccccagaattgcttctaagttctgggcatttttggagagtttcgtgtaggagttggagtgatggagtatgatgacatttgtcctgggttcagcttgtccagtctggtcctcagctgaccatccactcacatcaaaactatgttgttgcctgataactctctaggtcgctctctagctgaactggttcataccagcccaagaacacaggacagttttggctgctttctccagggcctattggtcagtaccttttaatcattaacgttttaagaccaatgttaatgaatctcatctactagtgcttctcaaactttaatgagtataccagtcacctggaattttggtaaaatgaaggttatgatgcagtaggtctagattagggcagggcctgagattctgcatttctaaccaacagccagttgctgctgaggctgctggtctgtggaccacaccttgaatagtaaggttgtagagtctacaagcattctcgctctaatggaactgtcagcctccatctcttctaagtgtttgggaaagtgatgtggtaacagggaaagatttggctaaatggctgcaaatgcactcccttttccaccttcattaagcagggaatatcactgcttaaaagtgagagaatagtacttccctaggatgcgtctaaggcccttttcaagggtggcctctgttggaatgatgtcactttttttttgagacagggtcttgtgctgtcacccaggctggagtgcagtggctgaatctcaactcactgcagtttcgacatctagggctcaaatgatcttcccacctcagcctcctgagtagctaagactacaggtgtgtgccactatgtccagctaatttatttttatttttcctttatgtagacatggggtctcaccgtgttgcccaggctggtctcgaactcctgagctcaagtgatcctcccatcttggcatcccaaagtgctgggattacaggcatgagccaccatgcatggcctgatattactcttgactttctccatgctgttttttttgagacagagtctcactctgtcccccaggctggagtgcagtggcatgatctcagctcactgcaacgtaggcctcccgggttccagtgattctcctgtctcagcctcctgagtagctgggattacaggcgcatgccatcacgcctggctaattttttgtatttttagtagagacgaggtttcgccatggtggccagggtggtcttgaactcctgaccccaggtgatctacctgccttggcctcccaaagtgctgggattacaggcatgagccaccacgcccagcctctctatgcctttacggttttatctattcctatgcaccagataaaaccacaagggtggaaaaaagatgaaaccctatcatcccctgtagggtctagccccacagggttggtgggttttttccccgtgtgcagagacgagagagtgtagaaataaagacataagacaaaaagataaaagaaaagacagctgggcccgtggtaccactaccaccaagatgtggagaccggtagtggtcccgaatgccaggctgtgctgatatttattggatataagacaaaggggcagggtaaggagtgtgagccatctccaatgataggtaaggtcacatgggtcacgtgtccactggacagggggcccttccctgcctggcagccgaggcagagagagagagaagagaaagagagagacagcttacaacattatttctgctatcagagacttttagtactttcactaatttgctactactatctaaaaggcagaaccaggtgtacaggatggaacgtgaaggcagactaagagcgtgaccactgaagcacagcatcacagggagatggttaggcctctggataactgcgggcaggcctgacatcagtcaggccgtccacaagaggtggagtagtagagtcttctctaaactcccccggggaaagggagactcccattcccggtctgctaagtagcgggtgttttttgttgacactaacgctaccgctagaccacagtccacttggcaacaggcgtcttcccagatgctggtgttaccgctagaccaaggagccctcctggtggccctgtccgggcataacagaaggctcgcactcttgtcttctggtcacttctcactatgtcccctcagctcctatctctgtatggcctggtttttcctaggttatgattgtagagcgaggattattataatattggaataaagaataattgctacaaactaatgattaatgatattcatatataatcatatctaagatctatatctagtataactattcttattttatatattttattatactggaacagctcgtgccctgggtctcttgccttggcagctgggtggcttgccgcccacaatcccccatgatcctctccttttgatattcatgtccttatattatctcctccccttaagtgtggactagacttatgtctttggtttttcacaaacagtaatagagcaaaagtgttgggatgtcacatcttaattcataaaacactgtttttggatttgtgcgttctcttggatcacttgtgctgggggatacaaactgccattttctgatcagtgctatggaaagaaacagcaagaaacagaggccctgagtccagcagcttgcgaggaactaaatacgggcaacacctatgtgaatgagcatggaagtggatccttcagtcccaggccagtcttgagatgactccagcctcagttaacagcttggctgaaattttagggcgactttcagccagagccatccagctaagatgctcctggatttctgacccacagaagttgtttgtggttttaagcttctcagttttggggtaactttttatacagcaataggtagctaataccctcactaaactcagatgccagatatttagggaacaacattaaaatgtcccaatggtccttcaagaagataatgcacaattagtagaaggaaaagagaagcagaattcttgggctgggttggccatttggcctgaggaactcagtgagtggttccacctgacacatgcataacacatcagcgattaaacctttggacttttttttttttcaacgtggaactcaggagtggctgggattgaaactcagctttacctttgtagccataaactgaccaccttgtctcatcatcttgccttgggagagaagaaaactatggtgaaatcaacatttctcaagttgctaaagcctcctggcaggcaggagctaaatggttctttttcctctgccccacttttggtctcaatggccgagtttcctgactccaagaaaaccacctttgattatataaaggtattaggggctggggaacactggtcttttgttactagcaatctaaagcgcttaggaagaaaagccctgggggtgggggtcacccctggaaagttgggcgggctttgtgttagctccaactctggggcttttgtggaacctcggagagggaggaattcttagatttctgaaagttgtgcgaaacggaccccagaggcctggaaaggcgcgtccccagcctccagggtttcctgcgcagccctgggcatctcggaagggggcgaccccagcatgtcccaacttcccgccagcagcggagcgcgggggtgggcggggtcggctgcgcgccctcccctcctctcccctcctccccccgcccaccccctccccgcgctctcccctcccacttccctttctctgcctggccgccccgcgggcgcgacctctcggggcagtgacgaactgggtggagcccgccgccgccgccgccgccgccggggagagcgatgccccggccccgccgctccccaagcccgcccccggccgcccgcgggcccacgggccggcggcgggagtgagcgggagccggcgggcgaagagccgccgcccggcccgcgatgtcaccattgttcagctgggtggccaaggtaggcggcgtcgggcgggcgcccgttaccggagcggagcggcaggcgcggggctggaacatttgtaaccttcgggccggggctgggccgggccgctggaggccaggcgcggcggggggcgagcggcgggcgcgaccaggtcgttagccgcgcgtttctcattcattagtctcccagatccctgtggggaggacgggcgaggtagcggcgcccatttcacagttggggagactgaggctgtactcggggacccctgcgggagcccgaacccagcaggcggctcctccggcccctgtcgctccccgcgccgcggagctgccgctcggtgcctccccggcgcgggacctcgcggaagtcgacctcgcgtgtctccctcgcgggtgtcgccctcgtgtgtctccctcgcagaagtcggcttgcgctgggccgcctggacagggcgccgaggatgcccagaggctggtgcccacaaggggcgtctgtctttcgtttttaaccctctggtttcaaagggcatgttctgaggtctgagttttaaatagaagtttttaactttccattcccacaaagttttattttcagaacatcagcgccttcgagataactgggtggtgcaaatccaggccagttgcactgttgctaacaggaaggcataagtgtagatttcccgagttcccaccagttcgagaacacagtaatagcatcaatagcattctttttatccactcctgcagtgccaggtgtctgaatgtgttttaaaggatgcgaccctcgccaccttgaaaggctcgctggtcgttagggcatcttgctgtcaccccatgcactcagtcccttggccggcgccttcccagggcttgtttcctgtgtatggctggttgagtaataagctcacaactcgttagccatactgtgaggctttaccaattaataatttaattaggtggtggttatgtcttgagttatcatgcaatgcttttatagtcttatttaattacatttttatgaatacctgtttgtgagcaggtatggctttgcctgtgatttaagtgatacaaaattggagacacagaaactagataacactagtttttagatgggcaaaagtttttaggtagattttcttactaggtaaataacattccattagaatcacttcctgaaacatagctggtggtaaaatgagatgactttcaaaaacgttttgagtcattaaaaagtcatttcaaaaaccatcacagacttttaggacgattgttagccttctccgagtgtcagtacgttggaaaagtttatatagaggaaatgtaggctggtagcttaatttggattctgaatcttgttatttcaaaattattatttttgagacagagtcttactcttgtcacctaggctggagtgcagtggtgcgatctcagttcactgcaacccccacctaccaggttcaagcgattcttgtgtctcagcctccccagtagctgggattacagctgtgcgccaccactcccagctaatttttgtattttcagtagagatggggttttgtcatattggcccggcaggtctcgaactcctgggctgaagtaatgcccccaccttggcctcccaaagtgctggggttacagatgtgagccaccacacccgccctcaaaattattatttcgattacaggacaacagcggaaaaactattaaatgtttttggagcaaattcatgtatacctcttagcatacatttttaaaatgtggttattttatatttcatttcctgtaggtggtgcatgcattacaaattatatcccgaaattgaatgatttttatagataacgtgttatcctgtgaaagattttagaatacgaaattagtctttggaagtttatttcttggagttatagattgtaagaatgatgttctatggaactgatgtggtttacggtgaagaggcaagtcattaacacactttacattacaaactaggtaatatcctaaagacaaagacaaaaggcatagataatgtacacaatgtgaataatcttgaagttgttatatttgacttcagaatgccccttcagaaacacacagctgcacatgagcacaggcctcacacaaacacctgcacatccagttacgcagctgactttccttttcctttttcattttgacctttgcaactgcagctgaacacctggtggggaaggagaaggggtgggtgtcggttgattcacatggatacctgagcacgaatgtgtttttctttttttttgttttgagacagagcttcgctcttgttgtccaggctggagtgcaatggcacaatcttggctcactgcaacctctggctcccgggttcaagtgattctcctgcctcagcctcccgagtagctgggattacaggcttgcgccaccacccccgctaattttgtatttttaaatagagacagggtttctccatgttggtcaggctggtcttgaagtcccgacctcaggtgatccacctgcctcggcctcccaaagtgctgggattacaggtgtgagccaccgcccccggccaagcatgaatgtgtttttcttgcacgatgcattagtattgtgtgaatattgaatgtgtagagtgggcaatttcatgatgtaggaataaagccaaaacgggagagttttgttttaaagagattatctgtttaaagaagaaagaaaaacataagatgtacttttaaaaaaaattggacatgatctggaacattagggcaggtgtacattgcatcaagaatgtggctgggctttatagcagtgtgatttcttgattagtctttcagtggggacacttgactttttacgcagtttataaataaaactgaacttctcaagctttgtgattttcatagtaaactcacagatgtccccaacaacctgtcagttttgagtatatctactgtttctatgcctccatgtatctgttagtcaaaactgactgcagcagaactgccaagtaacttccagaatttatttggatttgcacctgcttataaagtttgtagctaagattattgctggtatctcaagttggtagattttaaatatacatatgtcagtttatgagaaaaaatggaaaatgagaactaaatatagccaagtttgctgtgtttcaaatccaagtatagtttcatatagtttatggtgtgtattaagtatttaccttatgaataaagtacttaactgtgtatttaatgtattaattaaggcatttaactgtgtattttccagtgctcattcaacaagtgttttattaggtactttttgtatataagcagtgtttatgtcctggaggagttaattcactctgcacaatagattatcctttaaaaagtgtgcaccctggagatttgtaaattaaatatttaaagatgcattaaaaaaggaatcttttttttttttgaccctgagtctcactctgtcgcccaggctggtgtgcagtggcacgatctcggctcactgcaacctctgcctcctgggttcaagtgctcctcccacctcagcctccctagtagctgggactacaggcatacaccaccatgcccagctaatttttgtatttttagtagagacagggtttcaccaggttggccaggccggtcttgaactcctgacctcaagtgatctgcccacctccgcctcccaaagtgttgggattacaggtgtgagccattgcatccagcccacagaatccttttgtaaagcaagtaactgattgctaattaatattttatgtaaaaccaggttttccgtatttgggcattacttttaaaacattggtttatctagccaccattcattcaacaggtcatttaacaaatgtgttcagtgcagatatttatggataacctacctataataggtactatttgaggagctggggatttagcaaccgacaagcagacccctgttttcatggaattctagatgggagagatagcaaagcagcaagcaaataggtgaacaagattatttcagatggtgatcagtgcgaggaagagaagtaagtggctccgggctggggtggtgcaggggtggcattccatctgactggtgagagggcaggaaacatgctccaggcaggcctcagggagaagggaggtatggctggaatatatccagctgggtgcacagcactgagctttgagtggggaggggtaaggtgggccaggctgtttatggctccataggcttagaatggggtttggatttgcttttaagtgtagtcagaagccgttaaagatgtggaaaagaggagtgatgtcagctgatgtatatttcggatggaagcagagggaccacttaggaggtggttttggttcggataggaggtgatagtggtagcttggacctcagtaataagaaaggaataccagtggatagtcattgtctgtattttgaaatgatgtgacccagtggctttgctatcttgtttgtctgtgtttggtgcaaataaccgagtaactaattgctatttatatgttgagtacgagtacaacttgcccttccatcatctctttcttctaagcacagcttccatgcaaagttctgtcctgactctgggcttatttatttacctttgaggtttcctgcagactagaccagcccaccttgggtgccggtaggcggtaggagttgcccttctgtttaccagcacacagcacagcagccttcctatgtaaggtgtgaatctgactatagcaaatatttaggcaacaattttcttgtgttgcttgaagtcagtccagtgttggtttgtccttgatgtgtgtcctaggttaatgtgatgtattgttttaaaatttttttttcttctgtagactcatactacattttattagtggatgcttgagtttaataaggaggggagaactccttgtcatagtcaaaccattccttgaatttgaaaaatgtgctgcctcggctaagcaaagctggtataaccctgaccaggatttcagcagagttcctgtggagcactttttatctggtagtggtggcagctgtgttttgggctttgggaactctagttgcttagagtgtgccaggaacttgggcataggttggttttactgaaagagaatggaggagagcagagatagaaatcccacctaatccacaaatagaacacagcccagagcaatgcctgatgagaaaaaaagataaagtataatttgtttccttagacaaattctttaatgtgattttaacctgtatgtgtgtcccctgttcttctgtttctatcaaaactctcctcatccttcattcctttcctgaagcacctctgattaatcattcattcattgacgaatgtactaagcagggcagagaataacgggaagggcaggttgtgccaggcagttagagtagcgtatgctaaggcctggaggccccttggtggagctgcactcacaggaggttggtgggcctggagcgagactgctggggggagtagcagaggcgaatgaggaccaggatgagcatggcatacagacccctttggtattttattctggagcagtgaagacccattaggggccaaagatgatctttccccaaactctttttttttttttttttttcagacggagtctcgctctgtcaccaggctggagtgcagtggtgcgatctcggctccctccacctcccaggttcaagtgattctcctgcctcagctcccgagtagctgggattacaggcaggtgccaccacacccagctaatttttgtatttttagtagagacggggtttcaccatgttggccaggatggtctcgatctcctgacctcgtgatctacctgcctcggcctcccaaagtgctgggattataggcgtgagccactgtgtccgccatccctcccccaaactcttatagctgtgtatttcattctgtatgatgctttgtacggtcaccacactgtgcccagctttttcttcttcccttttttctttaaatatactttattttttagagcagttgtaggtttacagcaaaattgagtggaagttacagagatttcccatatagcccctgtccccactgaacttctcaagctttgtgattttcatagtaaactcacagatgttttgatagaaacagaagaacaggggacacatgcacagcatcccctgttattaatattcctcaccagaatggtgcatttgttacaactgatgaatctatattgacatatgattatcacacaaagtccatcgtttacattagggttcactgttggtgatatacattctacaggtttggacaaatgtataatgacgtatatccagcattataatatcatacagagtagtttcattgccctaccagtcctctgtgatcgattcatccctcccttcctataagcctttggcaacccactaatcttcatactatttatagagcatgtatatatagttctgcctatagagaatgtcatgtagttggaatcatacagtatatatgtagccttttcggattggcttctttcactaagtatatgcatttaagtttcctgtgtgcttttttttttaaaatggcttgatcatttttttgtgctgaatcatattaattgcctggatgtaccacagtttatccattcacccacagaaggacatcttggttgcttccaagttttagcaattatgagtaaagctactataaacatctctgtgtaggtttttgtgtggatatgagttttcagctcctttgagtagatatcaagaagtatgattgatagattgtaatgtaagattatgtttgtttttgtgagaagcactcaactgcttttcaaagtgcctataccattttgtattgccatcaacaatgaatgagaatttcttttgctcctcacaggcatttgatgttgtattctggaatttgattattctaataggtgtgtagtggtacctcatagatgttttaatttatgtttctttaatgacagctgatgtagtcctactccctttcttttgattgacttttaaggaatagaaataatgttaggccaggagtgttagctcacacctgtgatcccagcactttgggaggctgaggtgggtggatcacttgaggccaggagtttgagaccagcctggccaacatggcaaaaccctatctctagaaaaatacaaaaattagctgggtgtggtggcgtgtacctgtaatcccagctacttgggaggctgaggcacgagaattccttgagcctgggaggcagaggttgtagtgagccaagattgtgccactgcacttagcctgggtgacagagtgagaccctgtctcaaaaaaaaaaaaaagaaaatgttagtgcttttgaattttattttagaatgcacagtaatattcacgaacatctgtacaacctataggaagacctttatttggttatatttatgatatatatattttcttgagatggagtcttgctctgtcacccaggctggagtgcagtggcgtgatctcggctcactgcaacctctgcctgccgggttcaagcaattctcttgcctcagcctcccgagtagttgagactacaggcacgcgccaccatgcctggctaatttttttgtatttttagtagagacggggtttcaccatgctggccaggatggtcttaagctcctatccttgtgatccgcctgcctcagcctcccaaagtgctgggattacaggcgtgagccaccgcgcccagcctatatttatgatatttatgaatctaatcttaagtatctggtttttccattttaaaatttctatgatttctgattttgttgttggaagagtggtgaacaagtactctgtgctcttttgttaaatttatatgaaaaagctgacagaaaaatttccttaattttcatgcactttggttattttcctgtaaatcatttttatatctgtcatgttataatgggattagactcacaggctctgttcttttacattggttgaacttggctaagttaactttgctgagcctgttttcttgtctctgaaatgaacttaatatatacttgttttgtatttatctttttaaaaatagttcctattttaaaatccattaatgtcaaaatctgcttaggaaattgtgaagactatcttcagatgtaaaccatttaaaacatggtcgaatgggcagtttaagttaatggcatgtgtggtattaggcagggtagatactgagatgagtaggacatgggcccagcccttgaatagcttgcagtctaatggggagagggagacctgtggagataatttaattttaatgtgatatatgcacgaagaatcactcagctgggattttggaggagactagaagatgaggtctgagtgaagtcaagggtaattgtaggtcattgatgtggtggattatgaaaaggaatagtgaggaaatactactggtagttttctagcatgtttcagaatgattcaaggttgctttccaactgtttgccttgtttttgagaccactgatttttaaccttggggaaggcacatcagtataaataaattactcagaccttttctttcataccagcactgcctatggccctcaaatacctatcagtaattgtggcttagggtggtggtcattctagtaggatttagtaatgtaattacggtgtaaccagaatgtcatcttgaatgtaattccatttgttcttttctacatggggaactgacacccagagcgatgaagtaacttgatttgaacaagatcacacagctagtttatggcagaacttaaaaagttcttggacacctgtttttgaggtacattgttaatattgctctgctgatttgtttgcactttcatcttcaaactgttttactaaaatcaaaactatgcacatctatcaaacaatatattgtatttcagaatactttatttatttatttatgtttttgagacggagtcttgctctgttgcccaggctggattgcagtggcgcgatctcggctcactgcaacctctgccttccggggtcaagtgattctcctgcctcagcctccagagtagctgggactacaggtgcccgccaccgtgcctggctaatttttgtatttttactagagatggggtttcgccatgttggccaggttggtcttgaactcctgacctcaagtgatctgcctgcctcaagtgattacaggtgcgagccactgtgcctgacccaggatactttatttaaccccttgatgagtgtattcttgcaaatttcaggtcaagatgcctgcagggaaatgagcaaggagaggaagcctgagtagtcgggttggggtgggtggggatcctttgatatgtgaagggtgtctctgcagcctggtaggaccaaccagttgtgttaactgtgcaagaagaagcacagcctgagtatttgaagagagtgcaagttgccaatgtctaatgtggctgtttagctccctagcactgggctgcagtgacccacccattcactgagtgctcctgtttcccggaaggcatcctctgggagatggggtaggtgtgtgtaatggatctcttccctctaatatgagagattgactttgctcagaaaaacatcgactgcaaatggcatttaatagaagggacaattattttagcatgaataacaagggaagagatgattatatttttcagaactttatatgtgccagccattgtgttagaagtctcataattaatttaattctcaaaataattgtggcagtagtggtattatttcctccttccacttttttttttttcaggaaagaaatatgaagaaactgaaattcagaaaggctaggtaccgtgtcctagctaataagattaaagcttgacttgtttggctctaaattcatattttatctgttgtacctgcattgtctctgtaacggggattacaacgcatgttcaatatgtgaaacaagggcagcagagcttagaaaaatatcttgttccactgagaaactgaacttttttcccctttcttaggtgagagacataaaacattcaactaatctgcttttaaaaatagatataccatatggaaactatataagaagtgtaacatttttttaaatccctgaattttgtgatgttctcagttagggagagaaggaaacaggaaataagagaaaaatcacatagaagattgaaggtgaagattgggaggaggttaagacaattcaatgatagaccgaaagaggtcagttttgagtgaccacatgagattgcattttctcgttgacttgagttgtggattttagagtgttttcacttattctctgatattcttttcaaagtaccacagaaccatgtttcatagttattcagcttacctggaaagttctctttaggagtcgattctgcatagactctccagagcatcatactgtggatgttttatcggcctatagatagcacactaggcaggcagtagcaggcgtggggtgcaggtcccagtgtgctctgtgtttgctgtttagccttggctaggcgacagtgggaaagatgatcaatgccaggtgcccatcaggtagccttgtttggcatcacgtgagctgatgtaagtgcatgtaaaccgtcaagcactcttttggatgaacttgtctaggaacagcagggtgtagcacgtgtttccaatacattttttgacctagggcaagttacacttgcctgggcctcagtccttgatctataaaatgagaacattgtgttaaatgattgctacagttgtattcaattcagaatctgtgtccctgtgagtgcaagtcaagccaactatcttagattgtctacctttgataaggaggaaagggcccctgaaatcattggtctaggtcagatctctccaccagttaccagtggagggatgaccttaagtaagttatttttttctctagacattaatgtgttcatccattaaaggggggatgataaacagctatcctctaagcggttgacgatttatccacataacacacttagtacctagattaagcacttagtactcgtgaaccatcatcatcattgaatttaggggtggaggaagacttttgtagttgcttagctgcattccctctttttaaggatgaagaaacatgaagcccactataggtgagatgtctttcccaaagccacagctaagatccaaacagagctctttgcatcacctggcactcattcaaatggaaaccaaaaacaaaatttgaagcaccccaactgaccgatggaccgccccctcctcagtcaagggcattccagagaaacctgaaaaactcgttcaggtcgtgatgggaaaggggacatgcttcattacaccttcctctctctggaattcaggcacaactgaccagcgtaaacattaaaacagagatcttaagactgccaaaacagatctcaaattccagcctaactgtagtctgacatcacttgacatagcaggccctgaaagaaattgaagtattttaccacaaaatatatttctttggcatattttgaaatggccctggaaagctgtctcttatggggaaaatctactttctctaaagaatcctcttcactttccagatcttttccttgaaccaggagagaattaactaagagtctggcacattttttgttaggtctgataagatctctgaagcctgctacctggaggcctcatctgcatgataaaaaccttggtcttcacccaggttatgaccttgtcttaacctacacacttatttctattgattccagatctttagataataacgctttcaactaattgccactcagaaaatatttgaatccacctatgacttgcaacctcccctccaccttcaagttgtcccacctttccagaccaaaccaatgtacaccttacatatattgattgatgtcttatgtctccctaaaatgtataaagcaagctatagccccgaccaccttgagcacgtgttctcaggacctcctggggttgtgtcatgggtcgtggtcctcacatctggctcagaataaatctctttaaatgttttacggagattgattctttttgctgacactaatatttagattctttctgttgttctagcacattctgcatgaattaaacataaaccctgttccctagtacagaacaagagcaaactgctttctttaggccacaagtaacttagatcagttaaggggaaaatgggggagagaggaggacattggcttctgccaccagcagcctgtgtgaccttgcccaaggtcacaactctgtggggttagttccccttccctgaaataggtgtagggagggactccttgacagtttctggtttttttcgtctctcagagtgcaatgaagaatttcttcatggctaaggctgttagactccagaaaatagtttgccaaccaaagacacagagtttccaattttggaatactttaaaaataggaaggaagtttatttgtttagcagaatttataattgtaggactgcccaaggcagagaattagccaagtggtattttgcggaagttctttttaaagggtgggcccaaaggaaaccagtcattaggtggaaataaactgtcagatttttgagacgttatttgcttagggacatttacactggtctattgtgacagtctctattgtgttaggcttttaaaagaaatatgtaagtttccaagtttaaaatgttagagcaagtgtccagtccacggcctgtgggctacatacaggccaggatggttttgaatgtggcccaaaaaagattcatcaactttcttaaaacattgagttttttttttttaagctaatcaactatcattagtgttaatgtattttatgtgtgggccaagacaattcttccagtgtggcccagggaagccaaaagattggatacccctgtattagaacttgtaaaatttgacttcagaaacacaaccaaaagcccgcttatgagtaaggagtttgtggccccttgtgtactgattattaatcaattaattgtataataagcatgaaatattgctagtacatctaaggccaaagccttcttacggttccagaaaaagctgtattcctgaatttccaggtgaagggaagggattctccttccatttccagaaatatgtgaatataatacatagggatttttatcacactagtgtttcagtaaaagcagcccttcaagtctgtgccatccagttttggtgtaactgaaagaacatcgtaccaaagtttgatttttgtcaattctctagtgtgttaatcagctgagaatgtggtctctggatatttttccccaaggaaagagctggatgtactagaccaccagaccacacaactctgtatttgttttgcaataactacactatttgggggagtagtgtggtgtttccagacgttcttggtcaagaaatctggccgcttcaagctcagtgttgatcacaatctatttcttttgcctctactctgtggcaggcacttgagacacaactgccaagatgagagagacccagctgctgacctggggcgggggtgggtggggggaaggtggtgaaggcagtcacagagtcagcctgccagaaagcaggtggggaactgtaaacctctgagtagccccttggtatacagaggtaataatttcccaaatgtagtaaatcccactttacaacctcacggttaattttgatcagggataagtagaactgactatacactgttaacttagatattgtccttctcaaaaacatcatttttattctgggtgccagagatttggcttgggtgtgggtgttaagaacagtccacagtgtcctggagtacctctccgctgatctgggggctctttaaacctctctaacaagtttttgtgctaatcctgactgagtagatggaggcagtggagcccagctggcctgtcactatggggcagagggtgactctaccctcaagccctgcatgaagaccccagggtgggcaccacagccctttacagtcacttagcacctgctgctgaacacgagcatgcagacctggtaaggcttgtgagtttcagagaattcctgcaagtccctggaaatgtgggcactggcagctcttctctctttttttttttttttaaatttagtgggcttagaggttttagcctaataaggaaattttacaccggacgattttatcccaaataaaagcaaatcatagggacccagtgttgcctaaaaaaccagtccttactggggaggtctagttgtgtctagcctggctctgtgaccagatgccagccattccagcctcctgtggctgcatttcatcccgaaagtgaataaggtgagtgagtgattcaaaggtcccatccagggggtgacaaagaatattccaggtggaagaaactgcatgagcaaaggtatggaggtggaaacccaaatgaacagaggcttaggaggtgtgttcgaaacatgtttggtacaaacggaacttacagagaaagaagccaggtgaaataaggcaggaagagttgagtggagccccattggtgggagaccctgagggttagcaggactgtgtttgttctggtagggattgcagaggagccctagaaggtttgtgagcaggaggctgaccccatcagacctgtgtttccagaagatcaggctgtgctggatagcaggatggatgtagggagatgccagaggcggcagaggagaggtcttgctggggtctggctgaagcaagtgtaggcccggaccagcgcttgaggttttgggctcgtggtgagagaatatacacccaaagagctgagggaaagaaggagtaaggagaaagaagagcagaagccacttaccaggttttgagcccagttacctagaaggcatttgggaaacaaggaagtaggaagaaaggcctattttaaggaaaagagaatgagcttgatgtggatattttaaggtcaaggactagaagtctggtgtttttttttttttttttttgagacggagtctcgctctatcacccaggctggagtgcagtggcgcgatcttggctcactgcaagctccgcctcccgggttcacgccattctcctgcctcagcctcccgagtagctgggactacaggtgcctgtcaccacgcccggctagttttttgtatttttagtagagatggggtttcaccgtgttagccagatggtcttgatctcctgacctcgtgatctgcccgcctcggcctcccaaagtgctgggattacaggtgtgagccaccatgcctggccgattcttttttttttttttttctttttttggagacagagtctcactctgtcccctaggctggagtgcagtggcgcgatctcagctcactgcaacctccgcctcctgggttcaagtgattctcctgccttggcctcccgagtagccaggattacaggcgtgtgtcatcatgcccagctaattttgtatttttagtagagatggggtttcaccatgttagccaggacggtctcgaactcctgacctcaggtgatccgcctgcctcagcctcccaaaatgttgggattacaggcgtgagccaccgcgcccggcctggtgattctttaaataggtgattggaaatgttagcgaagtttaggaaagaattcagagctggaaatgtagagaaagaaaccatctttcttagtttttggggagtagatgccatcctgagagagagggagagacagagagagagaatcagaacactatgaagaatcttttttaagatgtctgtgaaatgaaagattttactaaatacattctaaaggagagaattacattagtaagatttcattaccctgcgcctccccttaaggctgatctttatttttttcctcttgtaactaaatcaagatgaagccttgcttttgaaaatgtcattaggattcagagactacaattcccacttggtagatggagttcttgttcctgcattgtggtgagtggatcaaagttcagttccagcaagtcactgaagcccctcaacatacagtagcactcccttggcatggggcaaacaacaaagctttatttatttatttatttttgagatgcagtctcgctctgttgcccaggctggaatgcagtggcgcaatctcaactcactgcaacctccgcctcccgggttcaagcaattctcctgcctcagcctcccaagtagctgggattacaggcgcccgccaccgtacccagctaatttttgtatttttagtagagacggggtttcaccatgttggccaggctggtctcgaactccggacctcaagtgatccacccaccttgacctcccaaagtgctggcattaagggcgtgagccaccgcgcccggccacaacaaagctttgagcacattcccagcatcagctcttggctggcgaagccagtctttatctcctgtcagccttggttttggtgttggttctccagaaattccctgattgtaaaatatctgatctcgtgaaaatgaagtcagcacttcccagaagttgagaggcctgaagggggagtaaaaaccgatttcaaatcctgcctggagggaacctgctcaggaggtcctggaaggtggaggcaggctctcatcgcctgtctttattaaataaagccctaaagccctagactgtggtgctcgaaactttttaagggatgcctgactcctcaagaagtctgtaccatttgaatgagctctagttgaaagaaaggtttttataatatattcaaagtggaaatctttcttactttgtttttttgtttgttttttgagacgaggtcttgctctgtcacctggatgaagtgcagtggcacagtcttggctcactgcagccttaaactcccaggctcaagtgattcccctgcctcagcctcctaaatagctgagactataggtgtgcaccactgtgttgcccaggctggtcttgaactcctggattcaagcacccacctaccttgtcctcccaaagtgctgagactacagacgtgaaccaccatgcccagcctctttctttcccatttttgagaagagtggagctaatgcctctttcctgcgacagatttctacccaagccaaaggcatttttgtcttcttcccccagcctctgttcatgcattttatgacccttgttgctgctgcttttaaagtgtcctaaaaccaaaaatgaaacttgccgtgtgacctgatcagcaagaaggagggtgaggctgtgacccctctcttagtgtgaggatgacatttctcctaatgccctaggctttttgttccttttcattcttttgttctccaggccattctgctggcttattttgggcttacagtcaattacaatccttaaatctttttcacatgaacttttggcaagctgggactaactccatgggtgattagagctgagggcttcttttttgttttttttgcaacttacgtacttaacctgtatcaccatgttcttgatgttggcatttttttggttttgttttgtgggtatttttttatttttgtattttcatcctattagccaatttatttttgtagaatagtagaatttggaactagaagtgattttaagagtactgcagtttgtttccttcgatactgacacaacagccctcgggaaactgacctggagcgatgggtgctaaaaggagatgagattttcttcctcatatgctaggagcctggacagataaaggtgtaaacaaaaatgttagcagagggttaggcactggctacgaattcagacttggaaacttcgttgtctgtgcaacttcatactgtttcattcttgtcctgtatagtatttctttgatttccttcatctgtaaaagcaggaagaaaatatttgccactcagttctgttttttaggtatcaaatgctaggatacaacctgaggtttctttccccgccccctcacaaagtatagatcatttgttttccttccagccctgggctcagtacacagatggtttctcttcaccttttgggttgcggttttctccaggttggtgctgatgatatgataaagctcagcacagaaggccttcaggtccagtaccctggccttgacctccccataggctgtcttatctcacttttgcaccaacgcctggtaatccattacatgggtctccttggaggccttggccacagcatccccgtgttctgagaagtatttggaaatggttgtctggacggcttgcactttggtcttaactgcattcaccctctccagcaccttctcctggattgctaccccaaatcatttgcatcctcagtcttggggatcaggtgctggatccatgtgatcaccagaatgcatttctctttgagaatccagacttctggcttaaccatggcaagcagcgacaggaccttctcattcccagggagaaatccacactcaaggacttctttcttctcttgcctctctgtttctacctcatccttgggtgggggttctgggatggggatgtccagtggggcccggagggaggtcaggcagctacaatgagggaatccttttgcaaggcctatgtgggtatatgattttctgtggcaagaatctgtagaggaattccttggcttcttggaaaagctcttgcctgaagacatgtacctgggtgtgggcctccctgctcaggcacccaccacaaggcttggccgtgcagcttcagttgctggatctctggtcttctggccagtcgcccgggctttcgcattcacagcctgactgttataaatatatattgaagttatctaacatttataactccgagaatgccaaggagcaatgaatagtattgttattgttacccttggtattgtgtgcagtctaaaatatataaagtggaaaatggattaaactgcttttaactaacatcctttattggcaaaagttctgatttgcctgttgatcaaagttaaagaaagggagtggttacttggtgagtgtagttgatttcaagaactgaaatggtatgagaggaaaacctgtttctaccgctgatcagaatgaagatctgggttcttgaacacatgtgataagttttactcaagaatgcagttagtgctgtaaagctagtctggcatattttaaaattgtaaataattgatagttataacacatgctcagagccctttcctgtgattgagcctggcactcatgaattagtgtaatttttctgttcatttggaaatgtgtaaatttctattcatttggaaatgaccatggacctcaaagatggtgacagggctgtggctgggccacactgtacatttgtgcaagttgcgggctgcacaaaggcacccagccagtggcacaagcaaggactgagatccaacccacacttggcttaccaaagtctgccacccatgggtttttgtctgtgagggggagaacaggggtttggctttttaagatttggacaaaggcactgtatatttgaggcatagcctatactatgaaatattttgtttttaaaaaattaattttggtgctgtcaaggtgattccgtactgtgtccacatatgtaataatttgaatcacatttattttactgcaattcctgagaaggaacaagagtatttatctggttaacacgctaatggtttatctaaactcaagcttgaaccattagcttcacgagacagaccagtgcttagtattatcacaattttaatttaagctacaaatcttcatcttagataattatctatgcaaatgcaggggcagtcttttgaatattgcttttagactgccatctaaagtttttggtttctggggtttatttggaagtttgtttttgtactgtattgtgcttcctgacttaaaggcttttgtgtgttatgtcgtgaagcatttgggggcacttagaactgtatgccgtttcacttgtacattaaaagagtttatcctaagatgaagatttttttcttctttccaaatgattttgcccctagaagtttttacctagtagcagtagatggtaactttgaaaagactaaagtttaagaaaaatgtacttttaaaaaaattaaaaataaccttttttatgattacaaaaatacatatatatgaaaaataacatactgataagcccaaatacatattcctaccacccagagaccaccacacgtagtcccttccagatctgttttattaataagcactattgaaaattctgtctcttttgctggaaataagtagaagaaataacagctgttcatatacatttactttttttttttttaaaagagaattttttgccagaatgccagagtagactgagggtggatgggcgaggggattattctctgaggtgcagcacaccctggtttcactgtctgcacagttcccactttttgttcagggataagatgtctttgagaagagaaaacccatgtgagtaaatattgagttgtaatctgtattcggatttctggattttttttggtcacagtggttctgccatctagccactgaaccctcccaacctttccccgtcctcagccctcatctgtcacgttcagttaccacttcttgccagctttaccttctagatagttcttgacttcatcctctcctctccatttgtattgccactgccctaggtgagatcgtcacttctctctcctcagttgcttgtctcttccttcatcagtgatgtattcactctgggtgtgaggggcagcaccaggcactgggttacaagacccctgtctccagcgactgtcttcttgaggacgaaggcaggtgaatgagccattgccacttcatccttctgcctgtcatccttcctctgctgttatgtccatcaagcccattctctccccagcagccctggtgatccgttggaaatgcaaacctggccaagtccccacctcgcagtcctcagctgtctcagtctcagctgtttgctggcagctgggtcgggctgtcctgggcctcctccacacctccctcctcgtctgcctcccctgaccaaccgggcctccttgctcttaggtggttttctctgtccctcccctcctgacctcccctctttgcacgtggtcagtctccttgcctctgttgccttgttttctaaatcatgttacctgtctgtccccactcttcagcccagcgcacagcacagtttctgacttgatagtctgccttctgtaaaacgggaatgagggtgtgttcttcagagtgttggtgtgaggattaaatgagatgtaatccactgaaagcatggcctctggcacacagtgggcctgataagtggtattgatgcctgagatattgtattaacttaaatgaccaggttgaagagaaggtgtcagaaatttacgttcctccatgtgtatttgattatataaaatactgttggtcacactttccctacgtcatattaggtaaagttagaaagtgaaggcttttccactgggcacggtggctctcgcctgtaatcccagcactttgggaagccaaagcaggtggatcacttgggaactcaggagttcaagaccagcctggccaacacggtgaacccctgtttccactaaaaatacaaaaattagtcgggtgtggtggtgggcgcctgtaatcccagctactctggaggctgaagcaggagaatcgcttgaacccggaggcagacgttagttacagtgagctgagatcaagccactgcactccagcctgggtgagtgagactccgtctcaaaacaaacaaaaacagaagaaaaaaagaaagtggaagggttttatgtttctttcatgtttaacctacatgttgtaggtaaagtttacctacaacactttggtgtattttcaagtaaatatatttaatcgaagtgaattactgttacattatgaattttacacttttagagaaacagaaactgcctcacacattaaagtgtgtgtgttaagcaaatactctgatgtaggcccgcaaagtacacagaaacgaatcaaacagcatcctgcccccagcgcgtggtgtaggggaagggctcagggctgtgacaggtgttacagcagaagaccaggtgccctcaggacctgggagagcaggcctgtggggggagggaggggaggagacatttgggttggatctggaagaacctgcagacactagtggaggagagtcagtggaagaacattctagaggaaaggcttgcccacttgcctgcagtggttgtcagatgtgagctgcaacctaattaacagtttattgaaatgagatatcaaaggtatttattgggtatgcttttcttgtttttccattggcagtgataataccaagttgacagttgaaaatgcttttccatctgtttctgtattggactgagttgttgtattccaaggactagctaggcaataaatcacatcagactaaaattgagtacttgtaacatttgaaaagattataatgtgctggtattgatgaagaatttatactgtgtagaaattaattccattattctaactaatggacacttgagttttgccccattagagtttgctcttcatgttgattttaatttctttgatgactatagcgtctggcgaggctttctcattttcaagtggatttgtttgcattggatggtggggctggctttattgcattattcatatatgcaatacatatgcaccatggtcccaagacatgactcgtggtggtggtgattgtatttttgagatgtagctgatacctcccatcctctggacttctttggttcacatctttattttcactaaccagtaactgaaaatctaatattttctttgattttgaatgtagtcagcaaacccagtagcattacagatggagtatcccttatccgaaatacttaggaccagcaagtgttgtagatttagggctttggaatatttgcattgtactcaccagttgagcatcccaaatctgaaaatccaaaatgctctgatgagcatttcctttgagtgtcatgtcggtgctcaaaagtttccaattttggagcatttagattttggatttttgggctagggatcctcagcctgtagcagttcctgtgactataacatcaataaaatcacagtaccatgatctgtttctacactgaacacttctgacatcagatgtgtcagagttttccccacaccagcaaccagttctctgattctctggtcaccaactgggtctccagtgatcagttaaattctgacactaacaacctgaagttagcacagaccccacaagttaagggctcagtctcacaagactgccccaagatacccactgacctgctataaatcaagttcccaccacctcctcctcagggtcagtcatttgctagaatggcccacagaacttagaacactctttacttacatttactggtttattataaagaataccactcaaggccgggtgcggtggctcacgcctgtaatcccagcactttgggaggctgaggcgagcggatcaccaggtcaggagatcgagaccatcctgggtaacacggtgaaactccgtctctactaaaaatacaaaaagttagccgggcatggtggcgggcacctgtagtcccagctaatcgggaggctgaggcaggagaacggcgtgaacctgggagtcagagcttgcagtgagccaagattgcgccactggactccagcctgagcaacagagtaagactccgtctcaaaaaaagaaagaaagaaagaaagaataccactcaagaagagccaaatggaagagatacgtaaggcaaggtatggaaggggttttggggtgtttagagcttccatgcctctttgggcctgccacctagcaacacctcgataagttcatcaacccaggagctccctgaatcccaccatttaagggtttttatgaaggttccaatatgtgagcataatggattaaatagttggccattggtaactaattcacctttctcccctcccaggagatataggttggggagtagggtgtaaatcccaaccctctaatcacaaagttggtccctctggcaaccagtgccaatcctaaagctatctaggacccaaaaagagtcacctcattagcataaactcaggtacagttgataggggcttattatgaggcattcctaattccttattataaggcattcctaatattacccagttccctcaggaaatgccaagggttttagatgctcttgtgtcaagaccaaatagttcttattatatcgcgatatcatgtcagttatttccatatgccttacagttttatacatctctcaaatactgtatgtgctcatcactgctttaagttacagtaagttattgacttgctgcttgatcttgttaaatatggcagtaagcacttagtactatatcataattatttggataattccctttcagcataattgaatcttttgccatcccttgtgttctaatttatgcatttgagaactttattcttcagggtccataggcttcaccaggctgtgagaggggtctgtggcacgaaaagtttaagaatctctgcttcagtccctgggatgtgcttgagagagagcattcctgcattcgttcaggattggtaggaatgtggggtgtgtgattgagatgctgtctctcacctaagactaatcccatatagtcagcagcacacaatttaacaaaacctcagtcgctcttgggggcattgtaatatatacccaccataaaaaagaaagggttaaactacattctctgtaggctttgaaaaaatatactaagcagttcccatccaaaaatatttaaaataaaaatagccagacacaaagtcttcagctgtctagaaaaatcttataatacaaaaggaattactccccgtgtttctggtttattatttttacagcatctgtttcttctgcaaatatttgttgtatgcccactatgctcaggcattgtgttggagatttacagatttatggtggttttctcttctaagacctatttgaaatatgtctttctcattacttaaaaactttgaagtcattagatcgttttgcattgcaatcatttatacattgagcagacttattgaatacttgcagtatgccagacagtgtactaggcacttactttgtcctacataagtagcacaatagacagtaatcctactctctgggagctgacctttatttaggtgttttgtgctctgaggcttagagggctgccttgacgtgccataaaaactgcttgacgctcttaaaaattatgggtggccattattttagattgagcttctctactgggccccagctgaacataccaaaccaaaatggagtcacttatgctaaaggtgatgtaatcaaactgaaatgttaagaaagcagatggatcccagaacagaccagtttaagaaagcagatggatcccagaacagacctgaaaacaggagattccagtctacctgagtcagcatagcaaggaagtcccttctgctttatttagcccttacagaaaagtagcctgaagtaacctgatgttaaccagtcaggtttttctattctgtttctttgtttccatcttacaatacctactgttctgccattgcctggtgggagctttcattcgatttggtagaatggagtcttccctgatgtatgaattgtgaataaaatacaattagatctataactaaatttgttgcaattgtgtcttttgataccactcacagacctcgtgtattttgtaaggtagtggttttcacactctgttcctgtgggtgtttatgatgtctagggctggcagaaggaaggagggggacatgttctgtttcctcagccccattttaatcagaacattcatactcatatttgagattgccggaaagttgaggatggggtgagatgcagagttttgttgcctacagggtgtttggaaatttggtcaaaggtttgaatatgactggcattatctattgcctgctgatattgtagaaattatttttgtcatttattattcgttctgtactgaaaggtagatggaagcttgttgcctctaggtactgatattttaataaagttggcagtcagatgtggtggctcatacctataatctcagcactttgggaggctgaggtgggaagatcccttgagcccaggtgtttaagaccagcttgggcaatatggtgaaaacccatctctacaaaaaacaaaaaagctagccaggcatggtggcatgcacctgcagttccagctacttgggaggctgaaatgggataatcgctcaagcctgagaggttgaggctgtggtgagctatgattgtgcccattatactccagcctgggcaacagagcaagaccctgtctcaaaaaaaaaaaaaaaagagttggccttttcttaccttacaaacatcaaggtaacagctagcatttattgggagctattataggctaggctctatgctaaactttcatatttaattttgtcctcaaaatgaccctccaaggtagctggtaatgtctcattttagtagaagaggagtcgaggttcctagagctcaggtggcttgcccaaagcagtgcttgcagcttatttcagcattccaagctacagagttccccataggttctgtcagcatcacacattcatagcttcagctgcctagcagttagggctgactttctcctgatagttgtgaccagcaacgagagttcatctctactcttttaaaggttattctgttttagttactgctccagatccctggctccctccggatggaatgtttgtggtctagtaagcagtactgggctcactctcatatctttgtacttccctccctccctcaacctgcacacactaaacaattttcttacactgaaatgcaattagcagtcctggcagtttatgcaaaggttgggatttatactcgtcacacatttaccaaaatgctttattattgagcagagtgcctgatggatcctgaatatgccttttttttaaacaaaaaagaaatcttgtactttctttttgtacagtgtttgcagttaatgaaatcaatgccttaattacctatcagaaaggaatgagatggttctaatatgggttctagtgaaatatgccctcgatgataaaagttagttgcagaacactatgatcccacttaaaaaaattggtaaattaccattaagtgtacacaaagaactacacaacagaaaagccagattgttaactgtagatgtttccagggattatgggcaactttatgttttcctgtttttcttttatgtggatgtgtattgaactaatttttagaaaccgaagataattaaagagtacattttgtagctgtgttcaaaaaggatagattattgaaaaacggtaaaacatgaatatttgttttccttggttcttgaggttagcccttttatgccaaggcaaaatgcctcagcagcaacttaacgagcccagaagaagggtctgacctggctccctggcagggagggggagggagagagcaaagtgttcttctccttccatctcccccgcctttctgttcagccgtaaccgtcttgcatcttcttggttatgaaatgattgacctttctgttgagcctaacaacacctctgctggtgctggtttggattggaggccccaggatgcggaaaaagggtgtgtaagaggagggtgctccggagatataaatgtgtgctttattttcctcctaaagcaagaggatagggaagggaagaatgcaagagcaaagcttacatttttcagtagttgttgcaattctgatacattgatctcatttgttgtggtttaaatacacagagtgagagcgtaaggtgctggctgtctggggctagttctacctgaatcttgggtattgtacattatgtgagaattaaggttatgatttgatttgaaagactaggctgtttgcagcttcagtagggagtgttcagagatgtattccttccctggtgtttatgtctgggtgtgcttgtgatcccctagcctggcttctgagacagcagtgcagcctcctgggggatatctctgtttcttgtggcttctggcctgagccccgtacagggaacttttcttttctccttagttcctctgagggaggaaagctttatcttttaccttagaaatgaagtcctgccctcagagatctggctaaaacccaaaaaattccttcgctgtgtttttcattgaggcagattctgtttataggtaagcaaagctggatgtgaaccccagagagccagcaaggccatgtgacttctcagctgccccagtcactggggagcaactccagtcccactgctgccatgccaggggactgacatggagaagacatgatgccatggtagaaaaccgcatttccagagaagcacagtcacctctgagtgacacattagacccatgtgtgaggcgttgtgtagatactttgcaaattacccgtgttttttggtcctgtttctttgtccacttgtattgtatgtgattacagccctttctcattttacatagcagggagcagagagggcatgggaataaggtgcaagcattcaaacatgaattgcagtttggctgtggttgttaaaaatttttgatatgagctaaaattttattaaatctccttttttatggagaaaaaaatagaatcagtttggaattccaggaggctttggtgacttttttttttatgtattcatttcattagagaattaggtaaaccttatattacacagccaaggccaaaatagttttgcacagttaaagtgtgttcaagaaaccagtcaccatttaactggattagacttcaacaaggagatgataacctccaaataaccttcctttaggaagatgacattcctccaatatgtggaaagacagtagatgcattttcttctctctgccacagaggaagaaattttccctcttgagggaccaacactattttttttttttttttttttttgagatggagtcttgctttgtcacccaggctggagtgcagtggcacaatctcgtctcactgcaacctctgccttccgggttcaagcgatgctcctgcctcagcctcccgagtagctgggactacaggcatgtgccaccacgcccggctaatttttttgtatttttagtagagatggggtttcaccatgttagccaggatgggctcaatctcctgaccttgtgatccgcccaccttggcctcccaaagtgctgggattacaggcgtgagccactgcgcctggcccaacactatttcttttatgctgctcttttcccctctcctttctttggtttcccctttccacgaagcttcttttgtcatctttgctcatccttaaaatcctgatgctcatctctgcagaatccaagaaaccagagtgttcccatgagtgtggagtaagtgttgtcatctggatacccagtcataagtctccttcttcttggccaagggtggttcactaaacagtgtcaccattttcatagacttggaatcagtcggcctggcgacttcaccaaatagctgagcactgagacgagacatgcgcagggcatattctgaaagagaagacatttcttgagtggcaaggaactggagtccctggacttgactttcctcacccacacctggtgactggttttattttaagaagggcggggtttggtaaatgtttggcatcctatctgcttttactttttatttttttatttatttattaatttattattattattttttgagacggagtcttgctctgtcgcccaggctggagtgcggtggtgagatctcagctcactgcaacctttgcctcccgggttcaagcagttctcctgtctcagcctcccaagtagctgggactagaggcgcctgccaccacgcctggttaatttttgtatctttagtagagacggggtttcaccttgttggtcaggctggtctcgaacttctgacctcaaatgatccacccacctcagcctcccaaagtgctaggattacaggtgtgaaccactactccctgtccctatctgcttttaataacttatttgaaatgcaccctgtactgagattttgcatttctctatcctcaacctccttagtacttctgtagcacttgctttccaccctgtttagtcatttatgtgctgctttattccctctgtctagacagattcagtcttttttgtctttgccagtttgttcatctctgcggtaagcatggtagggatctgtgcagtttggctgcccttcgtgctgttcacagtttgccaagggcctccataatgaaatggatttgggtaggatggtgctgtgggtggcatgcggaggaggccttcctatgaagcactgccttccctgggatgtgacaaaggacagctgatgaagccaggcttctggactctggctgcccattagaacagccagggtagggcactttgaaaactgcgggagtgagggccccacctccaaacaagctgcttcatttaggtgggtggacctggacatcagggcttgaaaatactggccattcccatgtgcaggcacatttgagttgagaatcagtgctttcagtgaaggggctggactttgaggacttatattctcatccagattgaatattcagtgattccatgaagtctatctatatttatgctggccacccaacattttaagttttaaaaactattttagaaaacctacgaaataatttcgtatccttacagtgcaatcttcctttttctttctcacctcctcccaccctcttttagctcctacagccattcgattacttcttttgtggtttcatagttttaaatgtttgtagaaaggtgttggtcagtcagaaggttgtagtgaatcttttaaacaattattttggagtacaaactatgttttgtgtttgcatagaccatctctgtggggtttaaaagctactaacagcttatccaatttgccatttcacaaccagggaagctgaataatgctacttcttttttacatgggatgaaagatcaagacccaaaggacagaaagataaggcagaggggatgaaaaaggggcccctgtgtcaggggctaacagtcattagcacttcacctatgcccagatgcctcctcagccagctaacagggacacctgatcgctccttggcaagatgtaacacattaatctgacctgttgtctaattgtaagcatgaagcaggcattgaggcattagatcaccacagcatgaagcaaaagagccaagacagaccactgcacaggagcggccttctgtgccttcgcccatgtttgtgttctggcacctgtcaccttatattggaaatcacatatgcgtgagcctcctaaagtcagagggaatcatgtcttactcattgtaggaggcatattcaaatcttcatgattgaatctagtcctgtcaggctgagctgctgcataatatgaatgtttacctgtgtcctatctagatagcaactgatggtattttctgtttaaatgatttaagtaataggcactcatattttctcaagtgttttgcatgaaatttaaggcatgtaagatagagtgaggaaatacttggtttaatttagtttttacccccttcctttataccttacgaccaacaaatacaaataactgcttgtcaataaaaacaagccacaaatctgttccttctggacaatgattacgtagcattttttttgtgtgaagtgctcatttgaactccttacaatgagaaagcatttcatctaagggaaaaaacacaatgtgtccggccatatttttgaagtcttagaatgtgttaccatcatataacgggaaaaatgctagaattttaaatacacagtgcttcagacttatttaatatttgtttcttacttgttgacagaaaaacaaagcagcaaatgtaaagtaaaatgactttttattctaaatattgtttcaggagctctttcctaaatccttgtgaataaaattacacttgcagtgtatttataatcctttataatccctaaatccttaaaaagcaagttgacccaaatgtttaaataaggactttatttacagaactgaatatttctaattctcttgggatgtcattatctggctacatatgaaacagtattcacttatgcatgcttcagaaacttcatacattactgtgcatttgttagtatgtgaacaaagaaacttgttttggttgtgagcaaaatgcagacttactttcaaaattgagttttagtataaactcaaataggttggcagaagaggagtttaatttttatgtatctaaataaggcctgtttcttcattaaaagaaaattaaaactaagccccacacccttattgaatctgtcccaataagatgctttttgggttcttgtttgtgctatagttggttttgatttacttcgtctgcaaacagaaatgacgtagatactattgctccaacaaaactaaaaaaagattttcactaaaagtacccagatcatatcagtgggaataaatccactggcctcagtgtatttgcccaaaaaggatctgtgttttgcagtaaatattgtaattggaagtatatgttcttttagactaaataaagttttacttgaggacatttttcagttaggcatgtttattttgggggtttagtattgtcttccgccttatttatttttacttatctgtatgagccaaagctccagccagctctctcagcccttatcctgttgtaagttgctgactccttttcttgaagatggagtgtcccctttctgggcgtctctaacctcatccttgcctccccccaggtccccatcttctctgcctgcgattccttagtttctctacacctgaaatgttggggtatcccaggagcctgtcttggcactcccttcctttactttccctcccggatgtgagctgctcatgtccagcttagactccctgtcttggactctaggcccacttacccagctagatgcctttactttcaagtcctcctggtcttaacatagacaaaagcagaactcattgcactgtctccccaaaccttctccactctgcactccctctgtgaactaatggcacagtcatccacacagaagcctaagccagagccctgggtaccacgccccatcttcaatatcctcagccccctatccaggtcaccaccaaatcctgttagtcctgtcttccagaatctttcattcagcctttctctcagccttcctctcagccttcagtgcttagttctttctcagttcaggctctcaacatgccccatctcaattaccgtaaaggatcctaattaaacctcctcctccgggcagggactcatttacattcatcttatatttctgaatccctggctctggcatctagagatgcctagaaaaatgtatagaaataaaatgaagtaaatgactgaagtcctccatgcaaataggtgagtccaggacagagttagaaggataaagaattcaggattttataacgagtggacattatgccttcattttttagaaaatagtgcctcagaggctgggcacagtggctcacgcctgtaatcccaccactttgggaggccgaggcgggtggatcacttgaggtcaggagttcaagaccagcctgaccgacaaggagaaaccccatctctaccaaaaaaatacaaaattagccgggtgtggtggtgcatgcctgtaatcctagctactcgggaggctgaggcaggagaattgcttgaacctggggggcagaggttgcagtgagctgagatcgccccattgcactccagcctgggcaacaagagcgaaactccatctcaaaaaaaaaaaaaaagaaaaagaaaaaaagaaaaaacagtgccccaggtccattctggtagagggttttataaacttacacacagatagaacccattttttatttagtctcttagtatacttgactaacttaaagtaatgtttaaatggaattaggctttttaactatttgcaatttgttgttgaaactatatttggcaatatgccctttgccttcaaatgttctgaaattgttagacctcaattatctcctttatatctgtattacacataacttcttggtgcttctgaatgacggggcacaccttaccctgagcatgagaaccttgagctcaattatgcctgaatactaaaacttagcagagcaaggagagagagactttggtctttgactaaagtgtgtctttttaagattctgagtaaaggataggagagattggtccttggaaaaaaaactaccacaacctcgattgtgaccaagttatgaggtattcttcagtttcttctgaccctgggaatccaggggacagttaagtgatctactttgtgtcatctttttgtttgtaccatttactactgagtcaccaacaaattcatgtgacttcacacattttctctctcctttgatacataatgaaagacatcactgctcacttcagatgcagcagaagacacagcatgtagaaatgtcaggtattttcataagcctcagaggactgaataagctttgaattttctgttcagagtggggttagtaattgggaagactcacgtgacttgataaaataatcttacacacttgcttagaagagtggcaaggttcttgtataaattgattatttttgtttgacaaatgttctttacagaaatcacttttaccaggaaaatcttataaactcctttttggagagtaactatggctttttgttgttgttgttgttttttgttttgagacaaggtctcagtcacccaggctggagtgcagtggtactgtcttggcttactgcagcctccatctcctgggctccagcaatactcctgcctcaggagtagtggggactgcaggcgcacaccaccttggctggctcatttttgtattttgtatagagacgaggtctcgccattttgcccaggatggtcttgagctcctgagctcaagcaatccgcctgccttggcctcccaaagtgctgggattacaggtgtgcactaacatgcccagtctaactgtggctaagtttttaccaggcttctgttgtgaaccattggcaaagatgtgaatgaaacctagacttcatgctctcttctctctgtcctgtcttctttttataattgaccaacagtttttaggcctctgtatgatgtatgattatttggcagtataaaagtgggctataaccaagcaaatgctcagtgcagacagatgcttgacctgttgaaattttggctattttgttttttttgagacagtcttgtgctgtcacccaggctggagtgcagtggcacaatctcggctcactgcaacctccgcctcccaggttcaagcaattctcctgcctcggcctcccaagtagctgggattacaggcacctgccaccacgcccagctaattttttgtatttttagtagagacggggtttcactatgttggctaggctggtctcaacctcctgacctcctgatctgccctccttggcctcccaaagtgctgggattacaggcatgagccactgcgcctggctgaaattttggcttttaaaatcatttaggtctcatcaggtatcaattatttaaaatgtaaaactttcctaaagatcttttgactctttgtgtgataaaataccttgaaagaatagtcataatctttatgacagagagatctttaaggtgtatttgatatgaagtcacaaagagaaaaatctttcgagtcattggttttgggaattatgtcatgaacactgaatataaggatacttttaaaatttaaaaccacctcctttactgtatgtgttgatctttgacctgaattggaagggggatttttaaaatttctctataatgttgttaaaaagacatagggcctgtgggtattgggccttaaattgaattttccttatatagaaaaatggaaaaaattggtttaggtgttaggtcataacaaaaagtaggcccttttgaagattaaatttatgcctgccttggccttgtttaaatccatgcctggccacaaatattagtgttgtggctgtccatcatctgagcaattgcacagctgtttcattcactgccgtgcggattcatctttatgtctatgctgctttgaagaaccttctcagaggttaatgatgagaggatgtagcagtagggacaacaccgtggcagatgaggtcttttattacattcttttaatcatgattttcagcattagaaaccaaaagctttatagtctccatgtgaagaatccctggtgagcctgtttgctgtgataatattagtcatgggttactcagtccttgattaaaacctcctagctttgttgacatgctagtcactattcacctgctaggaaatataggactgagttgtcatggaaggaaataatggtgctgggatttgaataaataatttatgagataatttcagagcctttgtcttcttcatcccaccatttattaaagaagactttccaaagtatactgccatgagatctagaataattgagtcatgttttgtgaaccacgttggagacagacttctctgggaggcgacagcttctccagaggaggcctttagctttggagtgggaccagcctgggcttgaatccaaggcctgctaggttgggctgtgtgtgttcccgggctggtggtttaaccttgcagggtgctgtgggcatgtaaatcctccagcgcagcccttggcaggtaagaggtgcttcataagtgtcgtcccccttctcttttctgtggaagctgtgtgttcacctcccatgggaagacattcctagtcccctcccgtgggctcctcctccagtgggctcctcctccagtgctccgcagtggagtagccagcggggcgtcccgaaagagcatggtgcattcattccgtgagtgccagccacactgcatgttccaaataacacgcctctctctctcctcaggtgcctgagatcatcagctccatccgtcaggcggggaagatcgcccggcaggaggagctgcactgcccgtccgagttcgacgacacgttttccaagaagttcgaggtgctcttctgcggccgcgtgacggtggcgcacaagaaggctccgccggccctgatcgacgagtgcatcgagaagttcaatcacgtcagcggcagccgggggtccgagagcccccgccccaacccgccccatgccgcgcccacagggagccaggagcctgggcgcaggcccatgcgcaagtccttctcccagcccggcctgcgctcgctggcctttaggaaggagctgcaggatgggggcctccgaagcagcggcttcttcagctccttcgaggagagcgacattgagaaccacctcattagcggacacaatattgtgcagcccacagatatcgaggaaaatcgaactatgctcttcacggtaaaatatcacccagctcgtgcacagccccagtctgccatacgctttcaagagaaaatctgctttatggagcgaagattcttagtcaattgcttttgatttatgtgtgaatccatatattttcatgctgaacaattctattcttaggataagctccttcctttagccataagcctttacagtcatcagggagaaacatgcccatgtgtaatttttatctcacccggtaattataaagacaccttttcagtgtggaaagaacagtgaaaacgtgtaaatgagaccagcagagagatttaaaaaatatatatgaatttcagatgatatatttcaacagaatcttttagttggaaaacaccctctctactattaatatttttatttatgaaacatttaccctttgctaatcaggaagagtggctttgtgagtgacattatatttgaaatttatacccaaactgaaatattaatttagccaatggcttgcttgctttttttttttttagaaaaaaagtgttaaattgacagccaaatgctagaaaaggactgaacatggggggctgtcccaggtgggtggggttcctggttccatgctgatctgggctcttctgaatgggtgtgccctccctgggagtcccctgggtctgaacggatgagatgtggagctgtcccggcagcgagccggtctctgacaatggaagagctagtttcttccttggccttctctttggcttaatgctgactgacgttctgtagagaacaaaattatcttaaatataaagtctccttcttgtgtctaattcagggcacaggtgagatggccagggggtaaaaaaccagctacctaggttagtgcagtgtggatgtgtgcaggtttaaaaccaagggggtgcacccaagggtaaatagggctgatgttttcatcttttgaccattgatctagtgtaccgaaaagagtagtcagatttgtgctttaatttgtgatctgcatcttttaaaaaaacttccttggtgacattgagaaagctgctccctgcatttatttataagtactgactgtttgactgctgtgctaacgtcccttgccacatgctggaaatgcagccgtgaacaagacaagtatgttctctgcccacatggaatttagattccagtaagggagacaggcaactgagtgcacaaataattatctaattataattgtggtaaatgccgtggaggagaagtacagcatgcctgagagcatttctcagggtaatcaggaaaggcttctttgagaaagtgattttcacctaacacaaggtttcattgtggccacctgggaaggtcttctgggctcacagagcagcagatgagaaggccctaaaggcagggatggtgcctggtgcctggagaatcccagaggcctgactgcctcctttgctcagcattcttccctcgagttgtcacggtcttacctcctcttgcttcctttaggtctctgctgaaatgttgacatggaggaataatcgtatcagtaagaccaatagcagcctcacttcctgcttttttgctttatttttctccatggcatttttaccatttgatacaattacaaataaacaagtaaaagattttatgtcccacatgcccccaagaagataggcttcaagagggcatggattttcatttctctgttcactgctgtcgttggtagtgcctagagcacagctgttgggtgagaaataattccagatggccgcactgaaaacaaggaaggatggtgcgtagagatggggctgggactggaggcagccccatgaaagttgttttcatcaggcacaactttatgggtcttggtcagggttttgttttttatcctgaaaggagtgggcagtcactgcatgctataaaacacagtgtgaaatatctttggctacagagccaggatacttgggggagggcaagagtaggatggggaggggagtgaagctgttgtagtagtccaggtgagagatagtggggttgtggtaagtgcagtgggagtggaagggacagacatgcagaaagtcaaattaatgggatgtacaatcctttggatgccatggggaaggagagggatctcaggagccccacccaactttggattctgacttgctctttacaacccagccatagctaagtaataatgccttggagcctctcaccttatgagattttcaaaggttatttttaaaaataagtaaggactatcttcattatgtaggtaaagacagtgacttctaaagagactaaacatactccaaatagatacttattcgttgtttacaaataaggaggatattgtgttggctcctactctagagagagacacagtctagtttagaaagatgttgcatgttaaaaatgaattagtttttcatcatccttggtctccacagaaggacaagagtaaaaggctacctgccactctctgctggctgaaatacagttcagaaacagtaagtgtgcaaaaacaattcagaatgcaaagtccttgccccaaacagaatgcacgtttcttgggccccctcattgagagtataattccccttgacttacaccccagtttccaacaagcttgtgtatctgatttgtattttacatcaaagcgtaaagagtttagaggaggagatgggtctgggagttaagaatggcagcgtcaggatgtgaccactgacttcttggtcctgaggagaaactaaagctgtagaaaccaacacacactgaaacccaagaagcttagcgctccagagacgaggagtctaaaaggcagcctttcacagcctgcaggggcgtgtgcacacagagtaggttgggtattgcaacacagcagtctcctataatgcatgtctattagcatgtcccaaggcagtaagaggattgtaattgatgctcatactctaacttgaaaaggtccggtcactagtgtatgtgaatgcctcacatgtaatatgtactaaacaaatggtagattcttttaacaataatttaaaaagacttgtcagtaaaaatcattcaaaagtatcttggaagctttgaaagagtagattctgttttctggaaggttcacttatgcggagacctcagtttttagggggatgtgtggatcttgaggcctattgctaacttttggatatctggttctttcatctcaaggaagatggctgtcttatctaggtgaaggcactaatagatgtctcttatgacctgaaatccagaggataagaggggacctttgaaatgatttctacgatgatagagtcagaattttataggagcttgtcccttttattctttattttcataggtcatgaaatgagaaagtttgaaaagctagatttttttgtttgtcttttaagattggccagtctgaagtttacctcatcagtcctgacaccaaaaaaatagcattggagaaaaattttaaggagatatccttttgctctcaggtaaatggagatgggtttttttattcaattgcaatggaatttttaaatgaatttctataatatctatcatgtaacaaatgctaaaggttacaaggtgtatgttttctaagtactgtacttgatttgtgtttcgcttttcttctttgctttggtatgttaaggtaaattatgaatataattttgaaattaagaaatttgctcttagcaacagtaatggacaaaatagatctacttttaattttctcagttattggtagtaataatccacagtcatgacttccagatgcacatgtgtgtgtctttgtgcatattacacatatatatttacacatttcacacaaatatatctttttattagatatatttctactttacaaaaatttgtaacttttttgggtaccaattgtcagtattctcccttcaaatatagatagtgcttatctttgacatatatatttacacatttcacacaaatatatctttttattagatctatttctactttacaaaaatttataacttttttaggtaccaattgtcagtattctcccttcaaatatagatagtgcttatctcagagtacagtgtctacttgaaaacttttttcttgataatcttccaggtgtttcatagagggattttggaagaatctatcaattaagattagctgtgccagttttactcaggatcttcctaacaaatatgagatcacttaaggttatatttgcttttttttttaaactctggatttttcattttcataattgataaaatatgaaaatgtcagtgttgatttataatgtgatctacttaaatattcaaaagggacttttctgcaaaatgtgaaaataaagaatgttctttacagattgaatagggaaccatttacaaagaaaaagctttgctaaatcatatttccttaagtggtagccttatgcttaacttgctactggagaagattaattgagatggcaaagcatgttaatgattgctcatttattggaaaatatttggcctgaaagtgagattacccatagagtttttaatcctgatttgctgctatttctgttgaaatatgaatgttaaatgtttacatttttgtgtgatagctttataatttcctaaagagtgtagtttacaagtttatatgattacctgaacattaagctatcagcactcacatctctgcatgatgatgctttcagaatacattgatgtattaatatttatggcagacgttttatctgtattaaggtgcctctgatagctgatgattttaaaacacatttacatattaatatttattaaaaatagctcttatgataccatggtagagccttggcctaatatgtttaaaagctcctctactctgtgtgcatgtaatttttgactctttctttattccagttcacttcagtatttacctacttattttaggaatacaaatatattttaaatatttttttaacctttgggtgtgtatgtgcttagttgtgtttcttcatgaatctctggtctgcctttgattttttgagtggtttttattctttaatacctatgtctcaaacaaaacaacaaacaaatactaaaatgagcactaaaacttgaattttcagatcttatttttcttattgttgtgggagtaatcaaaggaacattctagtaaaccaactttatttgagatgtttttagactttttgaaattttaaaatatcagagaaaatagtaatttcctagtgttttttaaaattgtgctgtgtaggccaggcgcagtggttcacgcctgtaatcccagcactttgggaggctgaggtgagtggattacctgaggtcaggagttcgagaccaacatggtgaaacaccatatctactaaaaatacaaaaattagccgggtgtggtggtgcatgcctgtaatcccagctactcaggaggctgaggcacgagaatcacttgaaccctggagacagaggttgcagtgagctgagattgtgccattgtactccagcctgggcaacaagagtgaaattccatctcaaaaagataataaaaagtaaaataaattgtgctgtataaatcttgaggtgcatttctgaggatggtgcgtcttctggatacaactgaacatctcgttctctccctttggcagggcatcagacacgtggaccactttgggtttatctgtcgggagtcttccggaggtggcggctttcattttgtctgttacgtgtttcagtgcacaaatgaggctctggtgagagaggacaagcaattcttaccttggaaccttctttacaaggaattttagctccactgatttttctgtccttagggaaaaccagatggtcattgacatatcattatttgtctttagttatttacttatgactatttagtaagcagctaatacacatctgaagcttaattggctgtgcattttatattttttatttctgaagaacttgtttagtgtcaccttctggtctagcattttacaatgtcattttagacatctgatcaaaggagtttgccttttttctcagtagtttgtatttttagtttttactgtatcagtctgttctcacactgctaataaagacatacctgacactgggtaatttataaaggaaagaggtttaatggactcatagttccacatggccagcgaggcctcacaatcatggcggaaggtgaaggaggagcaaaggcacatcttacatggcagcaggcagggcagcgtgtgcaggggaactgccctttataaaaccatcagatctcgtgagatttattcactatcatagaacagcacaggaaagacccactcccatgattcaattacctcccactgggtccctcccatgacatatgggaattatgggagctacaattcaagatgagatttgggtggggacacagccaaaccatatcatttaccttacctgctttaagagctttgagcatacttgtagtattttcagactgtaatcctagctgttattccaattattatctgtcaacctgtgaagagtagtacagaaaactcttaaagcttaaaaaatcttttccaaagattttctgacatctcagcccagctaatttcaaattgactttttggtgactacaacttctcttctctttgattaggttgatgaaattatgatgaccctgaaacaggccttcacggtggccgcagtgcagcagacagctaaggcgccagcccagctgtgtgagggctgccccctgcaaagcctgcacaagctctgtgagaggatagagggtgagtaggggaccctttccagcatgaacacagtgggagttaaaggtcccaggagaactttagatgatactcatctgttggaagattctgcctaacagaggcttgtattagtcacagggattgtaggtggactctcagtgtgcagtgggtgtcttctgtatgtcaggaattgtgccggatgctggtgatacaaagataagaacccagaacccccttctgccacctccctccaaggtattctgaggatggaggaggagttagggaaacaggttaccaaaccggttgcctagtgtttatcaaggttgtgtgagtggtcagtcatactgggcactgcagagatatctagaaagataagaactaaggaacttgtaccagtttctccattacaaggtcattagtaacgtctgctagtacagtttggatggagaggaggtagcagaaaacaggttgcagttgaggagcaaatgggaagaaatcaaagaaacggtgactattagtattgaccagtatttctagaaacctggcttagggagaaactgtaataaatgttatgatttgtagctaacgtgtattgaataagatctgccaggaagtgtattaggtgctttctgttatctatttaatcctcatcacatttgtgggaggaaaagggactatttattttgcacatattgcagataagtaaattgaggattagagatgtctaggaataaactagtgtatagtgagcccatgattcaccccaggcggtaaagccctgttacctgccaccaaccatttccaggagaaggccatactggagaaagacctggggattgcagctaactttgtctttttcagaattggagggtttgagtgaattcagagcccaaggggccagaggggccgaatgaatccgaatggaatggtgggggttcctcttgaacaagagtggggagtccacctgaggcaggaagtgagagtttctgtctctgtgactgcagggaggggccaggggagaggacagaaccaggtgacagtgaaagggagtggtgatatgtttatctgaaggcatctggaaggtgaaggagttttcaccactctgttcttgattttgtgtttttgttctgtttatgggaggatttctaaaaatttttttgtgacttgtggaggtcacatgatttaaacaacccatgctattgtgaaaagaaaacaaaaatttgatcatttctcatgtttgtagaatgtttattatacacctgtaattccagcgcttggggaggctgaggtgggcagatcacttcaggccaagagttcgagaccagcctgggcaacatggtgaaaccctgtctctacgaaatacaaatacatctcaaatacgtttctactaaatacaaaaattagctgggtgtggtggtgtgtgcctgtaattccagctacttgggaggctgaggcaggagaatcatttgagcccgggagatggaggttgcagtgagccgagattgtgccgctgtgctccagcctgggcaacagagcgagatgtctcaaaaaaaaaaaaaaaaggaatatttattataagctataagtttgcaaagaaagcattgttatttagatccaattttcctttttaaaaaaatatagtaaaaacatatgtaacacaaaatttaccatcgtaacctttttgtaagcatgcccttcattggcattaagtccattcacattgttgtacagtcctcaccaccagcatctccagaactttttcattttccaaaactgaagctcattaaatgccaactccgctccttctcagcctctggcaacatctgttctgtttctaggtaacttcatataagcaaagtcataaaatatttatcttcttgtttctggtttatttcacttagcataatgttttccagattcacgtgtattgtagcgttgtctgaatttcattcctttttaaggctgaatggtattccattccaaaagtgtgtccacattttgttgatccatttactcgtccgtggacatttgggttccttcccccttttgactgttgtactaataatgctgctatgaatgctgacgtgcaaatatctgttgaagttcctgctttcaattctttcggttatatatccagaaatgaaattgctagggtatgtggtaattttatgtttaatttttttgaggaactgccgtatggtaccacagtggccacaccattttacaatcccactggcagtgggtaaggaccccagttcctttacgtcctcgcaagatttgctactttctgtttttgttttgttttgtttttgatgaaagccatcgagatagatgtgaaatggtatctggtttccctttttaaatgagataaattaacaattgacatcttaaggtctgggaagggtcatttgtagcattacagtgctctttaaaatgaagaaacatgattaatatattcaactgtgttttccacgttgttactatttgctgacattatacaaaatatatctgggaacaagaaaatgtttgctttaactagagttcccaactgagaggatcactaaccctttccttaatggttgtcaagataaggtaaatgatgatagaaatgccccttaagagcttattaaaaagccagcagtgactttggccttgaagataaagcagagcacgatctgcaggaactggaatgcttccagagctccccttgataaatctttctttggtctggcttagttttgagaaagttacagctgaaaagtttgatcagggtagggattttgctgctgtcgttttggaattaatcatttgatccatctatcacctgataaaatccaaccaaggcacaaaactctactaacatgagaacattcttaaatagtgcaattagaagtctggtggggatatgttttacctacatgatggaactcatttctaaaagtgtagaagaagtgcattgttagtagaagaagtgctagttattacataaacagttttagggttccttgctttttgttattgtattcctaataagtagaataaagtggcttgttaaaactcattgtatgttggtgtaaaagtagttctagcaggaagttatatggtctgatcaagaactctgtaaaactgtggagaggattagtgatgtggccacacaaagaaagacttaaaagactatgttttcttaatcagtaagtgtagttaagtcatcccccagaatctataagatagaatcaataacgctgttgatgttgattagctgcactctgctctaattgcaacatatcagaagtgcagctctacccagttctgtatttgaatcatatacaactcagtggtatttatatagtattttgcttattttaaaagaggagcattcattaaaaaaaatagttgaactgagattttcttttgctctcagagcaaattttccttcagtaaaacacagtcattcatcaccgctctctctaacaagggccgtttctgcaccgccagggaggcggcctcactgaccagaggagccaggaggggttgtagtttggaaactctcttgatgctggttaccttttctgcttcggtcctggcttcccattccctccataagccattttggcatcacctgggcctctctgaggagatgcgttcagtggggaactgaagggtgctttcagtgggtgtacagaaaccacccaggaggggctagctgtgtgagaatccctgggggaggaactcggacctaggcgggccggctatttagagatgggaccagaaggacctcatgaattaggcatcctgcagacagggtgaaattgcccagaggattgcttcacagctgccgaagcgaagaataagctgcatttcgtgatttcacctgagattggcagagtgtcgagttagtctaactcttcttaagccttggggtttattctccacatctgaatgtttcatgaaacaatatcgtttttccaaaatatgatacttcggctgtcagagatgtccttcatatgtgggggggatttttagtgcatgatgacttagtgcttatttgattcataaatcttaactctgtttcgcttcggcatttaagtagttgatacagtaaagccttgtctgtttccctggcttcatgtgacctgacagcttgctgaaagagtgactgcattgcactttgacaaaggcgccatccttcctgcactttaacccacctctaagcttgctcttgtattgcagccacctgagtgtcaggcgacttggctctgctagtcagggagggcagtggagcagttaagggtttggttgccggaggcaacttacttagctgatgaccttggacaaaatacttcgatgtgcctcagtttcttcaggtgggcattgagattacttaaaaaaaaaaaaggcccatttctaatattcattttagggtgaaatgaataatgcacataaagtgttaagtgaagtggcatagtagcagtcacttaaatattatttctgtggtggcttcagggttttcctgggttaaaaaaaagggaaaaagaatgtctttctggaagcagagatggctgcaacagtgtgataggagcagccacctctgccacagtcccagcctacttagaggttgtgggctctgcctcagctgctgtgggaggggaggagccgtggctttgggcaggcgtggctgccgatgggcctcctggcctttcacaagtcacctggcttctctgggcatcagcaaatccatctgtaaaatgaaggcatggtttccaagtccctggctcagcagatttccctccctgccatccgtagtgatgtaggtgcctcgcacactgttctccagcccagagccttggccaagcctctgcctcagggccaccctggtaggatgagaagagagtgccaggtgggtgaggcaagagctgcccttggaagaaaaataacccatgctttttttttcttttcatggcagttgggtcagcatatcctttcattatcaaccgtctcatcatgtgtgacatttatctctggataccaagaaaaggcagtgcaggctctaagccgtatttgtgtggggaaggaacttcttgaaatatcgggttctaatgggtactaaaattatgtaatgactttatttttataacttttcctcaaaactctttgtaacattaattaaatgtaatgttaatgaagttattaataagcatgtggtggtataagaaaaattgttagccacatgcatcaattttccgtgatgggaacctggtatgcaagagaaatgtgggtcagttttccaacagaataggagttgttttttcctaagaaaaagttgtcaggtttacatatcaacacaagaatttatcattttctgaggagaaggttctgattacgtgaggtgttttaacatggagaaagtaatttggagccacacaaacctgaggtagagtccaaattattggtctgtggaatgacgtaagctctctgggtcttagttttcttagctgtaaactggggataatagcatcctcttcatcagattgttttgagaattaaatggtgcaagcttaatgcctattatacagtgtctagcacatcagagctcagaagatgatgacaaagataacagtgacactattatcgatgaaaatttccacgccaagcacagtggctcacgcctgtaatcccagcactttaggaggctgaggtgggcgtgttgcttgagctcaagagttcgagaccagcctgggcaacatggcgaaaccttgtcttttagtagactaaaaatacaaaaattagctgggcatggtggcatgcacctgtagtcccaggtactggggaggctgaagtgggaggattgcttgaccctgggaggttgaggctcgcataatcagtgagccgtgattgcaccactgcaatccagcctgggtgacagagtgggattccatgtcaaaaaaaaaaataaaatatttttttatttcctaaaaccttggaagtctgaagtggaagagaatgtgaaggggatgtgtgtggaagaggttaactccctatctcacaacttttatatagaattttttcatgcctctcttttttctcttaataggaatgaattcttccaaaacaaaactagaactgcaaaagcacctgacgacattaaccaatcaggagcaggcgactatttttgaagaggttcaggtacagtacagttgctaatttctagaaggaaagaaaaggcaggcagcttacctgggaaatgctatgtgtaaaaaatagcaaaccagtgttgtcccaacctgggggaaggtgccttgagttcgtcttggtttcaggggtgaccaatcttttggcttccctgggccacattggaagaagaaggattgtcctggaccacacataaaagacacgatagctgatgagctgctaaaaaaacaaacaaacaaacaaacaaaaaaaacagcaaaaaaaaaaatctcataatggtttttgtttgtttgtttttttgacagagtcttgctctgtttcccaggctggagtgcagtggcatgatctgggctccctgcagtctccgcctcccaggttcaagtgattcttctgcctcagcttcctgagtagctgggattacaggagcacgccaccacgcctggctaatttttgtatttttagtagagacaggctttcaccatgttggtcaggctgttctcgaactcctgacctcatgatctgcctgccttggcctcccaaagtgctgggattacaggcgtgagccaccacgcccagcccaaaatctcataatgctttaagaaagtttatgaatttgtgttgggctacattcagagccgccctgggccacatgttggacatgcttggcttaagctttcacagtctcatagagtgtccaggtcagaattgcagattcccatcaggccttagcttagatagtaaaactaaatgaaacaggcaagcctcttccttaaacaaatgttagaataagagagaagaaattataaaatggaaagcgcctcaggctgggagacagaaggtccggcctctggtccgcatgtactcatctgttccctgggaaacctctgcccgccccttcccgcttaggatttcagacctaagtgtgggagtcgaatgagacaatgtttggtacatgaacttgaacagaattccttctttcccccaacacctttttttttcatttttgaaaataaatttaggtcatgctgtctacttggaacctgataatatatcaaacctacaaaaacaaaacaaaattcaagctcatcagctttctgcaataaacttggaagctagctcttgcccttgcatttagatgcagtgtatctcggggagaccatgctgtgtgtgctggcatgcctgtagcctgttcattatgaatctttaatgaggtcatccaaaatttcatgtctgctttagctgaggggcattttcgatgattccctggcacttttttagggagggaagcatatcaaagaataaatatctccttttgaggggcgggcagcaggatctacaaatagaggagccattaaacaaaacaagacagctagcaactgggtgggtttaagtgcttttccttcctcactgggaaaagactatactaggatccacgatctgctttctgttagtgtaaaaaaaatgaaaggattgtctctctctctctttgttgtttttttgagacagagtctcgctctgttgcccagagccgaagtgcaatggtgcgatcttggctcactgcaacctctgcttcccgggttcaagcaattctcctgcctcagcctcccaagtagctgagatttcagccgcctgccaccaccacactgctaagttttgtattttcagtagagacggggtttcaccatattggccaggctggtctctaactcttgaccttgtgatttgcctgcttcagcctcccaaagtgctgggattacagccgtgagccaccacgcctggccgtctttctcattttaatcacgttagaggtcttgtcttattcccttgttctccttctacagtagaattggcatatgcttcaggaagagagcatagaaagatgttttttcatgtctcaaatagcctagagggtaattttcacaattttcatttgtctttgcattttcttgttttcttctgaatcaacttgagacatgctactttgttttttcttaaaagatctttagagttctaagtacacaatactcttagaaaatatactgtgatttgcatttggaattcaaaaatggacaatatgcttctgattgttaatgcatttacaattcaagttggggcctttttcatctaatgctggcccacttactgttctagagctgtcctgtcactttaagaaaccatctttctatcaagaatagaagaggaacttccctctcataatgtgggttttcttttttgtctagacagcaccacgtagctctccctaaaacagtgtgatgaatcagtttaggtaatacacaaaatattcttccgcagcaatgagatgttcctaatggatatgattccaagattctctttgactcatgcaggcttttagacactgagtacatcatggtaaagacactttagaacagagtagattatgactaaggtttgctttagaaaaagagctttcagttaatatcctgtgtgttgttctagaggtctctgtaattgttaagctgctccagacaccaaagggaggttgtattcaccaactttgaaaagccggctctcgccttgtcttccatcactgtgagtgtggctgttccttgagtgatacagatttgtgcatggatcttttattctagaggcttgttagatggtcttgttgaattatgtcctcaatgaccattcttggttttataaaacattttataaaccaagtcattggtttcattttagacagcagtgccagctaatgtgcttgaaaatcatacatttcaaaaaggttgtaaggaaaaaggtggctttgcagtttcctgagtctccttataaaatagaatggtaaatattttcctttgttcagtctttcctggaggggaatttgtttcggaaaaagtcctctacatgcaaattttcataagggaaatgtaattaccgttgaaattaatggtacgtgattacttagttattaaaacataccttatttaaggatcatgtaaatgaatattaaatcaaaaaatggaactctaacagctataaagaaatcactaataactgtgtaaacgatgctggaggttatctctactgtaaacaagctaattttgagcactctgagaacttaatgccagatgggcatgtgggcataccacactgcaaagccatatttttatttatgagcgtttttgaaatgtttcattttcaaacatatctagctgggcatgtgttaggatgaccccatgatgctctgttactgggtgaatatactaaatccaaactgatcatctcaggataagaattgctgtgaagccaatgtggagctagtaaataaaatatctccaagtctaattctcctaatctatatgagtgtgtttcagggaatgacttaattaaatactgactagataaatcaagtagatttatactcagtagacattgataattcattaagtaacatgacttcacaagttaaaggttaatggtcagaagagactctttttactttctgaagaatatatatcagcttagttggattttgcatggttttaaaatgatgttagactgtagttttaagatgttagactgaaaactttaagttttaagatgttagactgtagtgtccaagtgagttttaagatgttagactgtagtgtccaagtgagtgttgtctttttaagtagttcccttaggagaccatgggctttctcaacattctgggatgcatcaatcagtgttggaaattgatttatttatttattaattttttttaagagaaaggggctcactctgttacccaggctggagcacagtggttattctagggtgtgatcagagcacatttcagttgcgaactcatgggctcaagcaatcgtcctacctcagcttcccaagtagctgggactgcaggtacatgccaccttgcccagctggcagtttatatctgaattgcgtttatgacaatttataagcctcttataggttaagaaacatgtaactaatttagttttgttacttttaacaggcgattaattattttgtaatattcttttataaattgaagtatgacatgcatatagaaaagcaaacaaatcaatgatgtataattcagtgaatttttataaggtatatacaactgtgcagccagtgccaagattaagaaatggagcatttctggccaggcgcggtggctcatgcctgtaattccagcactttgggaggccaaggcgggcggatcacccgaggtcaggagttcaagactagcctggccaacatggcgaaaccctgtctctatggcaaatacaaaaattagccaggcatggtggtgcgcacctgtagtctcagctactcgggaggctaaggcatgagaatcgcttgaacttgggaagcagaggttgcagtgagccaggattgtgccactgcactccagcctgggggatagagcgagacgctgtctcccccaaaaaaagaaagaaatggggcatttccattgcctcatagtcctgttttgtgtctgcctccaggtaaccatcatcctgacttctgacatcatagtttaattttgaacaagcaagtaatttttgatggcacagtgatgttacccaattcgattccccattattttcctaagacttatctctctgactaatgaatgttcataaagttaaatcacctttaagaaataatgatttggcccagagcagtggctcacgcctgtaatcccagcactttgggaggcagaggtgggtggatcacgaggtcaggagatcaagaccatcctggctaacacggtgaaaccctgtctctactaaaaatacaaaaaaattagctgggtgtgatggcgggtgcctgtagtcccaactatttgggaggctgaggcaggagaatggcgtgaacctgggaggtggagcttgcagtgagcccagattgtgccactgcactccagctccagcctgggtgaaagagcaagactccatctcaaaaaaaaaaaaaaaaagaaagaaagaattaatgatttgctactatcgaggatggtgaagttgcatgggagattttagggaggtgacacctcactaattgtatttcagaattacattaaggaaagatttgtttcttgattgtgtataacaccatcgacgtttatttctctgctttagtgacttctgtatgatgtttaacaagctccatgacgcagtctctgattcttaatcagtttttaatgaaaaacaactgtggtagtatactgttcccagttggtctaatttccttcttttaaaagtgtattttgaggggaaaaatatattaatactcctcctcttactatatgattagccctttaaaatattttgaaatagatgatgatgaagaatttctccaagcacaatatacattttcttgtggagatagccagaaggtttaattaaagacacaggagaagaaagagtgggccaaccatcaggcgcctgtacctgctcagaggcctcataattcctgtctgtttccctggatcattttttttttaatagacttaattttttttagagcagttttaggtttacaggaaaattgggtgaaaagtacagagttcccgtattagctttcactgtcccccaccccacagtttctccgatttttaacatatcttgcattactgagggtttcttcattataattgatgagccaatatttgtacattgatattaactaaagttcatggtttacatttgggttcactgttggtgttctgtattctgtgggttgtgacagatgcttaatgtcatgtgcccatcattacggtatcatacagaatagtttcactgccctaaaaatccccgtgttctgcctgttctcccacctcctccctaatccttgatctttttgctctctccatagttttgccttttccagcatgtcatgtagttggaatcacacagtagccttttcagactggcttcttttgcttagcaatatgcacttaaggttcttccatgtctctttatggcttgatagcttatttctcattgctgaataatactcagttttatagatgcactacagtttctttacccatttgccgatcgatgcacatcttagttgcttccaagttttgataattgtgaataaagatgctgttttcagctcatttgggtaaacaccaaggagtgcaattgctgggttatgtggtaagaatgtgtttagttttacaagaaactgctggcctgttttccaaagtggctgtactgttttgcatccccgccaaccataaatgggagttcttgttgttttgtggacatttgggctcagtgtacccataaccctttgatctagcagtgttaagttgggattgtggcattactgccactttcctttttgagaatctaatgcccactttctccagagaaatccactttttgcatataacttgtaaaattttgtaatattggggttcacagcctggagtccaggttgagagtgtctgctgtagcctccaaaatatttaatatttcagtccgaaatttgaaagaacaggaaggcctcaatgaaaacaaacccttctaatcattaactatcctttccttaagtaacaagaacaacttacctttaatctttttcgttaagaaaggactgggtttctttaagaaaggactgtcagaaagtctgggttagtgttacctttgctttgaatgcttattatgtgcagggtaaagttgcttccttagttagctggggaagaagtgaccaagagtggtgttgacccagattcagatccttgtgtagttgatccatttatgtcactgaatttgttttaaagaacagtctggaaatttggagtagggagaggggaggaacaggcaatggatacttgtcaacataaaaaaagatgtattttcaaaatttatagactaaaaactttgtgtatcccaaaacaattcattttactttcttcatatatgataaaatcatacattaaattaggtggactttaaaaaaattcactctggcatttcaaatccaaagcatttgggagcaggaggagaccatagagtttcctctgtgcaccatcctcacttcagcagacagggaagctagaattaaggggcttggcttcacacttctcggcagcagccggaacctacatgtcctgacttctggtccagtgtgctgtgccacgaccctgtctaaaagttaaaaggcatagagagaattttttttttaaagaaagaagaaagaaatgtacatgccatgaagttttgtatggaagggggtgccccatggggattccacagagtgcttcacggtgaacacattcgacataggaaattatgacactgaatcccgttgctgttttccttgcccgttccctaagagtttgtcaatgtttggtcatcatggcccctgacctttgggtatttatatggattttgtgtttttcctcttgttttaaaaactatttatttgttaaacattttgactgtgtctctatctgatattaaagattcatttttagatgggaggacatcagagatgaaaagctaaatctggcccactggctccactgttcctttttaaaaattctctctacttttaggatcattggtgccccctggtgagatgattgagtaaaagcactagtttagtggatggaagctgttagcatttaaaaagacggcttagcaatattgttgacgattaaaaataaatcctgtttctgatttttgttttaaagaaattgagaccgagaaatgagcagcgagagaatgaattgattatttcttttctgagatgtttatatgaagagaaacagaaagaacacatccatattggggagatgaagcaggtatggcatttttgtctcttgtaattgttgccaagtctctgccaagtctctgtataaacaacgttttgaggattttctgaaactctgatacctttttttctccctatgttttattttcctttgttgcacatagaggggaaatttgggagtgttagactatgtatgcttgagaagataagaaaagtttctgcctgcaccatagtggaggcagaacagttgctctaataagaggactggcttagagcagcaagaattgagtgtaagagtggatgccaccaagatgagctgcttggcttgcagggagctggtttgtcacctcgcctttcttctttgtaaacctggaaggacattgcatggctgcctttggaattacaaaaagtacctgaacgtcctttgtgatataaacgctaggtcacaaatcagatacaatgttggcaagcctgacttatgtgctattcaggttagaacttggattaattccattttgcatggtggaaatacagagtctccctcccctcctccactgtctacagccttatttagcttttctctttgtggggtctcaaggcagaagctggggctctctgcagatctctcccttggaagatcttcaggtttgggagtccctatgttacatggtaccacagaccatttcctttgtcttttggactccatgtgagtccattcataatgaaccattaatagcttcaaaacatacacattttatatttgctaaagttacctgttggccagaaatctagagaaaaatcagtgaaggatgtacaagtttctcagtttcccaaaagtatgttccctttttctttttgaacactccccacgtacgtgttccaaagacacttgtgtgctcagtggtgtgccctgtcctacggcagcctttgcgtctggaccctaaaccaagtgtgcagttttcatggggtgtacacttagcaaatctccacataaggtttctaccttctaggtggctttggcagtcacgtgccttccctgaacacttgggctggtgtacagtgtcagccacggtttctaatctcattggccagccatgaggtcctttagcagtgactctaacatgagtatatgacctgtgttttttggggttttgacttgtggtcttggtttgtagccattcctcccttcccaacctgtacccttaagatagcattcaagttctgtgtctctcctgttcatttttggatggaccagttggtctaagttttcagttaattctggagttcatttttcagcctatttcttttctcttttccactccctttttcccctcttgtgccactgatagctttttccctgttctgattttcttttatctgagtcagtctgacttgttccaacaggaaattgataattttgaagtaatttataactgctagaaaggggaatgaagcatttacggtggatggaaagtcttcttttactaaacattttgagcatttatggtgaatggaaagttttgacctaactgcagactcatttttatggaccaggataatatttttatgatttgggcatagatcatccaatggagaaatgtgtttaatgttttttttttacccaaaaaaacataagagttcaatgtagaagtgactgagccttacaagcagaactggcatctgtgtaacacttttactaggggtttctaaacatcatgacccagacggctcatgtcttcgtctataaagaagctgccctaatcccctgatgaggttggtgtactccaggctggacactctcatgggctctgaggagtgggttttcagagcagcagctgnnnnnnnnnnnnnnnnnnnnagcagcagctgctttatagacccattaggcacagccttgagattcactgatagatccttttcatgttttctgctatcagtttagccacgtgggatttcattaccttcttgttgcacctaaaaatttctaaagcttttgaaaatgtgggaagatgtgacatagaccgtggtaggatcatggctttgacaaagaacttctctggccacaggacttcagaagcggacagaggacagtgagcgcttctctcagtgctgtgcgtgtcagggtcggcagggaggccatatgcgcttttcaaagaccaaaagaatagtgctggagaactgtcagaggagttgtgaaatagaaaaaaccctgaatgagtcttttgatcttatagaacagggttcagtttgggcaagacttatacattaagttagaggctgtcacgttttagtcaatggacttgtcgtttccacctgtattcacagaggtggtacaaaaattagtatgaaatcagctgccacttactgaatgtttgccaagtgccagatagagttctcattccttacataaatgactccattcattctacaagttttttgaggtaggtggtaaaatacccattttatagatgaggaaatggggaagagcagtcaagcagttactagtgagtagtggagccactttgtctgatgtctaagtactttatcttaattattgtgtgtttttttaaggagcttaacaaaatttaatgctatataactacttactgattttcttgggtctgttttctagtagataagattttctttctttttttgtgacattttattatgaaaaatttcaaacatatagaaaagttgaaagaattataccgtgagcactcatatacccaccatccagattttacagttttaaagactttgttaatttgctttatcatatatttatctattagtccaccttatttttgcatgcctttcaaattaggtgatatcagtacccttcatccctaaacactttagcatgtatatcattaactagaatttagtgtttgcttccaattttggggagattaaatttacatatggtaggttatgcaaatcttaagtgtaccatttgttgagttttgaccactgctgctacattcaggtagctcaaacccctatcaagatatagaatattttcatcctgccgggcgcagtggctcacgcctgtaatcccagtactttgggaggctgaggtgggcggatcatgaggtcaggagattgagaccatcctggctaacacagtgaaagctcgtctccactaaaaatacaaaaattagtcaggtgtggtggcgggtgcctgtagtcccagctactagggaggctgaggcaggagaatggcatgaacccgggaagcggaggttgcagtgagccgaggtcgcaccactgcactccagcctgggcgacagagagagactccctctcgggaaaaaaaaaaaaatttcatcctaccagaaagtagccctatattcctcttctagtcagtcctcactaccccttcccccaggtaaccactgttttgatttttttcaccttagattagttttgcctgttctggaatttcttataaatggcatcatactcttttttttttttttttttttttgagacagagtctcactctgtcacccaggctggagtgcagtggcgctatcttggctcactgcaagccccgcctcccaagttcacgccattctcctgcctcagcctcctgagtagctgggactacaggtgcctgccaccactcccagctaattgtttatatttttagtagagacggggtttcaccgtgttagccgtgatggtctcgatctcctgaccttgtgatctgcccacctcggccttccaaagtgctgggattacaggtgtgagccaccgcgcctggccggcatcatactctttgagttgtggctccttccacttagcataacgtttctgagactcatcagaaacgttatgctacattgttgcatgtattagtagtttgttgttgcatgtatcagttgcttgtatcagtagtttgttcctttttgttctgtggtattaatgtcaagagtttctttctccattctccttctgagctgcttgattatgaataaggctgctggtagatacattgtgccagcctgggatggtgagttctgaactgagaatttcagtatagcatcaggatttaaagcttgaatacttgaatccaaactttcatgcttagagtttaccccatctgttgaaggatgtgcaatataatgactgcaatagaattcactgtggagcctccaaattagaaattattgtctgtgagggccaggcacggtggctcacgcctgtaatcctagcactttgggaggctgagatgggaggattgtttgaggccaggagtttgagaccagcttggtcaatatagcgagacccccatctctgttttttttttttaaagaaattattgtctaagaaccagtgtcatcttccaaggagaaacttctagatacttgttttaagataaataagaaacaagtcatttctaaatgtgaattattttttaaatgcaattttttaaacattttattttaattatggcaatagacgtggaaaagactcttttttgatagtaggggagagcagaagaaacattgaattaagtacacagagattcttcagacctgctttaaaaacacatgcatacaaatgcacttctgtctcttaggatctactaactgatgctgcttgctttagtcttttagctaatattttctttctttctttctttcttttttgttggagacagagtctcgctctgtcgccaggctagagtgcagcggcacaatcttggctcactgcaacctccgcctcccgggttcaagcgattctcctgcctcagcctcctgagtagctgggactataggcgtgcgccaccacgcccagctaatttttgtatatttagtagagacggggtttcactgtgttggatgggatgttctccgtctcttgtcctcgtgatccgcctgccttggcctcctaaagtgctgggattacaggcgtgagccactgcgcctggctcatattttctttatatatcaaaacaattcagcttgcttcacttttatgaaagctttattatgagtttgaaagcaattctgcattttcttaacattgtaactggtgttgagttgaaggcaggcccctgggagccctttgtgggcaattcccttcactctggaggctgcctcgagcctggacaggcacttacacttggtcagtgattgcacagaaccggttgcaacagattctgtgcacctccctgtggcgcgtagcatttagcaggcacttggtcactatttgctgagtgagtctgttaccttaggcgtgtatttcccgtggacctgcctggggatcattgctcattcactcattttgaacaagccaatattacatgtccagggtacgctctatagtgtgaaacacaaaggtaaatgatagttccccttctcaaaggaatttctaaggtagtagccattcttttgatgcatattctcattctcatagagagtccaattatggataattggacaaagctgaatgtcgcttttatgagaatccattctttctcttttatgccttgaaaaatgtgtagcattcattagtgaattaggatttcattattcaaagaagacataaggtcttcgaacagcagatgactgaataaaataatacctaacagcagtagaatgaggggaggacatattcaaggaacattttatgcccattagattggcagaaatttttaaaaagtgacaataccgtataaaggtgaactttcctatactgatactgggaacatgaatttgtaccattcagggaagagaaacttgataatatctggtgtagtctgaaggggcacagtccctgtgacccagtgaggacattcctcattatttcccttgccaaacatttcacatgagtctataaggagctctatataagagaggtcactgcagcctcctttgtaagagcaagaaaaaaaagcaaataagtgtttaacaataggaacatagataaattaggttatgcagtgaatatttgcactctgactaaagtgagtgaatcaaaaaaaatttgtcaacaggaataaatctcaaaaatannnnnnnnnnnnnnnnnnnnnnnnnnnnnnnnnnnnnnnnnnnnnnnnnnnnnnnnnnnnnnnnnnnnnnnnnnnnnnnnnnnnnnnnnnnnnnnnnnnnnnnnnnnnnnnnnnnnnnnnnnnnnnnnnnnnnnnnnnnnnnnnnnnnnnnnnnnnnnnnnnnnnnnnnnnnnnnnnnnnnnnnnnnnnnnnnnnnnnnnnnnnnnnnnnnnnnnnnnnnnnnnnnnnnnnnnnnnnnnnnnnnnnnnnnnnnnnnnnnnnnnnnnnnnnnnnnnnnnnnnnnnnnnnnnnnnnnnnnnnnnnnnnnnnnnnnnnnnnnnnnnnnnnnnnnnnnnnnnnnnnnnnnnnnnnnnnnnnnnnnnnnnnnnnnnnnnnnnnnnnnnnnnnnnnnnnnnnnnnnnnnnnnnnnnnnnnnnnnnnnnnnnnnnnnnnnnnnnnnnnnnnnnnnnnnnnnnnnnnnnnnnnnnnnnnnnnnnnnnnnnnnnnnnnnnnnnnnnnnnnnnnnnnnnnnnnnnnnnnnnnnnnnnnnnnnnnnnnnnnnnnnnnnnnnnnnnnnnnnnnnnnnnnnnnnnnnnnnnnnnnnnnnnnnnnnnnnnnnnnnnnnnnnnnnnnnnnnnnnnnnnnnnnnnnnnnnnnnnnnnnnnnnnnnnnnnnnnnnnnnnnnnnnnnnnnnnnnnnnnnnnnnnnnnnnnnnnnnnnnnacaggggttcaccatgttggccaggctggtctggaactcctgaacctcaagtgattcatctgcctcagcctccccaaaagttctgggattacaggcatcagccactgcacctggccttggtatatgtgttttaatttgtattcattcatttaagcctcatgacagctctgcgaggaaagttcactatacgtcttcaggctgcaggtagaggacctgaaagggacaggaggtaacagtctggccaagaccacagagccagggaatagcagaggaacatttcacctgggcattgcactccagagctgggcttctcactgttctcaacccctggcaaatgctcacttgaacaaagccaggtggtgatacaaaggtatttgttatattagtctctacacttttctgtgtgcttgaaataactgcaacaaagaatatatcagtatttagagtaatgggggacttgcttgtgtgtgtttgtatttttgagatggagtctcgctctgtcgcccaggctggagtgcagtagcatgatcttggctcactgcaacctccggcttctgagttcaagcgattctcctgcctcagcctcctgagtaactgggattacaggtgtgcgccactacacccggctgttttttgtatttttagtagagacagggtttccccgtgttggccaggctgatctcaaactcccgacctcaggtggtccacccaccttggcctcccaaagtgctgagattacaggcatgagccactgcgcctggccgtttttttttctaacaaaattattttctaacagaaagcaatcaggtgagaatccacataagaaacaatttaattcagagatttttgttgcatattaaaaaaaaaatgtaccttcggctgggtgtggtagctcactcctgtaatcccagcactttgggaggctgaggcaggtagatcacttgagctcaggagtttgagatcagcctggccaacatggtgaaaccccgtctctacaaaaactacaaaaaattagctgtgtgtagtcccagctactctgggggccgagggagaaggattgcttgaacctgggaggtcaagactgcagtgagccatgattgtggccctgtactccagcctgggcaacaaagtgagaccctggcaccctgtctcaaaaaaaaaaaaaaaagtacctccttgtaaataagtaacactaagacttcatttagtggttgtcaagcaaactccattgtatttttattttcagtttttatggctagtagttaagggagagaagcttggttgcagagaagaatgaaaggatgatgggaaaataaaagtaggagagaggaaaacgcaagaaagcaagagatctgtagaaagggatgaaggaattgtataggcagagagaataggttctttaattgagaaatttatgttgtctcaccttctgaaatgcccccaaaggtaagttattgttttattttgaaaagctaatgatagctacctttctaccacgctgtgttcaatgttttacacactttacctgtttgagtctcacaacacagtgttatgattcgatcttgccattggtctcactttactgaagaggaagtttgaggctcagaaaagtaagaaactggccgaagaccacggttagtgaagacagatctctgatccagttgcagagtctgagcaataaactacttcaactgattggtttcaaagcacatttcgtcattttacttggggtaatcaaagcaactctctgaggcaaaattatttcctggacttgcagccatgtcactaaggagcagatgaggtgagatcacagacaggatcagaatgatggcctggtgccaaaaagatgtgtcctagagatttttcattcctttaagaagcagagaagggagcgataaatgacttttcgtttttcacttttttagacatcgcagatggcagcagagaatattggaagtgaattaccacccagtgccactcgatttaggctagatatgctgaaaaacaaagcaaagagatctttaacagagtctttagaaagtattttgtcccgggtaagtagcataatttctcctgatttaagttaaatcactttttaggagagtgtaagattgagttctatgcttttattccatcaatgttcatcataaaggtaaaagtataaaacctttttttatgttttctcaggcttataacagtattatctacattttaaattgtttttaatttggcctaggtttaaaaaaaatattccttactcttttgtattatatccaatgggatttttttgccgctccaaagaatatttgttagccagtccctataaagagcatgcattagatacactgaagtgtggcttctgttctccctactatcactatgtataacttaaaaaacagttactgtcagctgctggtgttagctatctaaaaggctatatagtaggggtcagcaaactatgcccatgggccaaattctacccacctcctatttttgtaaataaagttttgtcgaaacaccgccacatccattcattttccagttatctaaggcttcttttttgcagacttcagcagttgccacaaacactatatgcctcacaaagcataagacacttactatctggccctttacagaaaaagtttgccaaatatagctctatagaaagaacaaagtacacatgtacatcaatctgggagttctttaagaaattatccctccctcccatgagtgtaaatagcctgatggcacgtctgagaaatcaaatctgattttccctcagagtttcacacctttctggagtgtgcagtatcttattatagttctttttgattttatggcacacttcttttgaaacatctgattttattttattttttaattcgggggggttaaattttattttcttcgaagatgtttctgagaattttgcaatatcttctgagatcatgaaaaacagttgatttacaaaaccagagttgggaggggctgcatttgagagctcccaaagggatagagtgctgtccgagtgacatgcggctggccgttatgatgacttgtgacccaggggagggagttagttgctgagtgggcttgagcacttgattttccttatagacgaattgtcttgtcttcctgcctatcactcatgccaaattacttagccaccaggtgttttggaacgtttaggttagtgtcttatttattttttaaaaaaatgatggaaatgttgattattttaatgtacaaatatccttagtagcatttctcagtagataacatttttttcctgagcttatttaaatggaccaatctgcttctagctgatgcctttgcaaaagcctccagagtcataactcgactgccttttctttatgtagggtaataaagccagaggcctgcaggaacactccatcagtgtggatctggatagctccctgtctagtacattaagtaacaccagcaaagtaagcacatttctctttatgcgacaccctgaagaaaccaacaaataggtcttgctcatctcctgtctacatacctccaatcataaaacgtttgctgcttgcaaatttcttggcacaggtggaggactggtcatgcagttctatcataacataaaagttttacataaaagagcagatggggctgggtgcagtggctcaacgcctgtaatctcagcactttgagaggcggacgcgggcggatcatgaggtcaggagatcgagacgctcctggctagcacagtgaaaccccgtctctactaaaaatacaaaaaattaaaaattagccgggcgtggtggcgggcacccgtagtcccagctactcgggaggctgaggcaggagaatggcatgaacctgggaggcggagcttgcagtgagccaagatcacgccactgcactccagcctgtgtgacagagagagactctgtgtaaaaaaaaaaaagcagtagattttcctattaaaaaaataattaatattgggaaaacatcagaaagtggatttgtgaatttagagaagtatacagcttaaatttttctttttttaagaaaattttattttggatttgggggtacatgtgcatgtttattacatgggtatattgcatactggtggggattgggcttctagtgtacccatcacccaaatagtgaacattgtacccagtaggtaatttttcaaccttcacaccccctttcattctcccccacttgtggggaaattaaatttctgaaactttatcctgtagctggctctatgattataatgaaacattactgttttatttaaataagcaagtatctatgtccttcttttaataacttgctttctagacatttaatcatatttaagcctggtcagttcaactttataactcctgaaaagtgggtttgggttttgtgctagggaggccagctttcccttctgctaccagaggactctctttggcagtagtgagggagggagtgtttgtggaggccagctccttaccacaggcagggtttacagtcctctgccatccctcctagacatatggctttcagaatttttctaacctacagtaagaagcacatttaacattgtggcgtagttcacaaacacacatacctacacattcacacacaaaattaaaagttcacaaaacaatatttactgtgaacaacatacaatacatactgatattttgttctattttatttttaaaatgctcatggcaaactactcagttgtaccacctactaacatgatagagggagcagtttgagaaacacttccttagatggatgagtgcttctcaaatttcaggtgctccgcctcccgggttcaggccattctcttgcctcagcctcctgagtagctgagactggttaaagtgcagattctggttcagtaggcagggtggggggagccctgaaatgctgcatttctgacaagctccaaggcaatgctgctgctcctggtctgcagaccgcctctggggagtgaggtcctagacagcagtcttgtaaatgtgagtttctgagttaaaatccaggggaacatagtgtcgtccagcctccatctaatacacactgatcccaccctgcaattcattgcaagtgtgggaaggctatttgcttatttgttgtgtacagatgaaccacacaccgcccctttcatgtaggaagttacctaggaggagagagatgacagatacagaaacagccccagcatcaagcagagtgtggtaggagcccagaagttacaaataagagacattggtaacttcagtgtcagaagagcaaggggaagggaagttaggtttggtcagtggaaccagggaaaaggtgaggggtgagggggcagtgatgcttttggactaaatcttggtgtaggaattgtgcctatggaagtgaacagagaagaaggcattctagacagaccagtgtcaatagacataccatgaagacattcatgtcactcagtgggctttccagtaagccttattgcttgctttttatttttctccaaaaggcagatctaggaatatatacatattcattcttcaggactcgatagttgtgaagattcttttaaaaggatttaaaagtctgtctaagattgcaatttctagagtcattctaagagagatgcaacttttcagaagctgcttgtatgtattgtatatgtttaagtgtactttacatctttcttttattcatcttgaattgagaaactactatattctattttatgtaattggatcccttctaaaaaattgatcacctaggagttgcaaagaaaccaaatagccctgaaacttgacaaatgaaaatggccctttcagttgtccaattaagctaagggttagctctttgatatgatttggagggatattagtaagaatttagatcaacaggtttgcatgatggagattgtgttctgtgatgtattgtcttagagagacttttaaatccttaaaagaatcttcacaactgttgagtcctgaagaatgaaaaacttcagttatgaaagtaatcaatatttcatagtatgttgggaattttttcctaattcttatacaattaaatgtatgtaacttctccctttggtaaacacatttctttttttttttttttcaaattaaaaccctcaatacttgttacctaaaaggcactcaactgtgtaaatgaacaggtagaattcagagtctccagtccactgttagatgcattcattcttgtttactctattcctgttgatttattttttctcttccaacaatttcaataggagcaagctgctacaattcctctttttgaatattttgaatatattaaaaatatattggccactagccacgtcctgggtgcagtgttaaacatcagtttgcttgagtggtagtagttcattcctttgaaaaagcgtgcatcgtgaaggcatacaactttaaaatattgtcatgattctcaacaaatgtttgagcactcactccatagatttattgcatacctaataaaacaataacttatgtttgtgtaacattttacaacataaaaagtacttttggttgtatcatcttgctttgttcttgaaactcagatacatttttactttaccctcttacagaagaaattgaggtgcagaaagaaattatttgccctgaattgcagcagtaagtgcctacagagtgattttccatattctaagaatattgatacagttcttaatctcaaattatgaagtcgaatctcaacagtagatcagattcggagagagccttaaaatgtgggtttaacatgagtgaacacatgtggcaaagataaagaacttggttaagcagtggagacaagttctccagcactcacaccccttagaagctgcagtaaacagtcctgttttctagagagagggcactattcatggcgttgttcagaacgttacagattgtggcttatgtccttcactcctgcacttggccagtctccccatttctccagcaagccagcagtgtgtccttgaggagcgggcatttatttaatggaccttcattttcttctgcttttggtggtggcttctagatggcattataatcagaacacatacttagatactgcaatgtttgcccgtgcaggaactagagatttataaatcccacatattccccatggtgtgtctgatctgctgtgtgtttgctcccaggagccatctgtgtgtgaaaaggaggccttgcccatctctgagagctcctttaagctcctcggctcctcggaggacctgtccagtgactcggagagtcatctcccagaagagccagctccgctgtcgccccagcaggccttcaggaggcgagcaaacaccctgagtcacttccccatcgaatgccaggaacctccacaacctgcccgggggtccccgggggtttcgcaaaggaaacttatgaggtatcactcagtgagcacagagacgcctcatgaacgaaagtaagatttgtttaaatttgttgcataaatagctggggcatatctgtgactagccaggtatgtgcatcccaggtatgtttattgagtgagagaaatgagtcaggctttactcttggtttggagataaaactggaagcagtgacatgttcgttcgagctgcttgtgagtatacaagcaatgggtacttgtattgtcaggaagcaagtgaaagtgagcaaaaatggtacctaacatgcatagtcattactcctcaaacaaagtaagagacgttgttgactgtggaactttgctgctgtgaggaagagggcaagcggatgagtctccccatctgaagccctggagcagggttataatgggagggagaggcgctgatccttacaggcagagcaagagaggtatgctggcctcatagggtgacaggggtgcttcagcttctggtcctagctctgccgtgaactaattgtgacctggacgaatttgctaaattctctgaataacaaaattggagtagatgttttctaaaatctctcactgtaagaattctagattcttctaacaagatttattcattgtaatagttgggttcctgtgaccagttagaatcgtctggttatggagaagagtaatcagaagttccccccattccttccaagtgtcccttagtgattcatttaactctgtgtgccagagactataaatggacacagttatctttaaaaacaactttaaacaattttaaaaatctctcacctaatatgaatcaaggtcacacctgtgtacagtcgctgccttcttctgaccagcagccgcagaagtcccaggacctatgtgttcgtgtagttcatacacggatcattgagagtgtgagttagtacagaagtgtttggaatgttctgagtaaagaagtgtgagcattaacagtcctggatgatggagcagagcctcccagctttgttttctatcagccattggaaagagttcttggttctttggaattcagcggggtagtggtgatcccaaaagcaggggacatgtcagaaggtactgcttaataaatacacgcttttagagacacacattgttgggttgtagctgtgtaagtttcttgtgtttaacaccctgtctgcacattacttctgtgctgcctcaccactgcctgcccactcctctgttgttggcgttttcagtgatcattgaaacattcctgtctggagagtcctagttctcttgtgaagtctgctgtttctcaaaagccagagttgataggacttagtatcagtacttttcctttctccatgaagaatgtagctttataatagatgatgtcacacatccgtaatgggagggatgaggagatgcctgtctgtctgcctctctagcatggcccattctgctttctttcccccttgtgagctcttttccgatttatctacaggaaataagacattgaaattcagggcaggatattgttcattttaaagggaaatgtattttttaaagttcagtttttttttgcttttgtttatactttaattaaaaattttttttcctgccagttcctgaaaaagaaaatagagaaagaaatattattgttcctgggcgaagtggctcactcctgtaatcccagagctttgggagactgaggtgggaggttgcttgaggccaagagttcaaggtcacagtcagttgtgatcgtgctaccgcactccagcctgggtgatagagtgagacctattaaaaaaaaaaagtattgttgggagcataaacacgtgggaaatggtcaagaacggccgtcaatatactctgtttttcactgaaaactacctttgccagagagcgagcagagatgaggaaaaggagtggaagaagtcctccactctgatagtgttactggaacaacgagacaaaagcggtgtgctccttccacctgtttgctccgtgtccctgtcggcgccccctctcctgctaacccccccgtgctttctctgattgctgtttagtgtggatccttcacctgtgggtgagtctaagcaccgcccaggtcagtcttcagctcctgctcctccacctcgtcttaacccctccgcctcctcgccaaacttttttaagtacctaaaacataattccagtggagaacaaagtgggaatgctgtgccaaagaggtgagcacactcacgtggcaagtttggtgttgtctgttttcctggggagttcacactgatgaggatgtgctgaatggggggaatgtccatgcaggaagcagagccactgtgtgtgtgtgtgtgtgtgtgtgtgtgcgcgcgcgtgtgtgtctttgtttatattttgtcttattttcagctgtcatttgaaccaagttaattttactattgatgacttttcttaagattattatgaaaacagatcttaatggcagattggtttgtgtttgtgtttgtttttttttttttgagacagggtctcactctgttccccaggctggagtgcagtggcgtgatctcggctcactgcagcttctgccttgtgggttcaagcagttctcctgcctcagcctcccgagtagctgggactacaggcacacgccaccatgcccggctaatatttttatttttttttgtagagatggggtttcaccatgnnnnnnnnnnnnnnnnnnnnccctgctgcaaattgtttttttatacttattttcacatttccttgccctagtggacacttacatgcatgcgtatatacacacacacgcgcgcgcacacacacacacacacacacacacacacacacacacacacacgataacatctgtgtttgatcatgtacactgcaatttgtgccatatcagaaacttcctgattgatttaggggaattatttttcccagtttgaaaggaagagttatttggaaaatggatggattttcttttttaaaaaattattgatcccattcatttaaaatcaaattttattggtgaaaatgaaaattaaatctcattcgtgaactacttttaatttcttacctagttttcttttcttagcattagaacaaaaatgtttcttttattttgaagcttatattttatactttgtgtttttatgtttctttatcctaaactcttttttcaaccaaactcttagcatctcctaccgtaatgccctgcggaaaaaacttcattcttcttcctctgtgccaaattttctaaaatttctggctcctgtagatgaaaataacacctctgattttatgaacacaaaaaggtagggcttaatttagatatatcaagcctgggtgttactaagtgttgaatatcattagatatacaagggtgttttaattactattttgccatttaaaaaatcatttcagctaaatctgttgtatcttctttcttatacttttttcttactgaatgccatttttaaaaatgtgcaaccaacctgttctctagttttgacgaggattagtttaagtgttatcttaagaaaagtctttgccaagtctctgagaccagtgtttctggttagtgagcatatgtctgtttcaaatcaggatgtctgatctgttcaggacgtctaatctgtaagttgaggggattgcttacttacaggtacataacttgggtataaattggaagggccttctcaggttgtcctgtgaataggagaaaacatttatgattgtgtttatatattgataactgtattttgtagtttaaaaaatacacacgttaaaacaattatcatcatcaagtgactgcatagttattgccttgctggttctgtgtaattaaattgcaagttttttcattttttgtgggaatccttggagacatgggcctgtgctgagcagatattcccatgcacagaagagggcagaatggggccccttggcatcaccccctttccccctttaggcagtttctctttatcaaagtggcaccaagagaggcccaattggaactatgatatgtggaacatgtttcttaatctctgttacaatcgaaatcacttaagggcatgtaatctttctcttttcatgaaaagaattctgtaagaaagcagttctttaggaatgatgacccactgtgagcttgatataacttctgtgattgattatttgtttatacaaagatagttgataatttagtgatttgtttaaaaaaatgttaagctaacaaaatcccgtgaattcctccccactagtcataaatcaatcatcttataattttagggactttgaatccaaagcaaaccatcttggtgattctggtgggactcctgtgaagacccggaggcattcctggaggcagcagatattcctccgagtagccaccccgcagaaggcgtgcgattcttccagcagatatgaaggtaaggccggtacctgaaatgaaacctcaaagagagcacgctgacagaggaccctgggagccccatcatattggtaagaaagcagagcgccgtcctcttcagtattggcaggtctgaggcaatcacaaaggtaactagggagggaatttagaggttaccctccatttcttagggaaggaatttaaagctaatttagggtaacctctccataaacaggagcagagctctgatgtttagagtggtcacagtgttaaccagcggtgaatccagacaggtctgcggcaacctcacttcttgcctcctaggacataaggcaaaaggagagactgaggcaagttttagagcagcagtgaaagtttattaaaaacttcagagcaggaatgaaaggacgtcaagtacactttgaaggtggttaggcgggcaacttgagagatgaagtgtgagatttggccttttgacctggggttttatatgctgccatacttccggggtcttgcgttccttcttctctgattcttcccttggggtgggctgtccgcatgtgcattggcgtgctagcacacgggggttgtgggggagcgtgcgcagggtgtttactggagttgtaggcgtgctcacttgaggcgttcttccctgtccagtctagcattcctagaggaacgtcatgcaccaggtaaattccgccatgttgcctcttaatgcgcatgcttgagcccactcgcccagctcccgagatcttattgggaagctgcagctccccagttttaggtgttttctatctactgggagcccgcccttccttggtgcccgctgtgaccaacgatcactttagagaaacagttgacaactgcctgaccaacacctgatggtcgcctgacattgctggtgcatatctggaaagggccctctcctgccgtcctcatgtctgacgagctacccgctgtaaccaaagcgtgggcttcggagtctgctttcaaatcccagcttttccccttaggagctgtgaactagaataaactgtctaaagttaccacctataacctgggattaattatgcctgttgccacactgatagagacaaggcagcatgatatcattactgatacattttttttaaagcattcaaaattcatagtactggaaagaaaatcagtgatgcgaatgtttccagggtaatgtcacctcccatgctgtggaagtccttcgggtgagcctggccccttgcttcttttgccccagcctttctatgtgggggcaccatggagctgccactcaccagcaccttttttccctcaagtagtttgtacctataaagtattcctgccgtgggtggcccctcggtggagctgctgagcctagccagggtttgatttctcttcctgccagtgtgagccagatggccacatctctcttcccctgccccgtggagaggtctgcttaccgcaaagaagggctcttcctcccaggtcctgtagcaccctgttagagggtgtggagtggagcagtgggaaccagagccaccagagggaggccctggaggaggaacgaagctgattcatgtctgaaaggggtgccagaacccaagtttcggtgtttaataaagagtgcctcggtgttgcggtggccatacctcacagggcatggtcgcttggaaatttctgctcggaaatgctttgtgcagtggccaggatgcgttaggggccacagatgactgcttgctccatcatagaacagttccaagttttcaaacgagcattcacagactgagccgcatcctgcctccctgtcctctgattcctggcttcttctctggtctctgaagccacacggaaatgtgtttgcatctgtttcctgcccttcagatgacagaggaccatggaagctgctgcctcctttagctctcttctccaggggaattgccctcgtcactgtttgggaacccctggtccgagtcctgtcctccgaagagcctctgcccctcctggagtcctgagttgaacttggtgttcacttggcctctggctctggcagtgtgttgctccttccgttgacctgccactgctctgttaatgcagattgatcttcataatctgtttctgctttaagtgattaactcaaacattcttggctcttattctatcttgtcctttgggatatgaaccattatttaaatttggactggtttcctggcttggcacagttgaccatgcctgtaagctcagtgctttgggaggccaaggcaggaggatccctggaggccaggagttcgaggccacccttggcaacatagtgagaccctgtctctacaaaaaaataaaaattagctgagcgtggtgttgtgaagctgtagtcctagctacttgggagactgaggcaggaggattacttgagcccaggagtttgagtttacagtgagctgtgatcacacccctgcactccagcctgggcaacagagtgagaccttgtctcgcggggtgggggagtcatgtctatacttgagaagtttttttccctcgcatagtttgtacctataaagtattcatcagttttgagcagtccttttgcgattgttttgagtcttgattctggtgaccagtaagttgtatatatttgcctgtcaagtggacaaacatggcctttgtgcctttaagtaatggctaaaagtaccaaacagaacagggcctggcatagatgctgctcctcctgttcctaggccgtaatcacccctgattcatcagaccccaaacaagtcagctcctctccctcctgtgccccaccacccaatctcctgcaggaagatgtctagagacccctgtcagcgctaggcagagatcaccatccatgtccacctttcctctgatgcaggctcccactagcccctctggcttgtgccatgccagccatgaactcaccctcatgccccacccgagccctggcacaggctattccctctgcctggaatgctcttcgtcagtatccccatggctccctccctccccttcccttgtatcctgactctcccatagcagctctctccctgtaacacatgttcacaggttcatctttgtcacccatctccggcagctcctgcaggcttgatggctgctaaaggcaggcaagtcagtggctcagattcttgcaaacttagtgattagtgatttctcaactccctcctcatgcctcctctgtctctataggcacatattatttcttatctcttctcagaaccaagccgcctgaatttctgaataacattgtttaagtgttctgtgtatgcaaaagaaaaacgagaataaaaggattattaaggaagaattaatataataatagccacatattatgctctttttatactctgctaagtgctttacatgaattatttcctttaattagacaatcttaagaacatcgacatttttatgaagcccattttacaggtgggtgagtggaggctgggagtggcttaaatcactttccccaaaccagggagttagtgggagccagaggcaggacctgagctcgcgggtctgagctccaaagctcattctctgaactgtgcacagcactgggctgcagccagagatgcaggacgctgcgggaccctctggaggtggtcctgcctgtgcttccctcttcccacaggaagctccctataggcatctgtgttgggcgtggactctcagtgtacctgcatgtctccctgttggccagacaccaacactgaatggaaaacatgtttctgggcattttaatgtacgtacttgccttcagtcaatctcctccgcccccttccatcctgaccgcctccctaatagttagcagtgggactggagcttgaatggcaactgatttctgtctgagaggacaaatcaggcatctttgtcctctgccactgtctgttccccatccttaggatgcacgatgccagagccctccactgtggtctgtgaccactttgacccacactagcaggtctccatatgttccttccagctgagagacatcacatccaaagacagtttagagctctgaggtttctttccccagaggtccctgctttgtgcaaactgtctccagccaagcgtgcacaagactctgttcctgatttgcctgggcggctgagccatgggcagctgagcctgcagccgctggactcactgcattcccactctgactttggcatgaaagacacacaagtgtgcttgtgagaaatagatcttaacagtaccttttaacacctatttcaggtgctcaaaatgactgcctgttttacatttatattctggcagtgcaaacttcaattggacaggaaatcttacaacctctcttccaggtgaaaaagcgaggcagggatgtttatacagttccatccatgtcatcccacttggaagatactagtaaaacacaccaacagtaatacaaaaaccatggtgtttgcaatagtgataatgttactagtgaaggaaaaatagaaactttctgtaatttggagattctaatttttataggtgggctaaaaaaaaaacctggagagaagggtgttaagtgagtaaggagtgtgtctctaactaaatatagtgtaaaaagagaagaaaatacaaagtcaggcacagtggatagaggtggatagtctaatctctaatagtataatgggcaaaattgtctcaaacaaaattagtctgcctcttgtttactcagggatgtgtgactgttttctatgcacaaaatccccatgaaataattaagttgcaagaatctgaactttatattttggaaacctatctgaggtaggtaggaagttaatttatatttagaaatttgcttgcatatgtctagtagctccaggacaaatattcccaaatcccagactatttttttttctttttaaattcaacagtgaccagttggtctcttgtaagaattacagccttaagttagcaaagtctaagagggctggttttaatcctgaacctcagagggtccctgcttctcaaatactaagtaggtcacgtgcacagcaggtactacattgaagggaaattgtatgataaataggaaatcagcgatttttacttggagacttggcaaggcaaatgtttttgtaataaaaatagatcgtgaaatagaatcctgaaagctgcctgtttaaatgtaaagcaaatggctttagtgatgctttaagtgtggcagtcacttctggctgccgcagaaactgtagaaagtgcattctctcttcttggtgctgtgggttcttagggtgaatgccttgtgtgacgctgagtatgtggaaggaccattcattcttggtaactatacactaggcagagggtggcgttagcgaagctactgcaggttgggtgtgtttaagatttggatttatttttcttttaatttttatttttagttccagggtacatgtgcaggatgtgcaggtttgttacatggttaaacgtgtgccatggtggtttgctgtacctatcaacccatcacctaggtattaagtccagcatgtggttatttttcgtaatgctctccctgctccctgccgccccccaacaggctccagtgtttgttgttccctttcctatgtccatgtgttctcatgattcagctcccatctatgagcaaaaacatgtggtgtttggttttctgttcctgcgttagtttgctgaggataatggctttcagcttcatccatgtccctgcaaaggacatggtctcattcatttttatggctgcatagtagtccatggtgtatatgtaccacattttctttatctagtctatcattgatgggcatttgggttgattccatgtctttgctattgtgaatagtgctgcagtgaacatatgcatgcatgtatctttgtaacagagtggtttatattcctttggttatgtacccaggaatgggattgctgggtcaaatggtatttctagttctagatctttgaggaattgccacaccatcttctacaatgtttgaactaatttacattctcaccaacagtgtaaaagcattcttacttctccgcaacctcaccagcatctgttgtttcttgactttttaataatcaccgttctgactggtgtgagacagtatctccttgtggttttgatttgcatttctctaatgatcagtgatgttgagctttttttcatgtttgttggctgtatgaatatcttcttttgagaagtgtctgttcatgagagagacatatttgctcctctgagtaaagggtaaggatgcttacgtctgtgtgacagccttctctctttttcagaacctcactgtggatcgccatcgttggcctgtactgaaggtaaagcagatagaggcagtctcatctgtcagatgaagacctcatacacctgttgattaagaggctttcttcagatcatggtttagagcggtgttttacaaacttgatgtgcttggagtcttctggaaatcttgttaaaaggcagactctgttgcagtaggtccgggtgggttctgaagttctaacaagctccccagtgaggctgatgtttcaggtccactgtgaggaggcagggcttagaataaacaaccgtgggaaatccagtccagatctttgatgcatcctaggttaggcctgtctgtcaggctgccctgggtctctagtgatggactccaggagtctctcaagtctcaaataagtctgagtcatcagggatattttttgagaagagttgtgctgtctgaagaagcaaagagtgagtgtgatggggaaaatgcagtgattaaaaacatggtaaggtttaaagaaagatttgaccatatgccaggtgaacccaaatgtatggtgctttgcgtctttcctgccctttggttttccagggaggcaaggccttatctcttatggagcacaggagacacagtgtgggcgtttgttttctcagccgtgggctctaacctaattgtcaagcctacaaaaaaaaaatgctgaaaatcaacttctgactagatatctggtagtacataatctccataattttctctctgggtgtattatgcaaaagataatcctttgttattaagaaacaatttttaaggcaactcccaactttgaaacggggaaaaatcattttatttacctctatgtgctagggaacaatattaaatttagttttatacttttcctttaagcatttcagattatattgtgcatttcaccaacaatagaagctttcagactttatatgtcttgtaaaaaaaagcctaatatagataagaataatttattgatttgaaacccattgtataagaaatagtccagtgaaacttaagttcaaagttttttttgtcttgtggatgtagctatgtcaatatgcctagtttatagtaacattaagtctagtggattagatattagatatcaattgagatgtaagcagtaataaacagtaatgcctaaactgaagtatataatctgaatctttatgatgaccaatttatattattgtgaaaaacttaggaactgatttgaaacatgatttacatgttttacatgaaacatgatttacatgtgtcatatatagttttcaataatttacgtaccagcaggaaattttagtggataagtggaataaactgcaggtgaaactttgctggaaaatacaagcatagtgacatctgtgcaccaaaagcacctggggagattttttaaaacatgggccagacatgccttcctggctgtctccctcactgtcagtgagtgtggggatggggtctgggcctgaattctttctttttagactcctcaggattctgattgctgccacgttgagagggttgacctcaattcggacctcagagggtgacttgagaaactgtcaccacttggtggcagtgttgctccccgcatcttgattgcccttgtttctttccaatcccggaaaagtgtgcttgtttttttttttttccctgcgtgtttttgtttttgatcttgctataatatttatattccttgctcatttgcaacttatttgaatggagagctactttctgaaatctagatgtttttctttttctacagggttttagggcatgggcaaaacacggaagaaaaaagttgtcttcagttggcagagacgtggatttttaagattgttcttaatttactttctgtataactttgcttttctgtggtgaacaaagaccaggttcaagataaaatattgcaagccaagaatctgattgttcatggatttctatggttaaagatacttgatcacctccccatccgccccctaccccacccaccctgcgccgcccccacaccccattgtgcttcttggcttgtcatttcaaaagtcaaggaagtcacagtgaatggcaagattttacctcgacttgctatttttgtgcctgttaacaattgtgagttaacactgactgagcttttcctagtgaacctccggcgtttaaacagccagtccataacactgtgtgagggctggagctaaggttattggtgacacaagatagcacctgagccagtgctgcttggtaggagggctgaggggaagagggctgagggcttggatgctgagatgctagagtcacatcgcctggatttgaatccctgccctcctgttctgataccagctgacccatgacgatgctacagcacctgacagcagattcctccttagggctggtctaactctagagtgtgtgcctgtgtgcctgcaggagaatgtccaaagtgggtgatcttgatctgttaacctttgaattttaacctataccagggagccattgaagagtttaaagcaagtgaatgacgagtagtttgaaaatatttccaggtggatagaatttgtggacatacatgaacatgagcagcctcaaaatcagggctgggactagagtgaggccagcacgtgtccagggtgcaaaatgtaaggaggcattcactttcagggcctggcaggtgtggaccctgaacttccaggaccttgagagtgagtgtctcctaaggattacaccctgggggcctatttgcctcatcctggtccctggtcctctgtgtaccctattgcctgcttcagtaaacaggcagccctgcaagggaaggaagggttggatcagctctgaggagggagtttttttagaaggatagatttgttttgtttaaaaaacagctttattgagatataattcacatcctatacagtttgttcatttaaaatgtacaattcaatgttgtgaggttattttttggtatatccacagagttgtgtgaccatgaccacaatctaattttttttatttttttttttttgagacggagtattgctctgtcgcccaggctggagtgcagtggtgcgatctcggctcattgcaacctctgcctcctgggttcaagtgattctcatgcctcagcgacctgagtagctgggattacaggcatgccccaccaagcctggctaatttttatatgtttactagagacggggtttcaccatgttggccagactggtctacaactcatggcctcaagtgatccttctgcctcagcctcccaaagtgttgggattacaggcgtgagcccgacccaccgcagtctaattttgaaacattttttgtccccctagaaaaaaacctgtagttgtcacttgccaatctactgccgtccacctctaaccatagacagcccctaatctactttctgtctctatagatttgcctattctgaacacttcatctaagtgcaatcatataatatgtggtcttttgtgtctggcttctttgatttaacatgttttcaaaattcattatgtcataatacataccagtaatccattcttttttaatgacttattaatattccgttgtatagagacatcacatatggtttatcctttaccagtcgagaggcatttggattgtttgcacttttggctgttacggataataccgctgtgaacattgatgtatgtgtttttgtgtgttgaatgtgagctggtgtggaaactcctcctccaggggggccttacctgtgattctacccacggggatggttaagccagcagggatgggaagggtttggtcctgctggccctaggctttcctgcaggctgccatgtgcctttcttctgcctaggctgaaacggaggctgccctggtttctggcactgccctcatgagtgtgtgggaaggctgggggaagccaagtctccatggtgcctccatcagggaccctgcagctgggaggcagccagagggccacaggttggtagcattcacacagagctacatttctttttttttttttttttgagacaatcttgctctgtcgcccaggctggagtgcagtggtgcgatctccgctcactgccacctccacctcccaggttcaaggaattctcctgcctcagcctcccaagtagctgggactacaggcgtgcgctgccatgcccggctaattttttgtgtttttagtagagacggggtttcaccacgttgaccaggatggtcttcatctcccgacctcgcgattcacctgcctcggcctcccaaaaagtgctgggattacaggcgtgagccaccatgcccagcctacatttcttttttttttttctttgagatggagtcttgctctgtcacccaggctggagtgcaggggcaccatctctgctcactgcaacctccgcctcctgagttcaagtgattctcctgcctcagcctccggagtagctgggattacaggcaactgccaccacacctggctaatttttttatttttattttttaatagagacggagtttttccatgttgaccaggctggtctcgaactcctgacctcaagtggcctcaagaggccaatccgccttggcctccccaagtgctgggattataggtgtgagccactgcacccacccagcccgtagctacatttctgtcagctgtttgcaaactgtgccccagaatcccctggaggacttgtagaaccaccagttactgggttacgcccccaaatgtctgatgctggagatgaattatcttgggtggagccctcaagccgcagcagctgataagcatggggacctcctattctgataaaaattccaaaaaagtcctgagtgattaataaacagcacattgaaaattagaaatgagttctatggcaggggatgaaacaggcaacaaagcctattttctttgcaatgaagcgcatcagatattaataatagccattgtaattatctttatcatgtattaagcattttgtgtttttcacttttacacaattagatgatccccataggtattaccgcctttttttttttttttttttgagacagagtcttgctctatcccccaggctggagtgcagtggcacaatcttggctcactgcaacctctacctcccaggttcaagctattctcatgcttcaccctccttagtagctgggattacaggcgcctgccaccagacccagctaattttttgtatcttttttagtagagacagggtttcgccatgttgggcaggctggtctcgaactcctgacctcaggtgatccgcccacctcggcctcccaaagtgctgggattataggcgtgggtcaccacaactggacttactgcccatcttttaagagatgaggacagaaagattgagtgacacagttatgtctcctgcagctcttggttcacatagccaggattcgtatcaatctatttagctctaaatctagtctcttaatcacagtaatgaaccgttgacagttttacgagtaaattatcaagagttttgataggtttgctcacttaaattagtgcttgtacagtaatgggctgtgttagtgtgaaggaatgtatcttatgttggaagtactctagaattaaatgttaactcttgctaataaagcatacatttggggcattattagcaactttttttttttttttttagcaaaattagaggcttcctagttgagtggtttatgttatttatatttatttatttgtttgtttgtgacagggtcttgctctgtcacccaggctggagtacagtaagtagcacaatcatagctcactgcagcctcgacctcttgggctcaagcagtcccctgcctcagcctcctaagtgcctgggaccacaggtgcgcatcaccacgccctgctaaatgtttacagtttttgtagagacagggtctcaccatgttgcccaggctggtcttgaactcttgaattaaagcaatcctcttgcttcagactcccaacatgctgggattacaggttgtgccactgcgccaggcctccatgtatttgaatgaaagagcagacatctcctggaggtggcaaagctatgcatgccccccctggaggggagctgggggctctggggttacagtgatggcacattcagggagctctccgctttgtgagatcctgagataaagccaaaggatgcattaaactgcttctaaatgaactttttccaagtgaatttgttatatcacttctatataaatgaaaatatttgcagcatgagtactaacaagattttttttttcttttaccccgatggagtctcgctctgtcgccgggctggagtgcagtggtgcaatcttggctcactgcaacctccgcctcctgggttcaagcgattctcctgcctcagcctcccgagtagctgggattacaggtgcgcaccaccacgcccagctaatttttgtatttttagtaaagatggggtttcaccatgttaaccaggatggtctctatctcttgactttgtgatctgcccgcctcggcctcccaaagtgctgggattacaggtgtgagccacgctcccggccaagattttaaacattatttaccaaagtaggaacgtggtaattatggtcttatataattctgaaaatgatttctagtaccaaactatgaattttatacttgaaagaatgatgggtttttcacagaaagttgaagttattatggtttgtttcctgttcaggtgtttttgctggagaatgttcgatgaacagcagttctggtgataagttatggatgtacacagctggtgtggtttttaggattttattttgcagcagcatcttcctcaaacagttgccaggggaaggctttccttcttcttactggtaccagcctttctcttgcagacaaggcagtatgggagggttgggagacaaaacagaagctgttggtttcttcagcctggcaaggattcagattgcaggttgtagattggaggccgtcagtggggatacctttccggacaaagtggtgtttctgcctggcactgcttgccagagaagtttcagttcttcattctccgtcagagaaacccatatggaccacattctgatagttttcttctgtttccctaacaccgaaggctcagcccctggtgcaggtcccagtgtacagcaggctgcatacagttagaccagatgttcttgtagtacgaaaagtcaccgagtttccattcacttgtgggtggcaggtatggccctccttacctcccatggcccaggtttctctgtcctgccgttttcacattttccaggctttcacctccaggtaccaaaattcacatcatttagagattgtgtctgcctgccaatacgcggatgtaccagtgagggattgttctcgcctgacgagaggtctggatgatgagagagcagagctggccctggggctcagtggtgacaccctcgagcttggctgcttctgttcttctgcttcctctgcttggattccttcgcctttggcttcccctccagttccaagcagaacaaaacaggagatatcaaggaggaaagggtgacccctctatatctggagagcaaaactgtcgcggaaatccctagtgtacttccatttgtgtctcattatctgaaaccgagttacctggctggtcacgtgcagccaccagaggcaggaaggtagtgattctgcctgtgtggaatgttctagcattccctggtagcttttgtttcttcaggcagccatgactttgcatagatcatttccttttgcccaggacactcctgctcgttttctcccctcctcaccaaacccacagtgcattaacagcgacagacttctcctcatcctctcaggccacttggatgtcaccatttcttctctttacccctcaggcgtagtcagcctctctgtgcctgatgttttatggctttgtgtatgccccgatggagagcgtcttactgtgtcttcgggttatttatctcaacctcgcatctgtgctatcctgtacagtaaccaacagccacatatcactatttaaaattaaatacaaactaattatacttaaatgtaataaaaatgtagcccctcacattagcctcatttcaagagccacatgtggctaccgtattgtaagcagagctcaagaacattcagcaatattgtgagagtggctaccatattgagagcagagctctagaacattcccttatcccagaaagttctcttggacatgctgctcaaggtggtgaactctgagatctccagtccccccagctccgtcactcagaaccacaaatgtggcaccatcagccttcagggtggtgcttgtgttgtactgtctcctgactaaagaagtaaacttcaggcagtcaagtttttctacaacccacactgctcctaaaactagtgttactggatatgtaaaagctattgagcccagtgctttcaaggaatcctaaaagcaagtggggactgtcatgtatccaggttccttgttttgcagaagaagaaatagaggctttaggggaaaggggtccactcaaggtcatacaggcaaggtcatacagtcagtggtagaatggactggaatcttgattgttcatctcactcccctttccattaagccataactgattgagtatcaccaacctgtttgttttccctgattatgttcccttctcacctgtttaatcaggtttcagctcctagtgagaggaagttgttttcagcttcttagccccctacctgtaggcggtgctctgggaacgctcaggaagcagatgcatgtgagcctgtctcagccaatgattgcttagttgcaagaaacaaaaaaatgactcaaactagcttaatcaaaaggaggcttttaaacagcaagataagggtaaaggctgggaactaggaagttgtcaggaaccaaggctgtctctctggatctctctttgaggccatgtaatttttttttcctctcggtctctttattctgcacaccagctcacccagcttgcttgttactatatgcagtcatgccaacccccagatctgtatgacctgttagcctcaggggcacccacgtagctggctgccaatctgtgttttcttccaggtttcgagagggagaaatgattggcccagctcagggtcacttacccagggagaggtgggggaagtatggaggcaccgtggtatcagggaacccctgggccaggcttgtccaacccgcggcctgctttctttcattttttctgttttttgttttgtttttttacagctcatcagctattgttagtgtattttatgtgtggcccaagacaattcttcttctgctgtggctcagggaagccaaaagattggccacccctgtcctaggccattatctgggctgtgggaggtgtggagcagggtcagagctggagggggagggcatagcctccagccaccataagttggtgtgttcttggtaattatattgcttgtcaaccgaaggcagaatcaggacaatgaaagtaatgagaatccctagctttgtaacagttagtggttatctaaaagtaggtgaaattgtacatgagtgagtggcatgaatttcttattactaaagtgctcagatagctggctaactttctgtcaaagatccctctgctaggatcaacatttgattaatatattcatcctgtaataagaatttgggattcttaaagcaaaatagttgtcatgtggctgactacacaaccaaagatggtccaggtgtcgctggaagaggagagactgaagagctgttgccaggttcccacgtggaccttcggcatgacccggccatggggaggcctcacacgctcctgcatcgcccacatcttgccaagccatggaaaacacttgggattcatatctaaatcctagtttaagcttggtgaggacagtggcctggtgcagagtttgggtcatagatggtgcttggtttcttttgtataaaggggtatatgattttggaatatttaccaaatgtgggcattttttctataaaaattattgtatctactgagattatagtatgtaaaaaaaacatacacatggagaaagaatacaaagagagcattgatattctacagaagtggcaagaagatgtggtgataggtgatatttttgccttttgtttcaattttgtattgtagtgacttttttggtagaaaaaactaatttctaattaagggagaaacatttgaagtacatttagtctttctagaaaacctcatcttctcatagaagtttaagatggagacatacttccattgtgaatcatgatgctaaccagtattcagatttgttggaaatggactcagttttaaaattgcttctctcttgtgggctggaactgcaaatgattgtttggggatttttccccttttcttctatggagttattcaacttggcatgaccagtgatttgagctgagaacatggaacccttgatttgcagaaatcaagcccccaaaggtacagatacagtggtcattgtctgaagggtttcttttgttcttggccctcctgtccctgctcttactgtggcagctgcagctgcaggtgcctctgaagccttgccatccatggtcacttcctgcctgctccccacccacccctgggaaagagcccccaagtgtccaaaagcactgtgttgcctaatgcttgttgagagtctacatttctctagatctagcagaagtaaaatttcagtttgttatatttatagtttcaggaatagtttgggaatggatttaataaaaaatttaaaagcccatcatttttatatctctttttcgatatttgatggtttaaaagacatcaaagttatcttctcccattactcatcctatacaattaaaacctgttttttgaagttgtaataggtaagttagccttaggtcaccccatatttatgtaaactccagcccactgccacagctactttgattgtgatctgtcattgtgttacccactgtagggcagaaatggttcctgcctcatgccgttgctgctttactcttcctgaagtggtgtggttctgtctctgtagtccttggcacactgtaggttctcagatggcagggtgaaaagttcttctgtttgcttaaatctctcataataccctgagtctgtggagctcaataaattctacttggtattattgatagattatttggagccttttatgttagaaaagggattcttaatccaatgctccattttacagatgagaagactgaggctcaaagaccatacccccaggagccatgatttgcactgtatttaggaatagtgtctagggtcagcacctggtgttggccgactgcagagcagcctggttaggagccctggggttgggcgggtctgggctgctggtgccacagcagtctccctcccctgggactttgggcctgctacccacccctgttccttcctttgtgagatagggctagcagtaactgtcttgtttcatcagaggcagtattgcataatgaatgagagctggggcctaaattaggcacaagtgcaagccctcagaaaactatgtacacctagagagagagagagacacacgtctgtatgacagagaggcagggtttgggaatgttctgatttcatgttttgaattggtgtgacctttgggaggatatccttggaatcgcagagcttcgtttacatcatgactttcctgcccacccacattttctgagaggccagagttttaaatgtggaccccgtgagcttttctctgttgcctcattttggcctgtggccttttgttttcttggtatgtcatgaggcaaaataaaatgaaactcagtgctggttaataactcccatcataatgtatatttctgtgaatggctttttagccatttgagaggaaaaagggtcatgtaaatttcagaaaggcctgattggctggagagtcagtgtagtgtcacagttaagagtatagatttaaaaaaaattttttattgtggtaaaaaacataaacataatactaccatctaaaccatatttaagtataaagttcagtagtgttaagtatattcacattgttgtgcaatggatctgcagaatttttcatcttgttaaactgaaactctatgcccaataaacaactcctatttcccctctcccagcccctggcaaccaccattctactttctgtttctctgagtttgactactgtagataactcatttaagtagagtcatatggtatttgtcttcttatttctggtttatttcgcttagcataatgtcctcaaggttcattcacgttgtagcatatgacaggatttctctcttttttttccgccttttttttgagttatattctgttgtatgtatatttaacattttcttcattcatctgttgacattcatctgcttccaccttccaccttttggctattgtgaagactgcagctatgaacatgggtgtgcaaatgtctcttcaagatcctgctttcagttctttcggatatgtacccagaagtgggtttgctggatcgatcatagtgtagttctgtgagtaaccctcatactgttttctgcagctgctgtaccattttacattcccaccaacagtgcccaagggctccagttcctctacaccctcacccacacttgtaatcttctggattgcagattttctggatcaatcttctggattacacttgattttctgtgttgggcctggatgtttagaacagtatccctcctttggagtggtaaatatgtaagtttttattataaaataatggccatcctagtgagcgtgaggtaatatctcattgtggttttgatttccttcatagttaatgtggttgggcatcatttcatgtcctggtcggccatttatgtttcatatttggggaaatgtcttttcaagtctcaagtcctttgcccattttttaattgagttatttgattttctactgttgagtatggattattaaatcagactggcctgaacttaaatcatggcccttccatttttgaccaaaagcagctgtgtgtcccatttgtgccttggtttcttcggtgtaatgccggcataatgatagccccaccttgtagttaagagtgttggggcagtcagtgaggaagcactcactccacaggagcttgttacgtaaggagaaggcagccggtccattcctaataggggtctgaaggaaggaagaagggctgaaggaagtaaaaagagcctcctccatgaatggcagccattcttgaaatccaccttggctgccttcatttttaatgtcagtggacttttaagacaaccaaaaggatgttcttggatgaccagagactgtggcagagggaggatggtcacattgccaaggatctctctcaacctcttggatagtgtgctgctggtagtttgcacaattgcttcagctttttggcaaagtacatgtaaaatcctgaagtcactgccagaggaaacctggttcctgagatagcagcttgatgctcctgccccatcccaggtgcacacctcactgggcagctctggctctgaattgagggacagcaaaaacctctaaccaaccatactgaaaagcaggcattgggggctttaggggaaggttcttttcaaaactcatgatggggagagaccaaagactgggaatcattgtaaagaagttagtcatagatgcttcactctttacaatcatcccaacacaaggttaaacaacatgcagttttcacgatgtcccagaaagcgacgagtgcagtgaggtgaaacgtggccatctgagcacacaatgaccaggcttggaaggatcgatttcccctgtgctggccctcagaatttaaggcacaacttttaagctgagtgtgcagcactcgattttctatgttgggcctggatgtttagaaaagtatctctccttcagagtggtaaatatgcaaattttttactgaattacttcatttaatcaaagcagccgacttctcctgcctcccctgtttctgtcttggggttgaatatttggtcccatgtaacaactcttgattcttaatgatgccacatggaagctgtgtgtgctgggatttgccatattcagttatggtcagtagagactttcttagtctctctctctttttttttttttttgagacaaattcttgctctgtcacccaggctggagtgcagtggcccaatcttggctcgctgcaacctctgcctccgggttcaaatgattctcctgcctcagcctcccgagtagctgggattgcaggcacgcgccaccatacttggctaatttttgtatttttagtagagacagggttttgccatgttgtccagactagtcttgaactcctgacctcgtcatccgcctgccttggtctcccaaagtgctgggattacaggcgtgagccaccgcgcctggccacagtcagtagagacttttgaaaggaaatattacctctttaatgatgtttttagtccaagtaaattgtggtaatgtttaagaaatttgcttaccacaaaaacagttttcaaggagcatttgaacttgtccactttaagtcataaaatggattaaagtgtttgaaatctattgggattgtaaatttatgtcagtgtactgactttcaagagatcttgatgatcatgtcgtctgttttcattttctactacatgagaacattgaagcctgaaacttaacacaaacccgagttccccacttgcctaagagtcatggatacctaaaaagtatgctacttcccaagttgatttctttcaggatatgggcccttcaaaggaaagcagtgaggctggggttttccaggtggaaaggtcacatttccacatataactcagcgaacattgtgttgggttgggagaagaattggttcactattttaaactttttgtttcatcttgaggacttccccatcccctctcctccgcaaagcacaaaagtatttcctaatttttaagtcatgggcttcctttaatggattctgaactcagatcacgtccagataagcattgtgtaatgggatgggtggggttagatattttagtcacagatgcatgagaggagggagggtggaggacagcaaagtttataactggagcctatagtagtttatctcttgtcatcggccaggtcacagagtctcacttcaggacagctgtgcaagcagaacccccatcacggttttcttgatgcctttgacagtcacctgtacatgcctctgggacctttcctcctcctttctctttttgttttttttcccttggtcacatgtttcattctactaaatgtctaaccagctcttctctgtaaattacagagctgtgatggcaccttgcttgttgattatttctggttgaatagtttccaatgggacttctctggagataagtcctgtattagtccgttctcacactgctaataaaaacatacctgagactgggtaatttataaaggaaagaggttgactcacagttcagcatggctggggagacctcaggaaacttacaatcgtggtggaaggggaagcaaacatgtccttcacatggcagcaggagagagaagtgccgagcaaaaggggggaaagccctttataaaaccatcagatctcatgagaactaactcactatcatgagaacaggatgggggaaactgcccccatgattaaattatctctgcctggtccctcccatgacatggggattatgagaactacaattcaagatgagaattggtggtgacatagccaaaccacattaaatcccaagtgcgcatgtctggccctgatccctttatgtgagactggggtcatgatcctcccgcacccgtcttctgagccctattcctacttgggcatgcttaggcacttcagcatctgcatcccattgatgtcttaagggtggttccagaccttggaggtacacacgacacactgctgatgaaaacctagaatatagaatggaagttacatttattcatagagtgaaaatccaaaaatagaccagagagaagatatgaaaatatcaagaatgcttatcttagggaggtaggattataggtaactttttttttccttagataaatatatagatagatatattagtgtttacagtttctctgccaccaaccaaaatatttttttcaggaggaaaaaaaaccccagccagccaacatacctaaaaaccatctcctgggcccgagagggaaaaattgggctccttttcttgaaattgccatttgtgccactgttgtattattttaccagtaactccagattccaggctcctgtatctgagttctctctccttccacagtggagctcataccttcctgtttcctggctgccactcagatttaggctccgtttttcagacctcagtggctgtaatagctgttccttctacctcttaggatggttctttctgtaatagcctttgtcatcacatcatcagaggatgatagctcttaatgaggatctaaaatttgcaggtaagatatccctgcctctgacatgagatagatgtattgcatgctatttaacatacaactatactgagtgtgcagttgtatgtaaaagcattgttctaggtattgggttgaaagtggatcaaatgctagacaaaggagcgtacaagtcttgtaaggaagacagctgccaagagagaagaaaggatggggaaatgctgcgtctactaagttcaaggttctgaattggaaagctgcagctattgaggagaagagtcttttaaaattcctaaagggtttttgttatcttttattgatgcaaatgctattttgtggcataaaccttaataattttggggttgaaactcttatcaggataaaatgatccttttctatcccaagcttaataaatattgtttaagtacaaattaaatatatgaaatctgcccatctatattataaatgtcatatggcagaaattataccttgacttttggttctttcacaaaaccttaattttttttttttttttttgccttcaatgaattttgtctgattttacattaaaagcctgtaatttctcaagtcttgagtctggggagccgtcgtcatccttttttcccctctcccttgtcttctggatgttcaagcgattttaattagatgttgggcttttatgtcaagtgctggcattgcactccatgataatccagggactcggaagcacatgttatgcgtcaccctgggttggtgcagtggaactggggtgggttggaagtagtattctaaatctgcttcctgcgatggggtaggtcaggttgtcctgtgttgacaaggaagaagtctgggtgaggaagcgggatgaaagcagaccagacgctagagtccactttcaagtccgatcccaggacctggcttaaagttaaagaacagcaaagatgaaaggtgccgcacagcagcacaggtcggtggccacgttaatgacatagaaagcaagtgctgtgaattcaaaagaaaggacagctctgagccagagtacttggtgactttgctcaaacaaatccctttctggcacccccaggccttccctcccgcttcaaaaaaattctgaattgtgccaatccattgaggctcagctcaaggccatcccatgcctttccatcgtaataaagccttgtttcctgggctttaaacatattccttttttcttaggtacagattgaacttttttaaaagggaagttgtcagaggctctgtaaaacgttaaatcaaacctgctttgttttagggatggggtagcttggaatcagatttgctcctgctatggactgaacatttgtgtccccccaaaattcctatgttgaagccctaatgcacagtgttatggtgtttgaagggaggcccttgggaggtgattaagtttagatgagattgtgtgagtgaagccctcatgaatgggattactgtcatcccaaaaagaggtagagaccccagagcttcctctctcttcaccctgtgaggatacagcaagaaggaagctctctgcaagtcaggaagagagagggctctcactagaatacacttgtactgccaccctgatcttggacttcccctccagaactgtgagaaacaaatgtgtgttgtttaagccacccagtccctatgattttattagagcagcccgagctccattctccactccctggcttcctgcatggactttgcaaccagagcttcacggggtatagtttaatagctgtttctctgtaacatagccacttttctctttccaggtctagttttgaccctcataacactttgttaggggagatttgagggtgaggaagttggcttgcttttcttttcaccatgtctcagtagaaacagaagcagaaaggccctgagatactgagcccacctttctcagcagggtgtgacagcccggagtaccctgggctgaggaggccagggctggaggggaggctcccacggtggaggggttgaaagctgggttgtaatgagctgcttttctgtagatgcctaaatgatgtgggttgagaaatcgtgatcttagcttttagtagtatatttttctgtttatgttaggtgagtcatcagtctgtctctgactatgttcagatctggaagttttctggaaggaaatttgttattgctgtaatagtgtaggttgttgatctggattagcagggagcggccccttaatacattcttaagaaaatggtatttagttcagtctttggctttgaactttgcctttgacaaagatgaaagtgcgacttgactggtgtttgaaaaacatggtgatatggccaggtgtggtggctcatgcctgtatcccagcacgttgggaggccgaggcgggcagatcacctgagatcaggagttcgacacctgacttggtcaacgtggtgaaacctcatctctacttaaaatacaaaaaaattagccaggtgtggtggtgtgcacccataattgcagctacttgggaggctgaggcaagggaatcacttgaaccctggaaggcggaggttgcaatgagccaagattgtgccattgcagtccagcctgggcaacaagagcgagactccatctcaaaaaaaaaaaagcaagttatattacattttaaaactctatttaatggtcaggtcatccatccataatgggtagagtcattgcttaattaatttaaaacaatgtatttaaaaggtacctttgttccctagtgtcacataacgtgaaatatccaattaaggtaactgtaatgtaaagtaagtggctaaaaaagtgctgaacgccaaaggccagagattcaaccttttgtgtgcattagaatttcccaattgttcaaatccaggttgctggatctaccccagagtttttgatccagtaggtttggggtgggaccaagaatttgcatttctaacaagctcccaggtggtgttgaggctgaagctcgtgtggggaccacattttgagaacttctcccgtagactgaactcatggtctaggttctgtcagctgtgacccctgtgctgctggagggagtggtcagatgtcctgacctctgtgcccacagtgaggtccaagctgagtaggtttgaccagcagctgtaatcacagagtgaacaatgtaaacgaccaatgttgggtggtctgacatcttttaaaaaaatccacgtggatgagatcacagggttaagtgtgggcagcagtcagggtaactccatgtggttactgcccatgcactctctgctgtttttcacctcttcttcagagtgtggtcaggatggtggccttgcccagcacaggaggcccttttccttctgaccacctgacctgacccacctcttagcatctgcaggcactccctgtcccttcgctgggccccgtggggaactacttgcagtcatcaaattcatcatgctgctttcttttaattcccacacttgccaaggtgggactgccccgcatctccttcccagtcgtgtgtcagaactcagcactggacctttcccctttccccactcccacccctcctcaccccgacgaacgtctcacttgggatcatctcttctgaggttggacctgcacagccgccctctgcactctcgccaccttatgggctgcccttgaccccttggcacacagacctggaagttggcctgctcagctgtctccttaggggtggagcttggttttctttcatcactgttctgcgatgaattgaatgcatgattggtcacaggaaggtaggggagggataaacaccttatgatatgtttcttataaggttttatatgtagaaagttatatgaaagtgtcagatatctatatatgaagtatatgtgaagttttatgatagttttgcataatttaagaataaactctttaaaggagctgagtcccaatcccttgggtcgagagttgcgtggctcccggggcctgcttgtttccttccactctgcgtgttcgttgctggcccctcataggctgtcccagacctctttgacttctctcctttctgcccagtcttccctgagacgctccaggctccctggcctcctgcttctcggagcttctcttgtgtttgttttctgtgctcagggcgccatggtgctataggccacagaggaggcgtctggggtccctcggggcaggtgcagcaggaggaagccgtctccgagggcatgaccttggaactgagcattgacagaggagagtcagccagacaaagaaaggccaaaaccccacccctctcccaccctatttctacgtgaccatgggccctggacacagcaagacggtgaccccgggcctcctattgttgcgaggagcccctgggaaaatgttggcattttcttcatagaacaggtttctcttctccagtattcttcagtaaatcaactttcttttttatccccaaccccagtctgattgcgaagaagtctaagcaacagaaagattttgccaaatagattatcttttttagaacaaaatagatcatgatattaataggaattcagcacttactcttgtctaagtactgtttttaagtgctctcaaggatttttcatttaatccccacaacaaagctgtggggggtggatgctattattatcggtgatttatgaatgaggaaactgacacagaggggtggtcgaggagcttgcccatttcctggtagttagtaccagggctggcatcatcagttgcctgctccttttcctctttgcttttgtgtccattaccccaaggcattaggatgagccagccaagttctagtcctggattcaccacctaattagctctgtgtcccatgtcttgccgtggagggataaaaccaattcctagcttatccgttggtggtgaagatgaaatcagtggggtacttgtaaagcacactgcccagcacatagtaagtgcccagaaaatgtgacgtcggacctctttaagcttcagtttccacatctgggaagagagggggagttgagctaagtcattttccagtgtccctttcagctccatgttcctgtgagcactgacagtttccccacaatcctgaagaaagaaggaaaataagggcggggtggcgaaggtcgccactgtgacgtggctgctggtgggaagtccctggggaggcaaggcccagcttcccagacacagccctcaggtgctcatcctggtggcactgaccaggggccatggtgggcttttccaccccaccatgtctcataaaattacaagaaccacagttgaaaatcagtgttacagaaatggtaataggatagggcaaactgttacaaagatcagcacttaagattctggctgaggcggaatatttgtttctctttagttttgttgtctttaatcaagaactgagagccctgactttcagctcctcaaaaaatacagcttccttccccttgcagatgcaaaaacaaacgccacttctttccaagcataattttctcccatgcgttatctcctgtctacagctttttcttgatccttctccagctcctgtagacctcccatttagagccaccagccgcccatcactggggctgcgcagagctcttggtgctctgtgccctgggctcgcccacccaggcctgttctctgtgcctcttcctggttctcttccctggacttcccactgccgtgtggtcttcagtgctcctctgagctgttgtcatgacctctaaccagactgagtcaggacttttttcttcctcatctctaagtcatccttacacagccttggaagtttaccctaaatggctattttgggagggagtggggataaagatctgcaggcctcttgctcctggtccttgtttctgcttatcttggcttctgtttttaagtgtgtgtgcacctctttcctcatcacacccttcccctccgtatggctcccatctcaggcagagttaggtgctctgttctgtgtccatagctctttttcgagcccttcttctcactgtttggtagtggcctttcatgtgtgtctgatccactaggctgtgcactccctgcctgccaggatatggttaaagtgctaaagaatgtatatatgagatcacttttgcttaaaaaacccccaatcttctggaattcccaatttctaaccaattaatatgtggattgactagaccttaagcaaccaagagtcagccagccttgtcttctatattcaggcgcatactatctggtcgttagacaaaatgggtcattatcagtgatgagttaataattacctgcacatcttgtttatgctggttctttacctaaagtggctcccatcaattaaacctgtatggattttacctgttcttccagaaccaccccactttccacaaaaactgacaacaatgatggtaagaagaatggtagttgacattttattaaatgtttactgtgtgcaggcttgtttttttccacacatttacctacttaatgctcacaataatcctatgaactagtcagttttatgcagatttcgcagattaggaaactaaggtggcaagtgatcagataacctgtttgaggttgagtagctagatcatggtagagccaggttcaatcccagatacctggctccagggcccatgctcttgaccttataaacggctgaaattcatctttttttgctgaacttccagaacactttctttgtatttcccttattttggtagtcttgtacttctctgctaccctgattcatacttggatttctagcagcatgcctggcatgaggcaacaacttaacagtatttctttataccaaatgaatgttgtcttttttttttttttttttcttgagacagagtctcgctctgtcgcccaggctagagtgcagtggcactatcttggctcactgcaagctccgcctcccgggttcatgccattctcctgcctcagcctcccaagtagctgggactataggcgcctgccatggcgcccggctaattttttgtattagtagagacggggtttcaccgtgttagccaggatggtctcgatctcctgacctcatgatctgcccgcctcggcctcccaaagtgctgggattacaggtgtgagccaccatgcccggccatgaatgttgtctttaaaaaattctgttttcctctagctagactgtcatataatgcaactgtaggaaataatcaggttctctttggagtattttccataaaagatccacagaagtcatggcagggttgagagtggacttgggcaaatgaatctgttcattcattgaatattccatgcatatctgctgtttcccaggcatgggatatggcagggaacacagaaatctctgcctcctgggctctgctttctgttgtagtagaggtaaagctgctcatactttgtaaacaatatgacaacattaagtctacatggtcattttactttgtttttttctaagaaattttgagctgttcgtaacaacagacgctgcagatgttaatcccgttgttgttaacttttctccagagatttaatgttcaattttctcctttccagaatcgatttatgttgttcaaacagaggtttgagaataactggaatttttttaacttcttttttttttttcgcatggagttcagaattttcaagagggatgaagagagttataaaatgctctatggtgggtaacacacagaaaaagccagaaaattggagaataaggatctgtctactcgtttccttctagagctcctctttcttacagggcacttaacatgtgatttaatgtcgtgtctttaaaaggaggagaactgcagttcagaacttaatgtcagtgctttgtgaaagtgcaagaaagaagccctgtattctgcacttgagagagccagatactgggcagataggaggtggtgtgcacgttgctttttgtctttctcgatcatggcattgattctgttcataacaatgatgcaatgtcatcctcttccccacacatttgtgtgcagatagaaagaatgcaacagcacagagttgttggggaataatttggcatctaaaatattgacataccagcatagatcatatttatgactctgttgggagtgtcacagcaatgatttaataggaggcagttgtctccaaggcctcctgaattatgactggttttaaaattcttagaacccattggaggctattgtttctgaaaggctacataatttaagtgctccacatccgtcattataggagatgtcagaatagtaaaatctaatcctggactaagttgttatcgcagccctttggtttggtggctttgccgactttataaatatgcctgtcagtgcctgtggtctctacagttgggcagtcggcggtgaatatcatttctcacattttacactgggggactggaacccagaaggcatatgttttcccaagaggcaccaacacagttggcccatgaggtagagcagcccctccttcggctcagcctccgctgcactgagccaagccaagcttcctacactggcctctgtgcagctgtctctcagcaagaatgcaagtcggggagagaagccggatccctgggattgttctagagagtagaaacctcagagtagccctccttagaccacctaacgcattgcatcgctgcatacatgtaagggactcaatgctggtaggattggcttaggaatgatgcaagtgaaaacagtgccccggtttatcattagaacaaggttcttagctgacagttgcctcagactttgattttgttctccttgacctgccactccactcgagtccacatctctcaagactgcacacgcctgaaggaggactgattacaaaccaaagccttgtgcccagtctggatctttttgcattgttgagaaagcagcttactttctttggactgattcagcaggccaaatttagaacaaagatttttaactatctccctttataaattactgagctattttgtagccaggctactcttaatatgaacaaaaaatattatacaaatttgttgttaatcgtaaactataaaaaaatcagtaattgttaccacgtgaaatgaatttggataaaagagatacgtttttgccccttcccagggtttaggagagacgaaatggtgagattttagctctgaatcagaggttcttattagaggtggttttgttcctcctgacccctaggggatatttagcaatgcctagaggcattgatggtgggcagatgctactatgccctctgctaaacattctacagtgtataaaactgttcctcctgacaaagaatcatccagccccaaaatgtcagtagtgctgaggttgagaaaccctcctttaaactcttgggtttatttgctgacctttacagtggatcagcttttatttagttcatgtagaggtgaaattaatactagtgctcaaatatgtctttgtattctggacttggcctggatcccccgaccaaatttgggacaagctcctgccatgtgttgaggacctgaattcaggcagctaacaacagtatttgaactgtgttttcagtggtgggagtgaaggagatgagccgacgtgctagcaagcgcatagggttgcatgaggaaatagagagtaaagctgcagcgtggagccctgctattcagagtgtgcttggagaaacagcagtggaggcattactggggagcttgatggaaatgctcccctcagacttgctgaatcaaaatctttaatttagcaagatccccagtgaggcttgtgcatgtagaagttagagaagcacggggtaaactcttcttttttttactttggaggaaaatacaccttttttcttattatggctctgacccttactagctgtgtgaccttggccaagttataaaacctcactgcaccttatttgttttagctggaaaatggagatcataatatcacctgtcctatgagattgttgtaagaatcaaacaagcttatttatgccaagaacccatatggtaaaagctcaacaaactgtcactagtgataataagaaaaagatcacaaaagtagaaaacattagggagacagcttaggtcttaaatctcacagttgtcgtccccaaacaatacttgtatttttgcagatccagtttctctgaatactaaaataaaaccggagtttcataaacttctatagacagtggtccttgtcagtagcccaagtggcagagagtacatggatctggggacaaacagcctctactgttaggaatgttccatcctcctggcctgagttacacctgctcattgtgattccgaatttgaaaggaacacagtaggaattttcaagaccctgggaagaggaaggctgtggtaaacaggaaggatgagattagaagaaggagtttaggtgaggtgagcccttgttttactagtagggtttaagaatatccaagtcagctggacatggtggctcacacctgtaattctagcactttgggaggccgaggtgggcagatcacctgaggtcaggagttcgagaccagtctggccaacatggtgaaaccccgtctcaactgaaaatacagaaattagcagggcatggtggcgcatgcctgtaattccaactactcactcgggagtctgaggcaggagaatcgcttgaacttgggaggtagaggttgcagtgagccaagattgcgccaccacactcccacctgggcaacagaatgagattccgtctcaaaaaaaaaaaaaaagaaaaaaaaaaaaaaagaatatccaggtcaaccccacctaaccctcagcggggctcccttctgttgcctgggtgggtcctgggttctcttgacgcacacgagattgtgagagtgtatggaaacactgccctcgctatcaggacagcgcctgccatgccagccagaacacatcataggaattgcaaaactcttttgcaaaccagtgagagatatgcttccaatgtgaggtaaagcagaactttaatcacagctgcagtgttccacagaattccaagagccaagatggtaaaagaataaaaaaaaagaaaggaaagggctcaaattaaagacttcaagctgcagaataagattaaataaaaggattcaattgaactgcatcatattcagtaatgactaatcctaagtatacagggtttgggggtgaaaggatttgtaagtgttttgcaggaaaatattttttccatctttcattttaattagaatagatttgcattattttttcttagtttttatttttaaaatatttattgccacaaatttagaaaatacagggaaaacataaataacagtacatgtaaaccaatattttgtcccttcttttgttcaacagctatttctcaggcacctgctgggtgtcagcagctgtgctcagtgtggtgaccaaaacccttgtcaacaaggcagcaaggttctaacctggttagggcttacagttgagtagctgaaattttgatttcttttctgtgcccctagtaaagatatgatagcaaacaataagagctattttttttattgtgttcttactctgtgttgggccctgttctcagtggtttatagcctattaactcagtctctttaccaccactctgaggggaggctctgtcatacccacttgacagatcgggaagtggaagcatcaggaggttaagcaacttgttaaagatcacaaaatcaataatgacagagttttgattagaatcccagcagcctgtctccagaacctgccctattaagtgcagtgcaactgtactgcctttcataatatgtatcaaattgagatgatactttataatttcaattcttgcttttctattgaacagtacacagtaacatcctcctataatgcatataaacccccaaaagatgtagaattttaatttattcatttgtctgataggctcataatgaaataagactctataaagctgtgtaatttagatataggaaacatttggattatagtggtatgtagtgggaacaaatggtcttctgaatcaggaagacatgagttagagtatgccggtgtacctccttactcactgtatgaccttgggcaagtttctgaactttagtttcctttccaggctaatatctgccttctggacttgtcatcaggattaaatgagtctacctatataaaatgcccagcgcagtgcccagcacgtggtagaaggtctgctagtggttactgttactgctggctattaaatacattttaatcttccttcagaatacctggccagatagcacagtggttaagaatgcacatgaaagccagactgttgggttccagtcctggctcgactccttcctagctatgtgacattaggcaacttacataaactccttgttcctcagtttgcatttctttaaaactgcatagttatcatacccatgtcttagagttttgtgagtgtaaattattgtatataaagctctgagaacagtttggtacacagtaggcactgtatgaacattttctgtaattatcaataatataattattaaataacattttcagaaggagataaaaatattacaccttaaaaagcaggtatctttaaattcttcctcagctactgaagttttgcttactatttgacatatcatttgtttcacgtttgtggctcagacgtggcttatgccaatgcatattaacacaggaattttaaatttggtgatattattatattttatctgaatgaacagaatttgctgatttgacactgtgtttgaatgtgcattttttgttgaaaaatgacaattctggaatgccgtctccctttccagattattcagagctgggagagcttcccccacgatctcctttagaaccagtttgtgaagatgggccctttggccccccaccagaggaaaagaaaaggacatctcgtgagctccgagagctgtggcaaaaggctattcttcaacagatactgctgcttagaatggagaaggaaaatcagaagctccaaggttggtttgccatcttgatattgaacaggcctggtcttatcttggctctgaagttaatcacatcagacataagcatgctgtcttaaaaatacagcagcacgatagtctaatgtatacatctatctatatctgtttactttttcagagtaatattaacactgtttactttctggtgatctaatgatagtttcaccaacaatattcattattcctctatggtcactgttagtacagtgtttagaacttctgagatccaagctttaaatctaagctctaacacgctgaaaggtgcttttcattttgttttgttttcccctctgtctctctctctctctactttatcctcagccatggtctgtgcctgtgtgttaggtatgaacttttcttgtgtaagtcattaacatacgtaacttcactctgtgtgctttttcagtgatttgcaagtaatctgaaaaaaaagaattagctgagttctacctgtactgatatcaatagtgtcaaaatatgacatgaactttgaaagtttagattttgttcatttcctgtttccatgctgacactggaaccaattaatgttatcttcaaagtagcttaagatgcaaagtttacatactctttggaaagagcatgagtcttagggtatctagagaactgcccggtgataaagtagtgaagattttgagcaggaagtctgcataatctctttcaaagggaagatgtagcagatggttcagtcaccctgccattgccccagaacaattttggaattacagtacatttcattcagcatcattcttgattgcaaattttgatcttttaaaatgaccttgatgcttgtatagagctaaaaagtcattaagacaccaactctgaggaataagctcctgagaatgtgttgcatctgtgagtttcagttgcatagctagtgtcatagcgagtggatagacgttctctgtgcatgtccctacaatgcttgtgagttatgacaacactgtgtacgagcaacatagtttctgcagttgaaaagtacgaattcatagaatgtaaagagatagtgtctatatcttttgactgaaaacagaaaatgagatataaaggaataagacctttcgacatgaaagtaaccccacagttggaataggctagtaagctttccaacatgcagttttgaagctgagaaagacgggtcctctcatcagggtgctgtggaagatgatagcacactggggggcgtttagagcaggtgagtgctgttttcttccaacccagtttttctgccactttcttatgtttttgtgaaggtaattttaaaagcagatgtctaaaagatgtttggtagtgatggcattactgcatgtgtcatcagttaaatgacagctcgggagcacagcagttatgttcgtgtgtatcttgggatttttgttgaagaggaaaaaggcagttatgttcatcatgtaggtcaaactttaatgccaatactggccaatattcttgcaaatgacagccatgtaaaatcagggcatagctataaaatgggaacggtgctcacagctggcttctttgtggtgaggacagctataattggtgaggcaaaaccagtgtgccacaaaagcagaatacattctgctgtgcaagcaatgaccagacagactagaatgaaaaggcaagagtttcctaaggttacctggaaccccttgccaggtgttgcattaagtttactggcccttgccaacattcttctaatgcttcctcatttcatctggcttcttggcagtgttcagtttttgtggtcttttatttttactgtttgacttcatttctcttcttagctctgtaaagttccacatgtgtttatctttgtggtgaaaacacaataaacttgcttaatataatgttggaagtattaatccattgtattagtgtgtacaggacctggattgctgataaaaaaataactagcaataacagcctgattgcttaaaaatatttagtaagttttgtcggggtggattggggcagggcagaacttttacattaaatatagatgcaagatttgataagaatcagccagagtgtacagtaagtattcacttaatgttgccaataggttcatggaaactgcgaatttaagcaaaatgatgtataatgaaacaaattttactaagggtttattgataaaaacaagagttaagttcctatggcatatttctgggcacaaaaacatcaccaaacttctaaataaagacccaagacacttctaatattaaatattgatgtaaacgtgagatatgcaaacatttaagcaagattaatacaaatatgataattattggcttggcacagtggctcactcctgtaatcccagcactttgggaggctgagacagggagatcacctgaggtcaggggttcgagaccagcctggccaatgtggtgaaaccctgtctctactataattacaaaaaaaaattagccaggtgtggttgtgcacacctgtaatcccagctacttggaagagtgaggcaggagaatcgcttgaacccaggagacgaaggttgcagtgagccaagatggtgccactgcactccagcctgggcaacacagtgagactccatcttaaaaaaaaaaaaaaaaagaaagaagtaattatttttccacttattccacttcagggtctcagggggccagaacctatccctacagcttgggatgcaaggcaggaaccagccctggaccgaatgccattccatcttggggtgactcacacacacactcagactgggaccatgtagacatactgattaacctaatgtgcacatctttgagatgtgggaggaaactggagcacttggagaaaacccacacagacatgaagagaacacaaactccacacagataatggccccgggctaagaatccatttttttcttgtcaacattataagaaagcgacattgagcataaagacattatttgaggacctgctgtactatgtacttagagagataggcattctatcttgagttccttttttttctcccttcttgaaggaaggttaaattgcatctgagatggctcttgaaattgatcaggggttcaagctgacttgcatactctttgggaaagaatttagaaggatgtgtatgaggaagttcttatggttaagcctgtttcctgacttgaatagatgaatcaaatattttttactattctggaagcatcgcattctggaaaggaaccatactatgtcatctcagtctacctcactccattgtaggcacttggaagctgaagttgtgatttctccaaaattagatagctaattttcattggtgttagaacaaaaagcgctgcctctctttgaagacaccagtcctccaccgtcctcctctgcaaggccgttttccccccccttttttttttttttgagacagagttttgctcttgttgcttaggctacagtacagtggcacaatctcggctcactgcaacctccgcctcctgggttcaagcgattctcctgtcttagcctccagagtagattacaggcacccaccaccacacccggctaatttttattattagtagtagtagtagtagtagagatggggtttcaccatgttggccagaatggtctcgaactcctgacctcaggtaatcctcccaccttggcctcccaaagttctgggattacaggcatgagccactgtgtccagccaatttttctgtatttttaaatgaagatgtgagcagcctaatgtaagatcacaacatgtgattcaatacagccgtggcttggtgttgacatgttattaccagttgagctaatccatgtaactcagcattttatgctttactaagattaaaatgatgtgataacattaaattttgaattacagttgatgttttttatttaaaaaacatttttcttagttaaataatacatgatggtttaaaaatcaaatattcagtgcaattcttctaaaatctctgcaagtgtgggggtcatttaattgctgagcctcccagcctattagctttccattctgagctttcaagagatggtggcagctggcaaggcagttttgtctgggaaagccattgttaacagagcagaattggggatggagcagccatagcccacccaccagagtaggcacaaatcagacctgaacgttatcacaaagtccaagttggctcagacatttgtgttaaatcataataaatattttagagaacttggttgcaaatttacatttgatctcagtcagtcctcttcccctatctctacaagcttacaaaccgcatgggtgtgtgggggtcttatttaatattgcgaacagctggttcctgtatctgaagttcttgccctggagcctgggtgtttgttgtagttctgcaccatctgccttggttgataaggcattttggaggccactgattttaggcagcagtgttgttaggatacggaaacagcaggatgtttgtggattgagccttttcagctgaatcttctggccagttctttctggctgtgtgaagttgtgtcgactacagagcaggatgctcatgttgcctgctgggctctgttagggtggccagacgtgcttgtagcagccttactgccagaggaacgtacgttggcatccagagtccagtgctgccgccagttgcagtgcagcaaggctagccccaaacctgatttgctgcaaggattagctcaactctagtgacatttattgtgttttctcatagcccaaatcacagccaaaaaaaaaaaaaaaaaaatctagggttgacatttttaaaaatttttttaaaaaacatttttcttggttaaataatacatgatggtttaaaaatcaaatattcattgcagttctaaaatctctgcaagtgtgggggtcatttaattgctgagcctcccagcctcttagctaaaaaatctagggttgacatttttaaaaatgtattcaacagagtacgagggaaaagattaaagatggtggatggaaaaccataaaagctgagaggaaggcagcactgggcttagagtcacttggcttccctctagctagtaaataaccagcaccaaatcacctgatcctcctgaacttcagtttctgtggccatgaaataagaggttgggtccaggaatcaatgtaaattgtcaatttaacatttccctttattgatattactcccccctgggcttgataatttagttataattcttcatgcagctttaggttgagtaagtttggtgggaaacagtagctctcttcatatatttgagagatgtcatttgaaaggggtagatttattcagtttaactccaagaagcagaaatgggacccatggtagaagctaccaaatggaggtttggctctaaataagaaaacgatctttggagtgcctctcctagtttagatgaaaaaaattgcatcaagttgtaaccatgctagtcattgggaattttattaacaacacgtagctcctgtcctggggaggctcatagtttgataggggtaagatggaaagaattgggcagatgtggattatgtcttagcagtagagccaacagagtatgttgggggtgaaggggtaagagaaatcacatacctcctaggtttttagcattttccaaaatgaggaaaatgggtagaggcatggacagtgacttatatttagacgcgttaagccagttgtaactgcttgacgtctcagcgggataacaagtaggcagccatgttgtgtaatggaaattccatagctgtagcctttactaatgcgctctggaatggtctattccagcctctgaaaatgatttgctgaacaagcgcctgaagctcgattatgaagaaattactccctgtcttaaagaagtaactacagtgtgggaaaagatgcttagcactccaggaagatcaaaaattaagtttgacatggaaaaaatgcactcggctgttgggcaaggtaagcttcattgggaagcatctagtcaacctcacccctcattggtgattggggagaagtgtggaattaaaaaaaagtcaagtctaattttagtggccatctcccttcttttcatcacatcttaatctatttccatataccttacttaatagacatgagtttcaccacctttcatgattcctcttaattaaaattcccagaaggccgggaaataggaagaagacagaaaaacccaagggttttgttgcctataaactagataatgatttgatgatatactttgaattaaattataaactagaaactaattgtatggcttgtctctgggtactctagggagacaacatagtgtggggagcacagacttcagacaggtggtcttgggcttaaatctcaggcctgccacttactttgcagtgtgatcttagacaaatgcctcaccctctctgagctccagtttctacaagtgtaagatgtgggtgctgacagtggatgttgtgaggagcacacagcatgtgtctgctatactgtaaggccttagagagcgggcaggattcactgttttttcagtgagatctgccagcccaaactgttactggtccaagaagagataagtacagaacttgaaactaagcttttggaaatgtttccagcaatgtgacacagtgatcctaattaaaaatgtggacttatattttgtccatctgtttttttttaaattttgtttttctactaatttatttttactgtatcgtataaaaatatcagcctgtagtagattggaaaatttttaaaaagaaaaaaaattgatgcttcacagatagtttgagaaccgctattttgaagcttaccttcagtcattattagtgttctagtcaaacaatgatttctttaaaaatatatgttaatgtcttctggcaagagtaaaagcctgagtctaatctgattctatgctactgagttctggttgagctcatcatgaataaccaggtgttctgaataagggtttcaagtatgtatagaatgggtttttcctgagtttatcagttgtgcagtgggaaaacgttgtatatgcactttttcttttttgagatgtagtttcactcttgttgcccaggctggagtgcaatggcgcgatctcagctcactgcaacccctgcctcccaggtttaagctattctcctgcctcagcctcctgactagctgggattacaggcgcccggcaccatgcctggctaattttttgtgggtttttttttttttttttaagacagagtcttgctctgtcgcccaggctggaatgcagtggcgtgatctcagctcactgcaagctctgcctcccgggttcacaccattctcctgcctcagcctcctgagtagctgggactacaggtgcccgccaccatgcccgggtaaattttttttgtatttttagtagagatggggtttcactatgttagccaggatggtctcgatctcctgacctcatgatccacccaccttggcctcccaaagtgctgggattacaggtgtgagccaccgtgcccggccaattttttgtgtttttactagagacgggttttcactgtgttggcaaggctggtcttgaactctggacctcaggtgatctgcctgcctcggcctcccaaagtgctgggattacagatgtgagccactgcacccggcctgcatatgcatttttcatctctaggagcataaatggaacaaagcagtgttttttactatagttttttaggcatttttaaccttttctgaattttgacatcaattttagtaatcatgggaagttattgtttgttacgcattttccctttctatggataaggaaacttgggcttagagcagttgaatagtggcttagggccacagagctgggttcacaccaccgtactgcactgcctcctgttgaacaggatctccaggtgcttatctcagaacacgtatgcagtggtgaagaccgaagttctggatggacaccagctttcagtgtgactttagcaggtaccctctttctgggctcttgcccccttactgatagaaggagagacttgcactgagcagaggatcttggagctgtcttggagttctaatattccttgcacctgtactttttcttgaggtttacctttacaccaaatgaccccaaattgctgttttgaaaagggagaaagcagagaaaagaatgagtctgttcttcccccattcacagttgcctagatgatcaccttcaggtgtctttgcttctgcgaaaggcaaattgcatgggtctgtgacagctattccaaatatttgagcttcttagaagcctggcacctggatatttgtttttcactgggcatattttgtgggggctaatagaaatactctaggaatctggaccctgggtagtgaaagttgggcacagatgattgagcattctgtatactggagtgagctaaggctgacctggaatttccttatgtgttgcctgactttgccacatcactttttactgcagaagctctaaccataaagggggctttgtcagtcaggtggttttaacacattaagatttaacaactccaaacaaatgagggcggtctattttgtggttcagaataaaaatgtgaatcaaaaaatttgagcctaaatttgaatcatatctttgacctttgaagtagaggccaactcacctcagagaccttgtaagagaggacagttgtgtggattaagaggcccttcctcatagtgacataaaagaccctgaagtgatggaaataaaggaatttataaaattttcccagttaaaattagatgaggggccaggattagggtatcaatttaggagaagataacataatcctatgacattatagataattcagtttagtacacatcaaaatgatttctctaaagatatctagatagaaccttataagctggaatgtcttttttaggaatgggattgcagaggggctgcctgggctgctgacagtaggggccagatgcaaactctgcttgcctttgacccggcaatgccatttataaaaacttactctagaaactaatcagccaaaaatgtactgcagtaagaatgcttattgtgacattgtttaatagtcaaaacaaaacaaaaaacccaacatgtgactatcccatgtcatattccttgaaaatgacaccataagtagatctgtatttactgacgtaaaagatgtctaagttgttaaatgaaaagagtacagcatggtctcctgtactgttgatatttccatgtgcgtatacatggaaaaacacccacgatgcagatgtccaggttatagacaggatgaccatagggcccaacctggcatagccctggtttatgactcctgtcctggcaaaattattaatagccttcctcctcttcactgtcaaaagcttcctgctttggatggtaaatatatgcttattctagttatgggtggtttttcactttcttctttatacctcttgcatttcagaggtttttttgcaccacttttaaacagtgagtgtatattattttttaagtgagtaagaagctatttacatgggggatggaggaatggcctcctgccctcccagaccctgcctgcaagccgtaggtgggctccactgccaggtttctcttgggttaggagtgaaggcagcaccatggtggggaagggcattccaggccattcttagcaaaaacattgggtccaacctgcatgatcctgtgctttaaatcacagaatctaagcttactcctgaataccacaatatctggtactgtccagtgacacagccaatattcttttctttcaaaaaataaaggtctgataagacaatgggaatgatttagtaataggaaattggacatttcataacttgggaaaatttcccagtttgagaaaaagtattttgtgaaaaaaagccccactataaatcacttatcatgctgactgttttctagcccacatttacttctcatcagcatttgaagtatttgtggggagggtgtgcgtgtgtgtgtatgtacccaggatatatctatgagctggaatagcagagggagacaagaaatagaataatagtagaaagcagagatcagggtatatttgcttcctgttgctaccataacaagttactacaaaaatagtgactaaagcaacagaaattcttctctcagtgttctggaggccatagctccaaaaccatgccgttagcttgtctgtacttggcctcttccagcttctggtgtctgtcagcttcctagacttgtggtcacggcactccagcctctgcctccttggtcacattgattccccttctcatctcctcctctgtatgtctattataagaatgcttgtcactggatatagggcccatctggataatccaggatgctctcctcctcccaaagtccttacttaattatatctgcaaagaaggtaacattcacaagctccagggattaggaagtgaacacatctcttttgaggggacaccattcaactcactctacagggtcattatattaatgctgagataaaattacagaaggtataggatgtggtcatggtttacaggggccctgtatttcttctacaggccaacttaaaaaaaatgatacgtgaaagggaaagaagaaagtacttactacacagtaagtatttccaagaggtggcccagtgagacttttgaatctgttaataaaatgattactatttggttcaaatccacagatggttattttatcattaattgcaagataggaacacaaaatattttttctctagtccccatttgagtagcagccttgtttgacatttctgacatggaggacaccaagagaaaatggcagtcagcatccctgggctgtcactcaccggcctaatgacctagggcaagggacctgttctcactgcctctcttttctttaccatgaggataatcatgtttcccttagagggttatgagtatggtatgggccaatacacataacgtgcatggaatggcgatggtgcatagtggcctcgcaatcagtgctatctgctgctgctacctgccagagcagaaacttttcccaaaggtggccagagacagaaaccagagaaaccatccttctggacaggctgtctgagtggcagggcagggtacaaagcggccactttttttcccggatggaaagaaagatcaatgcctaacttggaggcttcctttctcccaaaagacaagaaagacttggcatcttattcttcagtcttcttgctctccccctttccacctttttggccttgtaatagctgagtaatgagctaaagaattttggttcaaaactgtcaccttttaaaattaggtttgccctaaataacatccttgactttaagagaattttcttaagttttagacatttttaatcactgtgagtattcaaattaatcacatgcaaagcattagttagaggctcttggacattttctgtttttagagctttgttggatgctcacatggcaatgtctgtgcagtcagttcctacccagcctctgggctcttcttgcagcttatcttgcagaaagaagcctcatcagaattccagaatctcagctatgattagcttactccacctcagctcagaaacatgcatgattccctggagctaccaaacgtggggcaggtttcttgccgtcaattttgcctctcacaataacccttccagccttcttgccagctgctctcttccacatgcacccttgtgcctgaggcaaactgaatcactctcggttccctctctcttgtacttttctcttccttttccctcatccttaaggctcggctcaaatgaaggattctgtggaaccttgattgctcagttagaaatgagcaaactgtcgcaaggacagaaaaccaaacatcgcatgttctcactcataggtgggaattgaacaatgagaacacttggacacaggaaggggaacatcaaacactggggcctatcgtggggtggggggaggggggagggatagcattaggagatatacctaatgttaaatgacgagttaatgggtgcagcacaccaacatggcacacttatacatatgtaacaaacctgcacgttgtgcacatgtaccctaaaatttaaagtataataataataataataaaaagaaatgagccagcttctctttcatctgagctctacttccttttgattctctctgctttctgagatcacatcttacatgacaatttttcatacttggctttatttccctagaatgttgttaattggcaccaggttggagctcaggtcgtatactttattccttgcagagtctgacagggtcagaacatgataacacatttgagaagtgagaagaagggaggaaggggccagggaagtgaggggagaatagggggtggaagtaggggaagaagcaaatagggcaaggttttagttgcctcccttctgttcttatgctgttaattaataatggaaccagtggccaggcatgatggctcatccctgtaatcccaggactttggaggctgaggcaggagtatcgcttgagcccaggagtttgagacaagcctggacagcatagtgagaccctgtctctacaaaaataaaaaaaaaattagccaggcatggtggtgggcacctataatttcagctacttgggaggccgaggtgggaggatcattggagcccacaaggttgaggctgcagtgagatgtgattgtgcctctgcactgcagctcgggtgacaaagccagactctgtctcaaaaaaaaaaaaaaaggaacaagaatttggataaatggaacatgaaacacaattcatttttattattaagttgtattctgtgcataaattatttccatgtcttctctcccttttaaaggtgtgccacgtcatcaccgaggtgaaatctggaaatttctagctgagcaattccaccttaaacaccagtttcccagcaaacagcagccaaaggatgtgccatacaaagaactcttaaagcagctgacttcccagcagcatgcgattcttattgaccttggtaagtctgtgccatcgattggagatgacaatggaagtttcactcacatgaaaaatctgaagagactgtccaagttatgtattgacctgcctttaggtttagcaatcaaaatttactactgagacttttaatttaaaaagccctagggtaatcacaaatgtcatcttcaagcatataaaaatctctgtattttcactggggagcttgttaactttgcttggcatggagggagggtgttcattaaggctgcagtcataattgtggttcagtccagtaactcaaatattgataggaggtttttacagtcaaccgaaggaacatcctggaaaacgtatagatgttcagaaccgaggcttggtttaattacaggagccactccctcgtttttactgctcacaaacagaattcatcagaaaaattgtagaaagcagtttgtgtgtgtgccttgaatgattttattttggaaactgggtggcaccttgtctcttgaatagtttttaaaataagaagatgggaacaatatacagtcagccctccatatctatgggttctgaatttggggactcaaccaacctcagatggaaagtatttgggaagaaaaatcaatgaaaactaaacaataatatagattttaaaatatagtaactatctatgtagaatttacattgtattaggtgttataggtaatctagagatgatttaaggtgtgtgggaggatgtggccgggcacagtggctcacgcctgtaatctcagcactttgggaggccaaggctggtggatcatgaagtcaggagatcgagaccatcctggctgacacggtgaaaccctgtctctaataaaaatacaaaaaaattagccaggcatggtggtgggcgcctatagtcccagctactcaggaggccgaggcaggagaatggcgtgaacccaggaggcggagcttgcagtgagccaagatcatgccactacgctccagcctgggtgacagaatgagactctgtctcaaaaaaaaaaaaaaaaaaaaaaaaaagtgtatgggaggatgtgtgtaggttatgtgcaaacatagcaccatcttatagaagggccttgagcaccgtggattttggtgtctgtggggactcctgcaacctatcccccgaggatgccaagggatgactgtattggatagatttgcagttgccactgtgaaggacttgttgaactggggtgtgattatgatgcacagagggccctcctgacttgtcagtggccatgcacagggccaggtggcaatgcactcccgtttgcctgccgcctatcacccaagctgctgtctctactggtggtgagctggctcgatgtggtaggagatgggccctgctgcttttagagcatgtggccctgcttccagaatacctgttctggttgcaagctgctgctgctgaaggctccacagaacacacagtgctttggggccctgcggtggcccggttctctgattgttcctgcagccacgacagaggatgcagtgtgagccgcatcaggcagtatgaagtcctttcctctcaagccacgtagctagccttaaaggttaatttcataacccttaaggttatttttttttttaatttttttttttgagacggtgtctcgctctgtcgcccaggctagagtgcagtggtgtgatctcagctcactgcaagctccgtctcctgggttcacagcattctcctgcctcagtctcccaagtagctgggactacaggtgcccgccaccatgcctagctaattttttgtatttttagtagagatggggtttcaccgtgttagccaggatggtctcaatctcctgacctcgtgatcctcccgccttggcctctcaaatgctgggattacaggcgtgagccaccacacccggccccacttaaggttattctttagcttgaacatcatctctgagaaactttccctgactgtggtctcctctcccacctcaagactggatgaggtgtcttgctaagccccctgtagcaccccacactctccccatggtgcgtatcacatttctcatcatcaccgttatctgcttattatcatcactgctgctgcctaacttcaccttgggccaaatgttgtgcaaagggacttaaactcctttctttaatccttacaacatgatcaggtagatgttgttctgtttctctttagagttgagaaaatagaaacagacaggttacgtaacttgctgaaagtgacacagccgatttgccgctaatcagtgtgacttcggaagctgcacttttttttcaacttttattttagattccaggattgcgtatgcaggtttcttacaaaggtgtattgtgtgatgctgaggattggagtgtgattgaacttgtcacccaggaaccaagcatggtacccaataggtagtttttcaacccttgccttcctccctccctctccaccccccaggagtccctggtgtctgttctcatctttatgtccatgtgtacccagtgttcagctctcatttctaagtgagaacatgtgatgcttggtttctgtttctgaattagtttgcttagggtaatgacctgcagctgcatccatgttgctgcaaaggacatgattttgtccctttctatggctgcagagtattgcatggtgtccatatatcacattttctttatccggttcactgttactgggcacctgggttggttccatgtctttgcaattgtgaatagtgctgtgatgaacgtgtgagtacatgtgtctttttggtaggatgatttattttgttttgagtatatactcagtaatgggattgcagggtcgaatggtaattcagctcttagcagaacctgtatttcttactccacctcccccgcctgtccttagtatacagcagtggctctttattgcctttttcccttataggatacagccctctgcggactgggctggggctgtttggccattataccctcggcttctaggacagtggctgtgacacagcagatgctcaaagaatatctttaagattcagagtgtgagacactgcactagcaccgccatctcatgggccctcacaacagccctgggaaggtggcctgcaccctctctaagaaatgaagaaactgaggtcacatgttgaccatggtcacaaagtcacctgaggggaggtgacaggaactgaacccactgtcactctgtgtttccctgggaccctctgagcgcaggaggcccgtgttgctgtgcagtggcaggccaaggcaatgccttggtggagctggggcccatttggcccactgacctgaggaaagcagttttgtgaattggcagtagctgcatttgctgacatggtgagttacaggaaatgccatcatgttcctatcatgtgaaacaaagtgagaaataggttcagggtgggaggctgaaagggaggaatgcagacagccccgctccccacacttgctccaaggctgggaggaggaacgggaaggtgtctcccctcctggattcagtcaccttcttctcttcattcccctgcagtatcccctcattcttccacggacacgatcagcccctgcttcttgttgctcagatgtcatcacttttctgcagagggaaaagaaaagaccagatcagaacaagggcctcggcgtggctgtgcactccgaaggcactgtgtgtgcctgagccccaccacggcctcccctgcagggctcaggcagccttccttgagctggcatgaggtctgtgggagcccggtccactggcagggctggctgcattcaagtcctctccatccctgcctctccccaccctctccctctgctgcccccttctctgacagtgctgacccccctctctcttccccactctttcccatcctcgcctggcctccggtttggatgctgtccacacacttcccgagggcctgagaggacctccgtgtgaggcaatgcatttcccaggtcacctctgtgtctctctccaggctttttccagggactccccggggtcagtctcctctccccactggaacggggaaactgggattggcctagacccggcagtggagtcccaggtgccctgcctgcccggctgactccgcccagggaggcctcccacagaagctcctccagactccacctgttacctcccccactcctctcacccaaggctgtgctgtggccaagtcagttgtttagtctacactttctgtttagtctacaccatggctacctcaaggcccagtgaaggtgtgtagtataaagcaaaatcaaatccatatttcagttttccttaaaaagtgaccttcatattctggccagaagaacagaatggttggttggatatattttgagttttcatgggtttttgttttcctgcctcttgttatactttctgaaattggcttttagtctaaacaggttttttttttttttttttttttttttggcaatgtgttttcctccaaagagtaagaataataggcctcatggctgggtcgtgttctacagtttgtgaatattttctcaacctttgtcaaatttcatctttacacatcctgtgtgaaattgggcacgtgccgttatttccaacttagaggggatgaatgagcccttaagagcttgagttctctgcccacattgcgagttactcagtgccagaaggagttctggaacccaggtctcctcagtctccataccacatcccttctagggcaccatgttgcttctgtgtttcttggctctgcccactccatgccagcacaactctccccacccctgctttggtggaatcatgttcctttggggtagatcacaccagccagaggcaactgctctcagcttagcagatggtactcatcacattattcttgaagccttgggtcaggagcctgccccacccatctgcatccatttgtccagccctcagacaattgccactgttttcatgtctattctttgactctctatcctgggtagacaacatggactgcccagcatcctgtcttctgtctggggctcccactgtcgtcctgaccacgctgggggctgccagtgacactgggaaactcccgagggacccccttcaggcttcacatcatctgctccctccctagcatcccagcctagaacactttccagccatcagctgcattccccagtgaggcgtgcagcctctcccatgataggagggcttcagccgaaagaacacttcaacaggcccagaaacccaggagcaccattagatcagaaagcagaagcaagaatgcatctaatctcccccacatcaattgctatagttttattaatctgcatattataggtcagtaaggggatggcacagtttataatccctgcaagagtctgatgatcttttggtgaccagaagtgccattttttgatgggcttctagagatcctccatcagggataccagacatgtttggcatgcctgtgctgccgcgagacgctaagcgtgtgtccagactacacgtgtgggtcacgggtccagcagcagagctgtcatgttgattgtttgcttctactaaatgtataaagcctgcctggtgtccagaagaaaagaaactataatccaattttttagaatccataaaaggtaagaagtaggagaacatttagaatccacaaaagatgagaagtaggagaacggttggattttttagaatccataaaagatgagaagaaggagaacctccaaaaggaaggaatcagctgagagtattgaagatgaccaagtacaaacaggcagaggggagcgcttccccttctcctctcccaggcggtgggctgcctcgctcggccaggacacacagagcagcatcgtgcgctttgaggggcaggtggagctgctcatcactagcaggggtgctggcggggaccacagtgttctcttccatctttgagttgaagtcctgtgtgagaaatgagaaaccttcatggcaaaagacagaaagggacctagaatgtaacattcagcagtcttgttatctcacgcacctgtctgtccagttggggacgttgctgtatggaggtcagttgaacaatcacagttgaggagcctaatgaattcttgcaccaccagccacacacattattctgaagagtgagccattgtctctgatcttatcaggatcacatcgtgggatcatatttatttggtcattctgaatataccctttaagtccaaagtgaaataactaaatgtcgttgataaaaggaaagaataaagtggggtatgatttcctttcacagaggtctggaatcttcctgcctttttcaagtcagtcggtggtgctggcaaatgtttaataaccagctcctctcacccctcagaggaagcccttggtgttcagtgtttgcagatttccattgtgcaactagtcctcccacaccccattttaaactacccacttgatgtcactggtcatggagttgggctcacagagccagtgggagtcaactggagcagccactggactcattcaagtgtttcccaaaaacaatctgctcctagaaggactctcccttaatctcctaaccctgccattcaggatgattccctgcactctgggaagcacacgttctagtgggaagactgatactgggcaactgataaccaagtgacttaaacttctgagggttacaaagggtgtttgtatcctcagtgtctcatttcagattctgctcagagctaaatgcaacaatgtgagaagatgttagtatcccagatcttcatccaggaaggaatcttagagatcattaggttgtagggtttctcttctgcagaggagatagagggtcggtgtcagattgctggtttgccagtaccactccctggagaaaagagcaaaagaaagaaacttgttagtcaactgtgcagagccaccgtgagactgaatagctttgtgggtggccccgtgtttgctgcaagagacctctggcctcttgtagcagctgccacatggtaaacagagccgagatatcaggagtctcgctgaaaatgcagtcagatgggctctgaatagaggaaggcaggacactcttgagatgggatggggtttctcacagcaccgtacagggaccacctgcaagatctcttgaggggcttgtgaaaaacacatccctgaggtcaccattcttgacctgctgcttattgagtttctgatgcctgggatgtgcaggtttaacaagcccccagatgatcctaataggattcctgcctgaaaattgctgggtgaaggctcttccccctccaagtgataaagaaggaaaagattgatcctggaagaacatccgttagatgagcaaaattttgtggagcacttcatgaagaggaattactaggtcatttagaaatatgtttgaattgtggatcatcttgtaggcctttctggcatatttctccacttagatccacaagacacatcgaatgtctttttataaaggggttttttaatgcccatgtttgaccctctccacttaacagtcccattctcattttatatgtgaaggtaatctgctttacagaaaaatgtaaaggacctgcacttctctgctttgtggtaagttgtaaaatgcagtttaaagaggcaggcctcatatcctgatagatttgtaggaaggattgcacagttttacccagcttccctcgagtttggcagaaattagctttccctgagctggtgtcttcccgagctagcatgcttctcctatggggtgtgtggccttctctcctgtcttcttgaggcagagcttcaatctagaatctgttcacaaactgaacaaatgcaacaaacagtaaacagtcttttgctcatagttaaggtgccttgagttgggtgtgaggggctgagtgtgttctcaggggtgctctgcccacggctccggccaactgctgcaggtgcgcatcatatgggtggtctttgtggaatgccatcagcactagcttagtacctcctaaatgggagctggagggctacagtgctcaacactggattatacgaatgtggattgtccaggaaatgcttttaatccccctcatccactctctacccacgtgacctgcctctccctctttacttggtgtttactcaggaatgtgggtgagttgtcgtgttagcctagaacagccattcccaaactttgatggaaggatgccattcactttgaaaattatcgagtagcccaaagagcttctgtttccatggataattcctatcaatatttactatattaccaattaattaaaactgagattagtatttatttgattcgtatttatttttacatagctataataaactcatacatataaaaaattattaaaaaatgactgttttccaaaataaaattagttagaaatgtgacattgtttctacatttaaaaaatctctttaatgtctgatttaatagaatccgctgaattttatttgcttcattcattctgttttgcttgttatttgaagcatataaagcaaaagctgaccttgcacagatctatagtaggaaaagcagggggagggcctcatggacccctaaaaggatctcagcgacctccaggggtcctcaggctgaccaaacattgagaactattgacctggaagaatgtaaaataggaaaacagtgtctcccccaatagaatttcgtgtaaaacgtggactgtgttacaaagtcagatgggtgcagttgtcctgcttaaccgctaatcaggagctgaaggccagagactcacagctgttccccagcctggtagtgaacccagaggcctgtcttgctgtgcagtgggacaggaagttgcatttgggagtctcatagaacacactggaagatgtgttttagcttggccagtttcatgcaggacagattttctgcataaagaaaatcaatgacagtttctgaaactgcatcctggaagccttgaccagtttgggtaataacaagagatttgaaagtgtggggtgtacaggtgttttgctgaatctaggtggtggtggtgattattattatttggaattcagctttcagttctacctgcttgtgagttccaaactttgtgaaaattagttgcttggacgaaacttttctttgcctctggaaggctgtcagaaagcgagatttcccagcttatgtgcagtgttatagttaatagagtaatggctctgcaaagttgttcctttactttaaatgtaatttattttgcatttgtgctacagaacggtcataagtgtgcccttttgtcctcttgtttggaaactgggtttttataatgtgtgtggtctatccgaagattattgcccattattgaacaccattcatagcaaccatttgcattaggcattgtacgtgtactctccactctgcaaactatgtgttctgtccctttttaaaaagaggaagctaaggttcagagaagctaggtagtccattctgagcttcacgtgccagaggccattttgtacttacttcaaatgccattgaaataaatgcacatcagagaattgttcttagcataaggggcgctacatgtaactttttattagtgaaatggatgatgttcaagggctgtggttgattagaaaggcgtccagaccctggctccagggactatggagcagaactggaggccagtgcctgtcgagcgggtccccacactccatctgtgtgacctgactgtggatggcctggctctgccgttagattgccacggtgccctcctctggttgaacctttctcgagaagtgcttgttggaggcttgagtgcagagcctgtgagaagctctatgtggttcctattgcctgtcagcttgctgataaaggtcattggtttggcaaaatttggcccaaggtttgccttctcataacataccactcggtagcaaggctgggaggaaggtggctatagctatttctggaagctgcttagggggctgcctccccctaaattggtacataatttgcagggcctattgcaagatgaaaatgcagaaccctttcttgaaagattattaggaatttcaagacagagacaacagagcatgaagccttgtgcaaggtccttctaagcacagagccagtgtgaccgcacagaacacacacccgtgaagccagctctgcccccaccatctgaccactcttgagtggccaattagcataggtcactccccaccctgctaggcccaccctcttaggaatgttgtgaggcttaaataagaaatagccactctacaagcggtgtcaattagcatgggctctggtttctgtgtgaggtagtttgctaacatgagagggtatctgattagctaaaacgataacactgacagattaaattcagaataactaaaccttccctgtgttcctttatgccacatgactcctgcatattctgctaccagcacctgtttgataccagacggaggggtccatttgggatgggacaggagcatcagcagaaatgcagaagtggggaagtgctccatcttcttggaagctgagctggcaagggtaatggaatgaaagagattgtgaatatttttgagactatgaggaaaccagtacactggtgttgcccagtacagaagccacatgtggctgttaagcacttgagatgtggctactccaaattgaggcgtgctgtcagtataaagaacacactggatttcaaagacttggcatgaaaaaagaatgcctaatgtctcagtatttttatattgattatgttgaagtgatagtattttgtgtatgttgggtgtaacaaaatatctaattaaaattaacttcacctgttattttctaatgtgggtgctagaaactgttacatcctgcatgggggtcacattccagttcagttgcatgtgctgctacccattgttctacacacacacacacacacacacctgcacacaacctagaggggtcagagaccccaggagcccctgcttctggtgcccaggctaagcgctggagtggaagataaagctgggagggtgggtaaggaggtgagtgcacggagctccaggctaacagagtggataatttgttctttgagcactggggagctatggattgcttactagcagcaaggtgacttgtgcagggtatatctgggggagatttactgggggaagagatagaggaggcaagaagtgaatacagaacgagaaatcaggacagtggttaggagaccgtagctttcctcttgagtcaagttcagataacacatctggactgatgaaattctttttcaggaagctgaggaagagcccatgaaaatatgttcctccctgtgctgagaccgaataattgcagtgaacaattaacgtgtggcctagatccaccttttgccttcgctgatccaagcaggttcataattcttgcctgggcccaagcttggccctggctgccagctgcctggctccagatgtttcttaatcgtttcaagtacttctctgctccctggaaacaggcactcccatcagtcacattccagaggaggaggaagaggaacttgacaagtatcagctacaaaagcctcctgaacaaaagaaatcctttaagcctatttgaataacagttttttgtgaaaataatcaggatgttgagagcttttttttttttcttttaaactctttttggaaggtaacttttgtgaaaagaaaacacctgctgctcctcaggctgtttcaaaacactgcctatagtttgaaagtacggagatatgcatgtggtatgaagcatttgcaggcataatatgtgtagtctgggaaaagcagatccagagagtgcttgtagtaaggcgaggccttttagctgcatttagatgatgctgggattggggtgggtgcagggtgcagcagtggggaggaagaactgtgtgtgttcctcttgagaataggggttatgtctagaggattaacagttttcttttttcttttttttttttttttttggagttggagtttttctcttgtctcccaggctggagtgcagtggcatgatctcagctcactgccatctctgcctcccaggttcaagcaattctcctgcctcagcctcccgagtagctgggattacaggcacctgccaccacgcctgactaattttttctattcttagtagcgatggggtttcgccatgttgggcaggctggtctcgaactcctgacctcaggcgatccttccacctaggcctctgaaagtgctgggattacaggcatgagccaccacacctggccaacagttttcttttttcgattgaagttcagctatttgcaggaccgaaggtagttctgattactttcacctgtacttccaccaaaaaataaataaaacaaccatgagtaattgctgatttttaattgaaagcattattccaggaataactggtggacttcgtttgcagaggaagtggcaaagactgattgatattatgatccagcttctaaagattttgctgcttaatctgaagcacattggatttctggttcaataggctttctttttttgtttttattattacaactaatatgtattcttttcacagggcgaacctttcctacacacccatacttctctgcccagcttggagcaggacagctatcgctttacaacattttgaaggcctactcacttctagaccaggaagtgggatattgccaaggtctcagctttgtagcaggcattttgcttcttcatatgagtgaggaagaggcgtttaaaatgctcaagtttctgatgtttgacatggggctgcggaaacagtatcggccagacatgattattttacaggtatagagtgttccttatgtctttaatacaacaaaatgctaagaatgtttcttatccctctccagatgtgcctcaggagctttttcaccgtcaggtaacattgtaatagctgtcactgctgataaaggactctgtgctaggcattattccaagcgcttcatctgcacttccctctaataacaggaagacactgttcatcgtctcaatttgtagattggaaaactgagtctccaagagattataaattgggcccagtcacacagctagcaagtgtcagagctggactggaaacccaggcctctctgactctagggccttccctcttgcccccatcagccatcagatgatctcagacctacctcccagcctctgcatctgctcttcctctgcctcacccccacccttgtcatctcaggttcagctcaaatatcacatcctgggagaagctcattctgactaccctgatgttgtgttccccacttccaccttgggcacactgcgtcacgttatcctggctgatttcttttgcacaacacagccactgccagaaatgatcttgtttccataatcatctccctgtctattttctgatttttcatagcctgtgaactttaggagagggaagggatcttacgggtcttggagccgagttcctagtttctgaaacagtgcgtgggttgaagtaggcaccccataagtatttgttgaatgaacaattctgtcagagaaaaccaaacacagtagcgtattgcaaataccacgtgctgctcttgctgcctgtcagagggaaaactctggatcctgcttcaggaatattcctaaatgttgcagcacatgttgatatgttcatttactaccagtaagatactatgccttcagagctctagagagtatcctgggagggaatacattagagccaaggacttgctttgagagcaccaaattatgtgattcaaaatcttttcaccttgacctgtgaacatggaccacgtgaatgcaaatatcatagaaggaactcattcactgaaagattttgaccacataacactttccacatgtactgtgaggttcttcctacattccctttattaactttaaagacagtggtcaccaggcagtggaatttttgagttttctataatttatgtaacacacaactcttttggggtggtgcctttggttgattagacagtcttcgatatgggagagccacagctggtgcttatgggattatattatctgagcctctgaaaacggttttgttttctttctctcagtttagataggacatatccaacttggtggatcttagcggattctgaccctctgtaggttgttgtttctttaggctcaggccgtggcactgctcagatctgggctggctctcgggcctctgtgagcctgtaactcttggtggcactactaggaactggcatgagatttctgccagaatcatgtcattctgtgaagttggagttccactttagttggaaaaagtttttatttcatcttaagatgcacacttgtcttcttgttttaacttgccaggtatctggatattccatatattatacaccaaaagaaattatgcttctcctgcctattgagtaatttcaggggtccagagggaacttgctgagtgaacatgtacaatggattcctatggaatcataagatgcccctaattcagtcttagtaaagagactggcttcttatttctaattcctccaggcttgagttgtgcaaagagtatgtatttgtaagagaatttatgaaatgtttgcacaagacagatttttagatcttcttagtggaggaatacaagggaacaataaaaaggaagtggcagtagaagacccagcgttagcgtcctgggcctacacccagccagtgcctggcaccagcaggcacttgggaagcacttgttggatgaattagtagctgagctcagtggatcgcaagccaaatcgaatgtttaaagttctagtaagtcttctcttacacccaccctgtgagcagtaggcataactttattgctgtggcagatccctaattctcagcccttgtggctgtcttcctgcagatccagatgtaccagctctcgaggttgcttcatgattaccacagagacctctacaatcacctggaggagcacgagatcggccccagcctctacgctgccccctggttcctcaccatgtttgcctcacagttcccgctgggattcgtagccagagtctttggtgagcattagtaaatctgtttgccagaaccagccttctcttattagaggggaaacatttcctgtctctccgtggtgattcttatttttatacctgtagctcttaccagaacagggtattgtttgatagtctaagattagtcaggggtgggttttgtgactttggagtcctccttaacttctgataatcacggggcttccctagatgccttcatcttgtgggatgtggatccgatccgtgtagatccgatcgctcaccatgagggtctccctagagcagacatttggaggacttggctgaggagccacaggtgtatgtttctcatgaattgccttcctcagccactctgggttgtgagtattgactgatgctgactgtgggcctctgggccctttctagattcccttggcatctcttcctcccctttctcttcttgccctgcccttggctctacactttctcccaagtcactgtcttggagaccagtgtcaggaccttgagtaacacctccgtgtggatggctcgctctccccgctcagccttgacacttcatgaaggcctcttgcccctgagcccacatgtcacagccactgccactcccgtgcccccgctgttaaccttgggtggttcacatgtaaaacctgcctttatattcttgatttactttttgagaacattgtcaaagttaggtgagtgttcatacacaaagccttcaacctgccttcatatgcagggatagggctgtccacgtgcgcatcaggaaccgagtggaatgttgtgagcatggtcagttcgggcacagtttgttttccctactgcagaataaaagtgatatttttgacaattcaggttcttttttttattgtaaaggaggaggctactaaaaaaatgatagttattatatatcaaatgtttttaagcatcacttgacagcttaaaaacatgtgatctttaaaaaatttgtttttatgattagagagcatcttaagggaaatgttcaaagacattgatactacttcagacatgctttgggtaaacatcttaaatatccaaattctagaaatcctaaaatttgctttttaatataagtgagcatttacccttcttctctcttttcctttccccccaaatactagatttttattattcacttttatctacaagaacctttaaagagtttcccattttgctttactataagaattcatattccttcttttctgtccctgaaaaaataaaatcactaaattaaaatagatacaaaaagctatctcctggttgagcatatctttagtgagagttcatgaaggtttataccatggttaaaaaaaaaaaaagattaactaaaagcctcaaaattgtgtgcttagtttattaacaaaagagttacagaaactaaaatctcaagctctaggctttaagctttcttgccaataacttctatgtttttgacttctctaacactggaaattaaaagaaaattattaatctaccttccttacattttctccacattttagctatgattttcatacagggtcatgaagaggagtgaggatggaaatggggaggagggagcgctgtttgttaatggtttgtaaacagctcaggcattaaattacttggttagtgaagaaaattctaccaaggcaaccaggctgaccacagactggagggctgaggggtcatcactgagtcatctctgccctggggccccaggcactggagctgctgcttgcagaaagttctggggctctggaagagaaatttttccttcggctcataaatgggtaaaaagacgttaacaaacaagcagactccactttggaaatgatagcccttctattgcagagtaatttgaagctctctgaagctcactctaatgacttcataaatcaaagctgcagcttgtaaaggtaagatatttttctgtagactttgtaggcagtggtgagactcggagtttcataaacattatgcatagagatgccagtgtctacatcattcctggatcccacagactcctgctgtgctaagtgggtcgttgtccagctggccaagggctcctgggattagaggcgggaagtgggatctcaaggccgcactggcttgtgatgtcactttgcaagaactgcttttttttccacagtccatcccatctttcagtacttaaaaacagaaaagataggtttttacaaaccatttctatttttagcactgatgacttagagaatggtgatggagatagcttagttttatatttcaaagcctgccattcagtcactatagtcttttttggcctagggcccatttcattataagcctttaagtctggataaactctaaaaacatgtagaactttgttgactaagtaaaatatttcagtttgcaccaccttagctcatatattagttaataggttacctggcattaagtatgtatctgctccttggaggggcggctgccagtgatgtgtgcgccttaaccttcacatgatactcacaccttgctgaatggcagttcttctacctggtgtcacataatgtcaatagccccttcctgtatttttctagcttgagtacagcagggccctgggagagacgcttgctctgttcactttctcatcacatctacctttgggggaaaaaaaatctaaaaaacaggacctggcttgctcctgatggaggaggaggctgcagtgttcagcctctgatgtttttctataggacatgctgccaaatagatgagggaggaggaggagtataaaaactaagggtttggcaaaaaacacagaagccacctgcaatatagtgaaggcttcagagagactttaggatgaaaatagactgaaaacaagattgtttctgtggccaggaaaatctccagctattcaggtgacatgatgccgcgtgatgatgagtgtgtccagtctgtctgtgctgttgttctgcacagcactgtcatcagccttcagcgtcccctttacccgttactcatagaatgtagcggagccacgactggaggaccgcagccttccagaagaaagttgagaaggctcagccttgacaaagacaaaggtggctggaaaaagagatgcagtgcaagctcacataggaagattgcactttgagatcatgaagtttagtttcaaatagagttccaatacacagtaacgcaataagagggttgctgaaatgtcctcaaagaaaagcagttcctttgtgttgttcccagcgaatacagtgcaaagtaatagagtcagctgaatttaagattcctatttcctgccggataaaacgtcttgcctgtttctaggtggcttgaaaaaggagaggagagaaggaagaggcaggagaaaagtcccactgaaaggacgtgggctacagtgtagtgagctaggctactgcctcactgcgctgggcggctccaacagttcactgtctcctagggaggttttcaaatgcaggacatttgctcacttttccaaggagagttattgtttttttgttttgttttgttttgttttgttttaaaaaattccagaatgtaaatgtataagataccggaagacaggcaaaataaaaataattggtttggggcagtgggtttataggtaacatttttctttactattgttttaaaattagatgtgatttaaaaaaatttccaaagccaaaaaacggtacaaatgctttaaaggatgaagatgttgtccccaagtgtcatcagacaaatttaggaggcccttcctcccaagcaaagcttcctgcagtccttccttcaactctgaattcaagcacattcctgcattgtgcacccaaatgatctcccgatttaagaccccctgtgtctcacagaagcttctggggctgaactttctccggccttggagggttggacgctttgaatgggaggagtggtggtgagtggagcatctctggcagcaggcatttgggagtctctggcaggaatcaatcagcgtagtctccaaaggtggcctttctctgacactaactagcccttgcaggggtcatacccataacctgcatctcattaacatcatctccttaccagtgcactgacctagtgagaaaaggaacaataagcattcagcgactcctgcggtgctccaggggaagttagaattgcttggctggggcagaggcccctggtgatctggacctgcgtgcccccatttgcccaccttctgccctgcacaaccagtgcccctgccttgccagccagactgtttttcaggctcctgcacacctccctgtattgacaccctattttccttttattcagagtattaatcctgaggtctgacctaggaaattttcattggttcttcaagcagtcacctttctgtgggccttttctttcctctttgttctcgtaacaccctgggcataactctaccgaaccagaactccttggtgtctctgcagcgtgttctttgtgttttgctcatggcttaatctccagagcctaatacagtgcctgatgtgtattagatgctcaatagatgctcattaagttaaagtagaagacacctctcagcagagttctcttaaggtgttgtgaatagcattgggaaagaacatttattttttaattacattaaatacaaacagatataataaaataaatcatatgcccagtgctatgtcttaattttttaacatatcaataaagagactttaaaacacataacaccaccctctcccctccaaatttcctttccgggaaagtctccttttggaatcataggaagcacttactaagttgatttattgtaaaaaaaccaagatcctaataaatctcagaagatctcctgttaacctaaagagaccactgatgtggattctgtatttggttgtgctgacaaaagtttcccagtaattgtttattttaattggcgtagatgtggtactgtacctaatttaaggcacttgtccctctgagagtagagaccaagctatagaaaatcactggtgttgtagggaaagcctttccccaggatccctgcaaaaaaggtcttgatttttattctgaaagatgccctcattttttgttcagctataaaagttcatatattgaaaggaggtctaggaagtctcactgtgtaaaccactgaaacttcaaatttactttagagttttgtttctggaaatgtcatttctgtttaaaaatacatctttgttatagtattattttagatctttttattttctgtagtggggaattatacaggtagactacattttataaaccagatatttcagaggaatattcttcaattggcctgccttggtgtatgtaacacttaccctgaaaagctctgatttcaaagacacagttagttctctagtatatcttcccagcctcaacaaccagacttaagaaggaagtgaaggattcatctttcccactttcctgcggccaccctgagccatcagtagttgtgatgtttgtggaaagagtgtggaccctgagctgggtgggagaagcaggctgatctcagcgctggcatggcttagggctgcacccatctcagctcacatggttaattaagggttttgtggtggttacagaggatctcgagggctatcccagccagcgggctcctgggtctgtcatccctgcctgtgctttgttcagaaactacagggattcagtttcccatttgcacagcagcacccagtctttgcttttctgtttcttcgtggcttttaaatgttatcatattaaccatctagagaggcaccctgcaaggttattcctctcacctgcttttgctttccttgatttgatgaaatttacagcttctttctctcttccattatctttcagccaaaagaaacagagaaaagaaatactgacacttgcctccaattatatttctactctgatttttaaaattgtttttttcttatattattattctagttattaggtaacctgcctcagtttagtcaaccaataattagttatcgtggctctgctttaaccccaggacatcagactctttttttccccagcagcttcaactctatgaggaaggtgagacagggctggggttgctgctcggccgcttgccttggccggtgccctccctcttattctgcagtctgtatagaagttgcatccatttgccagccactctaagaacaaaatatggccagaactaggaagtaaccttgacagagttcttgaactcctcagagggaaaaatgttctttattccattatcatgttaaaaatcagtaaacttgtatttaacaaagtacttctgcagttgtacagctgttgtacagtttttaaagatctttgaattctattccttgtttcaaaacagaggaaacagagacactttttcacttactctatcttaatttctgatgctttatctataaaaatcttttagtgtgacccataaaaacatgttttagtatctcctttaaaacccaggagcattcctggaaaaatagactaataaaacctttttccctttcccagtttaacttttgaagcatgtttgaattttattttcagagtaaaacataatttttaatgtttatgtacttttatttgcaatactgtcttgacaacactgtctgagatatcaggctcttaaaaatgaaataaagtttgcaatgtggggctatgtctcccacactcctgctctgtgatgtgtggaaaaggcaatggaatggtattgcgtgagaaactggtctggtttaactttctgcatttctgtgttttctcagatatgatttttcttcagggaacagaggtcatatttaaagtggctttaagtctgttgggaagccataagcccttgattctgcagcatgaaaacctagaaaccatagttgactttataaaaagcacgctacccaaccttggcttggtacagatggaaaagaccatcaatcaggtatgagtcagtccaaaccttgcaaatgcttaagccatcctagatatgtagaaacttaaatctctcttgagcaggaactgtttcctaccactttgtgttctgaacggcattctgcatgatgcctggcatggaggaggcatatcacaaacgtgtggaatgatcgtgagtgtgtgtgttgtgagcgtcatggtgaaatgccacatggaaacatggtggcaatgtttagctgtagaaaccagcacaggttattagtagtttcttacatttaagagacttcagctctagtagcttgttcttctgaaacatatatatatttatgcaatgatgcaatgtagggttttgtacattgagtgctttgatttgtgtgtgtgtatgttgaatggttttaattggaattttctccaaataattctttgataacaaagttatgatagggaacatatattctatgaatttgtttcatgatgtgtgtgtgtggtttttttttaactgaattcagttcaatatctgtggcttcattacctctggtttcagtatacaatagaaccattatcctctgaagtgttagaggctgagaggtgagttttactgggaattacaactaaactagatggtgaatgccctgggttgggcatgggagcagattttgatcctgtacagtttaaggaagaacctgccagtaatggctgctgatgatggaggactatgctccttagtagagaaaggggcatcattggaagtgtctagaggctgggtagctacgaaagcactggaagggatttcatcattgagtcactgcagagtcagcagtcaagcctctcataagcctagaatctgctccagatagtcatgtgtcacttaataatagcaatacgttttgagaactgcatcattaggtgatttcatcattgtgcaaacttcataaagtgtacttaaacccaagtggtatagcctactacacacctacacatgttgttcctaggccctacaaatctgtatgacatgtgactatactgaatactgttggtagttgtaacacaaggtggagtatttgtgtatctaaacataactaaacatagaaaaggtacaataaaaatatggtattctaatcttatgggaccaccatcatatatgcagttcgccattgaccaaaatgttgtaatgcaacacacaactgtgtaacgaaagcatagagcaatcaggcaaaaacaaatggtgaaataaagctatttttgaaaaatccttactctggagatttctgtagtccaaaaggaatccatgattccagtggattgcatccacatgcagtgtttgtgattttcatttgcagccacaccttaggtgttaagcacagaaaaagatgcaaatttggcctgcaaaagaaagaggtttcataccagttgttaactttagatttctgtttgcacattgcatatgcccttatgaaagaacagttcttgtctgttctgcactcatctttaattgagagcctctccatctcttttccttccctggaacactcttcttgatgtggatagctttggcttgttggggccttgctttttgccaggttgggtgggcatcgaaatatacgcatgatcccattcagtgcaggccgcactcctgagaggatataaagtggttcactgactgacccacactcactctgctgcaaagtggaaaggtaggggttcaaactcaagtccctcccacctcaaagtgctttagcagctctcctacactgccaagagcctctggaggtcatttaatttagagtttttccctattttaccaggattctaatactgacttctccacccttttgattctttgatttctggcattttcattcattctttctttcattcattctcttcttacagcttttgttgcatgtacttacttacatttacagcttctagggcagacccccgagagccttggttacctagactgagggctatatccactacctgacatgtcaccttgctcctgtccctcaggccatcccagctgacattgtttacctcctaagtattgagcctcagaaaaaaatcccattgtctcctattttctgtaaaaaacaaaaaataaaacgtattgagaatacttaggatacatcaggtgctgtttcagtgctggaagagtggaaatggacacagcatgggaagaaaatagctgtgcgtgtacctggtttgtttcaagccgctatctggctatttggaagttgccattcatttttccactgactttttttttttttttttttttgagacagagtcttgctctgctacccaggctggaatgcggtggtgtgatcttggctcactgcaacctccaccttctgggctcaagcattctcgtgcctcagcttcctgagtacctgggactataggcatgtgccaccacgctcagctaatttttgtatttttagtagaggtggggtttcgccatgttggccaggctggtcttgaactcctggcctcaagtgatccacctgcctcatcctcccaaagtgctgggattacatgcatgagccactgtgcccgacctccactgacttaataactctaggacataggtattataattcctatttttatagatgaagctgagcagagagtaacatgcccggccccttgtagaaaggcagggtctgtgggagccagggctgtgaggttggagctgaggtgtttgagtccagctggacttaaaagatgacctaagatcggctggcagacattttccaaagaaggccaggcagtatatattttaggcttcacgggtcataacgtcacaactactcacctctgcgacagctactcacctcggcctttgcagcacaaacaatccatgacagcatgtaaggggatgatgggtcatgttgcaaaaatctttattttaaaaactgtgcagcgtgatgggcttggtccacaggtggtggtttgctgatccctgaactaaaggatcacagcatgtgagaaggtacaggaatgagagcagagagcaattctcagaacctgaggtgttcaacattttgggggtatcgggagcacaaaaatttgcatttagggcccgggtttttatcagtggtccttatagaaagtagatctacccgcatctctcccctctttccctctggtgtttctatctgaacttgacatctgagtgttctctgtcaggctttctgctttcctactgccccctcccatccagagggtgctgtagtcttaagttctacacagaaagcagacatggggtccagcatgattcctctgcagccttagagatcccccaggcccaaatcttgggggtcttcagagtagatgtaatggatgcttccattgcagatggtggagcatactgccctgtgtacagatggggtggggcaggaagtgagggcatctgggtggtcctctgtgatagctgtggttccatttcattaaatgccttccctgtatagatagtctcagcctgagcaactgggacacagctggatcctgggtggaagaggtggccaaggacagggctctggagctctggctcaatgtggacaggctgaaagcagccagagagggcaattccaaaggtgacagagcccaggacagaagaccaagggtgtctgaagcctttgtggcagtgtacttaccaaaggacctgtccattgaataaaccatctacatcttctgacccaagaagaatggaaactttgggaataattagtaacaaaggaaaggaggtcagtgttgtattcttgtcacagtgggtgctctgtggctgtgaagtctcagctcagtttaaggaagaaaaagaggaagggtggctgtgggaggcagggcaaatagcctattttcagcatcctttaggctccactcagagcatggcctcagcccagcattgtcatcatatcatgtcagagcttgttagaaactcagcatctggggccacacccgagacctgctgaatcagaatctgcatttcagtgagatcaccaggggattcacatacacacaaacagctgagaaaccctgctgtgggcaactctgttagaaacacaatgaacaaaggagcccctgttccagttgagcttgtaggttagaaaccagggttcctgtattcagaagacacacctcaaatcaggggcaaaggtgcctcttctgcctgtgggggagccgtcacttcttgggcagtttgcaccgtggaaaaggagtagttttgtacgaggacaactggtgccataccaggagggtggggcgtggcggggagaagtggtttaccactggcgttgttgaaaattgctcacatgcagtggtaataacaagcagagggacttttagtgggtttgatgttttttgtaattcactacagatagtgtgtgcccccttgttgctgataccaggccgactgttcccactctccagcccttggtatgacaatgggaccagcagattggagggcagggggttaggaaggcggaagctctgtggcgagttctgcaaaccatcagggttcatgactttattaatcagtgtccatggactgtgaagagaaatgctgagtctacaatagcaaatgagccaagaacataaacagacaattcaccgaagaggagatatctagtaaacaaatatctgggaaagtatttggcttcatgtgtaatttaaacttatgtaacatataatgctttactctactagataatagaaagacatttcttgatgccagtacccagcaccaagggtatactgtatgcagaacattagcatgttgctgatggcagtgcacattgattagtggctgttgggagacaatttggcgaaacatatcccaagccagtaaaatattcataccctttgactcagtcatcccgtttcttggaatgtatcctcaggaaataatccaaaatatgagggaagccatatgtataaggatattctcctagacttgtcacttataataacagaaacttggaactagatgtctaacacttgatgactggattaatatgatgatggtaggttgagctggtagaatatcatgaagccagttatatatagcgacatgaaaaagctcttatttgatacaatgttaagtaaaggaaaagtgggataggaaattttatgttggttatgtttagaactagaaaaacatgcttttaggaaataggaaatatagctagatataaaagttgtatttggtgatttttcttttatttttcaagcttccaataatgtagctctattgcttcagtaacttaaaatagttttatcttttcggcaaaacatcgaaagtatggaaatagtcattcctactttggcaaacagaagagaaattttcttcagtaccaaaattctggaacttgactgaaaactatgaagaacctaagagccaggatgacaggaaggctctagatccccagtaattacaactctagtggaattgctctgagatgggccagcaagaaagaagatgagagccagtcccccttgcagaggggccaggtaccttgcagctttgtgtagtgaccagtgctcagggaacggcttaggcaagaccctgggggaggtgggcactgcacttgtccagcctcaggagtgactcagaccagaaatgaaaacaccttaaagtgtatatatcttgttttcctatcaacacctagtttttaatattcgtctgttttattcatctgagacaacataccaaaggattgggtttttaatgttaggccttcctgctctttctctggctgagaactgctcctggcagtggatcacttgtgctgtctaagtgtgcaaggacaggcgcccctcccaattcttttctttccccaagtaattagcccaagggctgaagccctcgttcagtgaccagggttctcctttgaccaccagcctcatattgccatggtttggggtaaattcaggggcataactgcagaatgaagggcctaggagtcttggcagtcaggagatcatcaggcaattaagcagagatgattgtgacccagggtggttcctagggattaatggaggcctggaagagtttatggctttgggtactgctgagagccattaacttaacacagaacatcaatccgtaggaaaagccagaggttttgttcccaggctttccaggttaggagatcacttaaatctttgtgaaagaaaaaaagtaatagtgtacatgacatttattcagcaccatatttataattatacatgagtgccaaacaatctcagttttaacatttgtggtttttactgttcagactattcagaagttccatgacgtggcatccattgatgatggttttgctgaggttgaaatgtgagggttttgtggcaggtgtgtggaagcagatcccttagctaagagagcgcctgctcaacctgccaggcgtgtgctgggaacttccaggagttgcctcgtttaattctcacagccatcctgggaggtaggcgctgtctgccccaggtgggaggccaggaactgtggctgagagaggttaagtaccgagctcaagtcattcatagagtcgccagtggagccgcaattttaaggctgactcaaagcctctgagccagttacctcggctgtcaaatggagataataatccctgctgacctcacggtcgctctgaaggacaaaagagaatcagttcaatccagtaaacaattctctctctccctcttactcccctcgcacacatgcacacacaccccacagatataatggattttagtttttaggcatcaaatgacttttgtgccttattaatattatccactgaatcaaaaacagcaagctgaaaaattcatctcaaggaagagaaaataagattgttgggaatggtgagaaaggaaacatggtttttgaaaattgattccagggaagataggctagtttgaatgccagtagggagccatcagaagaagtagttttacactgatttttaacaatattggagttgcttaaggcaatgcaatagagaggcagtttctgcccttttaaagcctgacttcactttctgaatgtgtgttctgatctagcagggttttttttttttttcttttaagatggtcccagcttgactgcattctcagatccatcagataaacgttagggcttcactgctgtgctgagaggccccagcccctggggttctctcatagaaacaactggaaagaaaggaaatgccttgggcagcagcagcagcagctgtcttctgattctgctttccgccctgccttccttaccaagagaaagtacagacacggacggcttgagtcacttaggcacttaggagttgtttttcacacgtgtggtgttttcgtcaccattactattgtgggaaagaagacaactcaggcatcgtttcgtattcactcatctgtgtgggtgacatgtgggttttggctcatttctgcatatttgtgtgcaaaggagagttttttagtaaacagtcccattacttagctgttcttgtaactctgaaaacccaactgaactataattaaactttgacttggtgactctgcaaacaggctatgattcttttgtttcttttctccttttaacccatagttgatgtatctaacctaacagaattttcagagaaaagaagtgaaataagaactaaaaataaatttttatgtctttaaaaatgagaggttttttttttttttttggcttttggaaggtgagtatcaaaaacctgtacttaatgttaccttggaattatttctagatgtttcttatatccttttgtcccaagtaaaattattaccttctcagtgcgtagtttttcttatttattacttctagtaccaagtgtagagctaagcgtagaggagacgcttcacaggtgcgcattgtcgtgattgcagacgcctgcctgtacttgtggggtttttctcagttttagtacgtgatgacttttctttctataacaggtatttgaaatggacatcgctaaacagttacaagcttatgaagttgagtaccacgtccttcaagaagaacttatcgattcctctcctctcagtgacaaccaaagaatggataaattagagaaaaccaacagcagcttacgcaaacagaaccttgacctccttgaacagttgcaggtagagcatatttataaagcagcttcctgaatcacaaatatatggtagttcattaactcaccaaaggcaacagcaggctgggctttcccatgaccagaggacctttcccaccctgatctgtttatagttgggatcaaaggtatcccgggagaatgggtcctttttattatggagcagacagattgtcctttgctaaggtcaggcagtcccagagctttctgagaggctgtttctgcacttaactcttttaggggacaggcccagagatgaacttggattcaggatgccgtggcctgttagctgaatgccagccgttgtcattactcaaagagaatctaagagcttttaacttctatgagcaaaaccagctaggtccacagagggatggtaaaggaggaaagtaacacagaaataaatataacaaaccagaagagatgataattctttgtgagtccttggtgcatatacaaagatttgattaatgaaggtctcagttctcccctctagaaacttccatttcaacacggatatactcaggtgaggacatacagaagaaagaccagttgagactgtgcacgcaggagggtgtgcagagcaagcactgaggtgcagcacggagaccagagctggccaggtccagcatcacccccacccccacatcacccaggcacactgcccaaaagaacacctaactgcggagtgcagctcttttgtcaatctgatggcatgaagcaaccatatgttctacttttttctactttttttaatgtcacaagtgtgtagcagtgctgtccctgttaaggagttgttttgagggtgtttttaaaagttgtttttgagtggctgtggataaaaatacatatttttgccgaaatttttatggtgttcctgggctgtcctgagaataagttccattctgatctaagcctctgatttttcttcatagaaagatgagctttgcagacacaagcttggcagcaaggtgagaaaggccagcctagtgagtcaagctatctgaaatgcattcctcccagcgggcattccatcccagcataccctatcagatatgtgaaagagaggaaccaagaccgaatgctattcctgcccagccctaataaccactcacattctgaaatttaacttctttttttcccctaagatagagatgtcctaactgaaaatatgcctgtatacaatttaccctggaagtctcagccatcactcaagggaagtctccagagggtgaagagcctgtctggcctgtaggggtacacagtgtaggtggtcattttaaatggcttccaagccaatgataggtccctgaaatataacatggtggaaacttctaataaagctcacatttgcattgaagtgtttagcttgttaagataggcagttctcaaataaaaggtttgttttattgggtaaatgaccttgtagttttttggtgacagagcatagaaagtaatttcatgctgctcctgtgctattgtttttgtgaagacagggagctgtgaaaaactgcttagctacctacattcctcaataaaggcatcagacagtaattggtgattacagatgttctccctggaatggtcgttctcttgaccaagtagtcctacacttctggaaggatcattcagaactgtggtctatgccaacccaccagtagttcctgagtccctgcagtgctgagtgctgggggccaccaagttgagtaagacactgcagctctcaaagagttggatctaggattgtattgtatcgatttgtggtgtttggatatagtttttccatgatcccctacgaaaatatgcctctcatatgtaagaatcatgcctcctccgtgtacacttttcagacactgacaaggaagggtgttcaatacagtactgaattttcatatagcttttctgggggggccaaaataccaaaatcaacccatttcctacctttattctgtccataaaattgttagaaatatcaaaatcccatttcattccctgttaaatacatgtgaacgttgtctagacgctggagagcaaattctaccacctcttttgttcagcagtacatcagacgattgcatagacgtgccagatggaaccaaataataatgcacatggatttgtcataatccgtacaagtcattgacgcccacactgagccaggtgctgtgggagacaggaccatgtgtgaaagagaagacatgcttgcttctataaaagcatcggtgttattgaggagacctgacattaatgcagaatagcaaatgaccatgcaaattaattcactactaactaagctgcaggttgcacctcggaatgcagaggggcttcaaagtgatgagggtaggccctgagccaggccctgacgatgggtggattttgaggatcagagagtacagcttagagagataccccaagtgggaccaccccttgcccagtaggctgacaaactaaggctcttggtccctttttcatattttgggtgttctagtggcccagccagagctagacttcgagtcatgaattttctggcacaagtgttgtcacattcaaaaaagtattttctttgtttgaaaaatgaaaaatatatatatatgtgtgtgtgtatatatatatgtgtgtgtgtgtgtatatatgtgtgtgtgtatatatacgtgtgtgtgtatatgtgtgtgtgtgtgtgtgtgtgtgtgtgtatatatgtgtatatatataccatttttcccacctaaaatggagcatggcaaatctggactggattagtgagatagaccaagtcacagagcactccaggatgcagctgtgagctggggaacaggtcagaaaggcctcagggacatcagcatacatgttggagtttctgcagttttcttagggaaccctttaatgtcactagagctaacacacttgtcacctgggaagcaagcctgccagagcaaattagagagacgagggacagttgctagaaagatacacctggaagttctatttaactagcattaattatgtgctaggtgctgaggatgtagactgagtgagatcctcattcctcctctgtagggtggaagagaggatattgcttgtctccatggctcgtagtgaacagtcagtgagaccaggcacataaacctcttagcagaacacttggcctttctaaggactccatatgtgttccggggtaaatgcctgtgtttcttgacgtagtgatgtcttgttcctctagacatcactaactttacacagtagctttagatggcgtggacgtgaataaatgcaacttaggttttcttgttggtttctttttgagtatcattgtgtttgtaaagaatttcagattagaggattgttaccacgtgggccttcaggaggaaactgttttgagtttttgtcagcccgaaatcgatttgtgcgtttaagtatatgtgctcatcaaaacaggccaggctctgctgcagtaacaaacttacaagtctccgaggcttggcacaacggaagtctttgtgtcactgacgcccacttcagctttgtgttgctgaagcattctttggccctatccgagctgtccctctggtggtggtgcctgggggtttgggttccctctgtgttgtgatccaccatctcagcatcggcttccacagcagccatagcaggagaagaaaatgctgggggctctcagggtgcttttaagggcctggccaccgacctgcaaggggtgcgagttgccttcctgtgtggccagaactgatgataaactgtagactcatccctgctgaaactcggctccagagtgctcccaaggctggacagcgtgtgggcactggatcccacctgtgttagcactggcaattgtattctcatttcttcttttattctccaggtggcaaatggtaggatccaaagccttgaggccaccattgagaagctcctgagcagtgagagcaagctgaagcaggccatgcttaccttagaactggagcggtcggccctgctgcagacggtggaggagctgcggcggcggagcgcagagcccagcgaccgggagcctgagtgcacgcagcccgagcccacgggcgactgacagctctgcaggagagattgcaacaccatcccacactgtccaggccttaactgagagggacagaagacgctggaaggagagaaggaagcgggaagtgtgcttctcagggaggaaaccggcttgccagcaagtagattcttacgaactccaacttgcaattcagggggcatgtcccagtgttttttttgttgtttttagatactaaatcgtcccttctccagtcctgattactgtacacagtagctttagatggcgtggacgtgaataaatgcaacttatgttttcttgttggttcctttttgagtgtcactgtgtttgtaaagagcattcacaatacggtggaatttcaaaagctggaagagctcgagatcatgcctcaggcaaaggcgtgggtccatcgttcttccgagagggtttgtgtggcgactacaccctcagcgtccctggcaaggtgcagttggctctcgcccattcttgttatggaaacctaagatgatcattgggaagatcagtgatcttgggtcattgatccctggctcagaggatagcggtttccatcataaaccaagatgatgagttcagcctttatccctcgtggttccactagatgtaacttaaaggagttaacatttgaggactttgttctacatcagattttactatttgaatgtttaagatcactttattgaatttgaagatcatcaaattaaataaaatgatttatttaatttggatatcctgatcactgtcaagtgaaatggatctctctctttggtatttaaggaagtttgtctttaaaaaaaaaatagagtgttttcatacatttttgcttatcccataagtacagttgatcaaagtcatagtaggtaaatgctttatgggacagctgacaccttttagaccctaccaggtattgctagcatgtgagctgcagttgtggggtctgagatatttctttgtggtagtttcatacccatactatagagtcatgtatttatttttgcctgttgtgtgatgtaatgcaatcatgttcctttgagtctccatcccttggaaatctgacttcttgcagaaggagtaggcacatcaagatattcaggggtgccccaagagtctgggactttcaaaaaaaaaagatcaggctgaaactgcagtcagatttatgacagctgacagtttttcagaggtcgcacacagtgactctcctctctcaggatgacgaggacctgtgccttcaacaagcaaaatgctgctcacggttgtcctgcttgcagccagtcactgtgtaaagcctctctgatgtgcacttaagagtgggttgctttctcacaaagatggggttctgtgcagtcacaggtcacttccttgacaacacaatcatttctgatctttatcactgtaaccacgtcttctattccataggagtttcttttgattctctcagttgcggggggcatctcttaatcctggggtaaaaggagagattgccatacttagactcactgtgagtctccccggccatttcacgaggagaccacagtgctgccaccagtgcctaaacaggtggctggcattcgagacttcctcctgttccctgggtcagaggatagcggtttccatcataaaccaagatgatgagttcagcctttatccctcgtggttccgctagatgtaacttataggagttaacatttgaggactttgttctgcatcagatcttactatttgaatgtttactgttggattttgggcatcttattactgttactcaaaaacattgactctgcatcaagaaagaaacaagaaagcaataaaacaagaaataattcatgctcacatttttatggtggttttttttttttttttaactttggatttttgcttttcagcccaggagtaaaggaatgccttatgaacacctgtggcctacgtgtggtcatgacccaaccatcagtgagattatttgagatattggtgtctgcatccagtgttgttatctgagtgtttattacgtaagttgtaacacctctacacagggtgtgagtttagcactgatgagaccagctccatcattgtatgtggcagtgagtcctgttacgagattgggttgggcagaaaggactgttgacatgagcctgtggatgtaggttggacagtctcagcctgtgactgactaggcaaggagcggagaggcaactgtgtgaggattctcagagccaaatttttaagccatgttttgggttatatttcccccaacactcatttgtgcacttggtggtgtcaatctttagatgccatttatgtctcttaagacattatgaggcctcaagaagtgtactactacctggaacaggatgggactctcttcagcttgcacactcggttcggctccctctcaggggtggcctgtagatagaacaacaatgtccatttggaggtttgtgtgtctggtttggtaaacaggagaagagttgctccaagtgccatgggatcctggattttgttacagaattagaccaaactcaactgtgtgaagcgctggagaagtgaagattcagaaggtgtttgaatcaggctaagtcaccaggtcgtctttcagaagcaaagcacaaggccactgcagaagtgggcctgggcaggtgacgtggcgggggctctgtgaccacctctgtgggtctgcagccaggtgtttagtggtgtgcctggggccaccctagtcagcactcaggaagaagagctggaggtgaagcagaagggaatgaggacaagctggaactggccaggcacctttgtgtctgtcacgttgctacaccacattgaacaatggtgatctcagataaaaatggcacttgtttcactttggccctccagatctcatgccagcaggtcttagagccaattctgaattagaccaccagggaaggggactctgggaaacacagttctgggttaaccacgttaacatagtataagccgccctgtttagttttggaacttgcctactttgaatgacagcatgcatgtatgagtccttttatacaggcccttcgtctaagtgtacaattagtgatccgtagagttcggactcagattgacattggcatcgagagtcactgatggtgcaccactggagatgacaaacttcagggaccacttctggcttctgggactgcctcccagctttcatctgccctgctctgccagctgtaggaagagctgactctgattactatttaattctgctaattaaaatccagcaactgtgggaaaataatttacaagccacattgtcttaaatctaaactctgctttaagggtttggcatggctcaaaataattctagactgggaagactggagggaacttacttctcttcatactagaaagtcacctcccacctcattttgtacatgaaaatgcttagtgaggtgtagagagtttcagaatcacctgatggttggctacaggatcagagtagatccctggccttctggctgcctaatagtgggcaccacccagctttacttcagtgagttttgggaaccatttctgatgacatcaatttacaaagcaaagagatgtttgcttcattttcacaaagctaacctgtattctaaagagcccaaatcgatttctctcctgaaatgcctctagcagctttaattgatagggagttaaaactgggaggctctccagtgagtgacccctgtgtatggacccagaggcagagaaattctattgcaacaggatttgacatgattagatataatgtttgttcttgacaactatttcttttttacctttggacttttgaaaacttgcattgtaatgtttttagaagaaacagatcaacacagaattccctttggttttataaaagagaaattccatcatgtaaactattttgctgccatctctagaaatgattagaatgattagagaaattcaagagttatatggtatggagcagccacaacggttatttggacaatttgaaattgataacaaaatattttaaaagaatgttcttagtatttaggcttcatagatatctctcttaatatctgtaaaaataaccatacaactgccttggttgtaaaccttagtagtaaagtgtttagatttctaccatgagatgtatgtttattaatcaattttgtgcatgactaaattgtattatagaagttttgaatgaggttaaaatacaatgtttaaaaatattaatgataaaatttctattcagtatttttaagaataatgagcacttcattactgtaaatgctttaaaactgtgattagtaattcagatgtcggttacaagttcagcttagttttatggttgcttttaatgcactgacttccaaaatttagtaactctaaatggaagaagaacacaactagtcacattaagtcataattgctcattcttcatttttcttcatcagttatgcaaaggtttttgtggaaatctgagtaatgaatttccatcttctctcatggccgatgacacaaatgtattaaggtttttatactttttaaccaaagactttaatacaccaaaactcttcatttggaaagttttgaacaaattataaaagcagtttccaggtttgtttgagtaacaccctcacatgatttttggccaaaacatgacctaacccatagaaacacttccaaacccttttctgaaaagcactctctctagcactttctccatcatcttttcctgggcccaccccatttggagcctttgctctgaataatcgtggtacggacagaggtagcaagttctagtctgaggcctttggccacaccgctacctgttcacctgcatggtcctgctgtagacaaccatctcgcccccagcccttccccgcagtgccaccgaagacttgtggttctgagcctgcaaagtgcttggctgagcagagcagagaggaactgaacagtgtgtgttaagaatggagcctgtgaatcactccttgtgaatcacggcactttatcactgccctttccttagacctactgaagacagcctggacaacctggcatggccaaggggtggggggacagctttgtacatcctttttcccagtcatttgcttgctttcctcactcttctgactacatcttcctgcccttgtttttctcttattccatatttggatggatgttgaccaatttggggtgtctcctttctggtcttccagaaatctttctaaaccctgtaactatgtttctaatctcttccaactgttggaagaggtgactgattactgttaaactcgggctttggctctcagcaccctgcagggtgacctcctgaggtgccatcgtgtggaaactgtgcagatggtgaagtaccatgttagggagatagaggcaagtttgcatgtgggtctgtttaatgataccgaatgcctatctgtgcttggtactctttaccaaggagggcatgatctatttattttctttctttgaaataagtgaatatcaaatttactcctaaatttcatatgttcaaatcatctaaatgggttggttattagaaaggatattagctttttcactctggatctgtctctcttcactatagccccactgtctttgcacagtgtggtttcacctgcctgcctctccatatccagctcggcgagcatgacgtctcccctgctttcactctccagccctcaactatgtaccaagccttgttctaggtcctgagatgacaaagtaagtatttgccatcgttgcgcttttattctagtgagggagataggtaattggaataagtaaacgaaaaatcaatcatgaggtgggggtgcctacctagaatattcagagaagactcagctgaggagctggtgttcaagtgagactgggaaggaacagctaacagaggagttgggtgagagtgttctgggtgacttattagaaagtggaagagtctcttccaaatgacaaatgattctatcctagctttgagtcttgtgccaagaccttaaaaaaaacacacacccactgctgtggtctgaatgttgatgttgccccatcccccctccattcatgtgttcaaatataatatccaatgtgatagaattaagaggcaaagcatttgggaaatgattaagtcatgagggctctacgctcatgaatgggatcagtgcacttagaagctggagatgtgaagacacagcaagaaggcgccgtccgtctatgaggaacagtccctcaccagacgccacatctgctggtgccttgattttggacttcccagcttctagaactgttgtttataaattatccagtctgagtagcccaaacaaactaacccacttagcacccacttaacaccatgtctctttcagatggcaagaaaacaccaatatttttagagataaatgttccattactgtgtagtccaataagtataaataagttcttggcttgatccacttacagttttaatggacacaagggaatctgctattcttaacttagcattaaactgcgaggaggaatgagttggtgaaatggacattgtagtgggcacctggcagggggtgaccttgttatctcagtttatgatgatgtcccctacagatctgacagccagtggacacagccctatcaacttcctgctgtgatcatctgcaaagggaacctaggcatcgggaagacattcgttaaagttcaggaaaaaattaggtgtgatttcatggcatgacagcctaaaagagacttttgtgaaattctacaaaagtaaatcctgactgttcaaattgcattccagggtactgagaaaatttgagcaaaaaaaaattgctcaactgctattagtatttttttggaatgagttgacaatggtggaaagaggcactggaaatgggaagacagagatctttgaagaaatatagagctagccaaacttcccactttatttaatgaggtaggaagtggatgatgtaagttatggttcgttgagcccagtgaaaagcttgtctgcatggatcatgaggatattcttgcagtcctccctttaattctcagtgccttctctaagaaagccccagaactgttcaggtatttctcccaaataatgtttgtttttaatccgatgtcaactgtgtaattgaacaggtgaccctattttaatttgacatttccggaacactcaaaaccaaattggtggccctcccattagcaaatgtgcaggcatttggttctgactcattttgaccctctccgattctactttattccagttatttcatgctttcttaaatctttaatatccttgtaaatcactgtaaaacatttgaggaacaagatggagccaggtaaatataaatagaagcgacatctcatggctaaaagcgcaggccctggagtcagctggaatccgaccctgatttcttgtctgtataatggaaataacagctatttcataggattattgtgcaaatatttatgacaagcactgagtactgtggtggacaccaaattaacaagcaataaatgttatcattacttatgatgacgtgaactaaatcagttatgtgagcttgagattggacccaggcaaaattcctcaacagtgcaaacatataagataggtgattccttaagatcatgtcatgctagcccaatgtaattttatgtttctgaaagcacagtgaccaaatggaagatgggaagctgtaggaaaatataccttgatgtcagcaaagcttttgacatctctcacaataccttaaataaagtcttattaaaacttaaatgagttaaagtgacatgagcagtaggagagttcgattgtgttgatttaataaaaccagaaagacttctaggttgtggttctcagccctggttgcacaatagaatcacccagagagatttttcaaagtaccagggcccaagggtgctccaggctaacacactcatgcactctggggtagggcctgggcggtttttagtttttaagctccccagtgaatttaaagtttagctaggattgaaaaatgctgtgatggataatggattgtggtgagcctaaaaaggaggagtctcactgagggtttttccttagccagccggtgcacatgtgtgtcatgtgatctgtatgaggccctagggaccatgctcttggatgcacggatgccactgactaaatgcaatgaatgacagacaggaccttgattgatgttgacaagctggccagatgacctgattcaagcaagatgcacttttgaatgtcaggttctaaatgtgtgtatagggcagtgggtctcagggtataggccctagaccaatagcctcagcatcttctgaaacttgttagaattgtattaatgggatctaccaacctactaattcaaaaattctggagggtggggtcagcaatcttttttcacaagccttccatgggattctgatgtgtgctaaagtttaagaaccactcacatagaagggggaatcccactggacaagtacagaatcagagacatctcattagcaacagcagtgactgaagacagagtctgtttattcttgatctatagttctgttttattctcgctttcccattgcgatgaagacctcatacttggcagatcacgtcacttgcttatctctgtgttctacagtcattgtataaaactgtttactgaaaatctgagtaattccagagactgttacatagtgagaaatgttgagtttagagcataatgacacagaaatagctgagaagaacagcagttgccatatgccaggcaccattatgagccccttagacgaatattaactcattgaatgaggaaagacatggtcatggttattggttgggtagcaagtgttgacaagtgggctcatttaacttccaatgcttttgataggtcactaggagttctgtgtgtctgagaatctttttgataattagtaaaatattaactagtaaatactaaaaatgaatgatcccttgcttgctctgccctctcagtatccacccacccccaaaaaggcaggtgagaggaggaagaaaaatctgcctccacacattgagggaacaagagaaggtaaagaagttgggagagactatgccaggagagctcacccagttccagggcatgggacaggtacgcaaccatctaaggacacacgtgggaaacaaggtgcccagggtggtagagcacagatacttccccctcctccagctcctggggaagttgcaggtcattcatttacaaagggaggcataaaccagagagaagaagacaacttgtggggcttaagaatgagttgcttggggaccagtcaaaagttgtctgaaagagctgtcatgacttaaggcaccttgggaggagcagtctggctacctcaaaatgcctagcctagatttttctgtggctgtggccagccttagccctccctgtttcctagactggggaggttctgaggcacaccatttcaaggattttgctcctctgagagattaaaaatatgttagcatgtgttaaggatgccagaaaatcctacagtaaaaaaaaaaaaaaccaacaaccaacaacctagtttccaccttttcagtatgtggtctttctaaaagatatctttccttgatatgttgcatgtgctaaagacttgcacacacaacagaaacatacaaaacaaagttttccaaagtcccctcaacctatatcctacttcccaaaagtaatcacttagcagtttcttatctcttcctccaaaaattgatatgcatactacaggatgaattgatatgcatactacagaatgtatgtatgtgtgtgtgtttatacagatattctttttttttcacataaatgataacactatacacactaatcagttaccttgctctttaaaaatatcttgggaatattttcatatcagtacatgtagataatgatagaaataatagttcacactcataaagagataactaatgaatgagccaagtactgatgagtactgtgtaagtttgtttcatttaatctcaaaactataggagaggtaccattattatcctaatttatagttggggaagctatctaaagaggtcatgcctactgcccaaggccaccaagcccagcagttcagactcaagagcccatgctcttgaccactgccactgcagtatacaaatccactccagtctttttttttcttttatctttttttttttttttttttttttgagatggagtctcactctgtcaccaggctggagtgcagtggcatgatcttggctccctccaccttcccagcttcaagcaattctcctgcctcagcctccagagtagcagggactacacgcccagctaatttttgtatttttagtagagacagggtctcaccacattggacaagatggtctcgatctcttgacctcatgatctgcttgccttgacctcccaaagtgctgggattacagacatgagccactgcgcccggcccacttcactcttcaacacctgaacataatatttctgtgcttggatgcaccacaacgtattgaaccaggttcacactgatggacatttgagtttatctgccttgagcatatctgcacataatacctttgtgaatctgtaaatgtatctgaaagataaattcagtgaatcacagcagcaaagagcacaaactgaagtcctgatccccatcccctcagatcaaccctgtcccccacagatctccgtgttggtcaatggcactgtcattcactcagttgcttagttgacccctttctttttctcatatcctacatccagtccatc

SEQ ID NO: 1650 - DNA, 3918 bp, Homo sapiens
cccggcccgcgatgtcaccattgttcagctgggtggccaagagcgatgaagtaacttgatttgaacaagatcacacagctagtttatggcagaacttaaaaagttcttggacacctgtttttgaggtgcctgagatcatcagctccatccgtcaggcggggaagatcgcccggcaggaggagctgcactgcccgtccgagttcgacgacacgttttccaagaagttcgaggtgctcttctgcggccgcgtgacggtggcgcacaagaaggctccgccggccctgatcgacgagtgcatcgagaagttcaatcacgtcagcggcagccgggggtccgagagcccccgccccaacccgccccatgccgcgcccacagggagccaggagcctgggcgcaggcccatgcgcaagtccttctcccagcccggcctgcgctcgctggcctttaggaaggagctgcaggatgggggcctccgaagcagcggcttcttcagctccttcgaggagagcgacattgagaaccacctcattagcggacacaatattgtgcagcccacagatatcgaggaaaatcgaactatgctcttcacgattggccagtctgaagtttacctcatcagtcctgacaccaaaaaaatagcattggagaaaaattttaaggagatatccttttgctctcagggcatcagacacgtggaccactttgggtttatctgtcgggagtcttccggaggtggcggctttcattttgtctgttacgtgtttcagtgcacaaatgaggctctggttgatgaaattatgatgaccctgaaacaggccttcacggtggccgcagtgcagcagacagctaaggcgccagcccagctgtgtgagggctgccccctgcaaagcctgcacaagctctgtgagaggatagagggaatgaattcttccaaaacaaaactagaactgcaaaagcacctgacgacattaaccaatcaggagcaggcgactatttttgaagaggttcagaaattgagaccgagaaatgagcagcgagagaatgaattgattatttcttttctgagatgtttatatgaagagaaacagaaagaacacatccatattggggagatgaagcagacatcgcagatggcagcagagaatattggaagtgaattaccacccagtgccactcgatttaggctagatatgctgaaaaacaaagcaaagagatctttaacagagtctttagaaagtattttgtcccggggtaataaagccagaggcctgcaggaacactccatcagtgtggatctggatagctccctgtctagtacattaagtaacaccagcaaagagccatctgtgtgtgaaaaggaggccttgcccatctctgagagctcctttaagctcctcggctcctcggaggacctgtccagtgactcggagagtcatctcccagaagagccagctccgctgtcgccccagcaggccttcaggaggcgagcaaacaccctgagtcacttccccatcgaatgccaggaacctccacaacctgcccgggggtccccgggggtttcgcaaaggaaacttatgaggtatcactcagtgagcacagagacgcctcatgaacgaaaggactttgaatccaaagcaaaccatcttggtgattctggtgggactcctgtgaagacccggaggcattcctggaggcagcagatattcctccgagtagccaccccgcagaaggcgtgcgattcttccagcagatatgaagattattcagagctgggagagcttcccccacgatctcctttagaaccagtttgtgaagatgggccctttggccccccaccagaggaaaagaaaaggacatctcgtgagctccgagagctgtggcaaaaggctattcttcaacagatactgctgcttagaatggagaaggaaaatcagaagctccaagcctctgaaaatgatttgctgaacaagcgcctgaagctcgattatgaagaaattactccctgtcttaaagaagtaactacagtgtgggaaaagatgcttagcactccaggaagatcaaaaattaagtttgacatggaaaaaatgcactcggctgttgggcaaggtgtgccacgtcatcaccgaggtgaaatctggaaatttctagctgagcaattccaccttaaacaccagtttcccagcaaacagcagccaaaggatgtgccatacaaagaactcttaaagcagctgacttcccagcagcatgcgattcttattgaccttgggcgaacctttcctacacacccatacttctctgcccagcttggagcaggacagctatcgctttacaacattttgaaggcctactcacttctagaccaggaagtgggatattgccaaggtctcagctttgtagcaggcattttgcttcttcatatgagtgaggaagaggcgtttaaaatgctcaagtttctgatgtttgacatggggctgcggaaacagtatcggccagacatgattattttacagatccagatgtaccagctctcgaggttgcttcatgattaccacagagacctctacaatcacctggaggagcacgagatcggccccagcctctacgctgccccctggttcctcaccatgtttgcctcacagttcccgctgggattcgtagccagagtctttgatatgatttttcttcagggaacagaggtcatatttaaagtggctttaagtctgttgggaagccataagcccttgattctgcagcatgaaaacctagaaaccatagttgactttataaaaagcacgctacccaaccttggcttggtacagatggaaaagaccatcaatcaggtatttgaaatggacatcgctaaacagttacaagcttatgaagttgagtaccacgtccttcaagaagaacttatcgattcctctcctctcagtgacaaccaaagaatggataaattagagaaaaccaacagcagcttacgcaaacagaaccttgacctccttgaacagttgcaggtggcaaatggtaggatccaaagccttgaggccaccattgagaagctcctgagcagtgagagcaagctgaagcaggccatgcttaccttagaactggagcggtcggccctgctgcagacggtggaggagctgcggcggcggagcgcagagcccagcgaccgggagcctgagtgcacgcagcccgagcccacgggcgactgacatgtgcttctcagggaggaaaccggcttgccagcaagtagattcttacgaactccaacttgcaattcagggggcatgtcccagtgttttttttgttgtttttagatactaaatcgtcccttctccagtcctgattactgtacacagtagctttagatggcgtggacgtgaataaatgcaacttatgttttcttgttggttcctttttgagtgtcactgtgtttgtaaagagcattcacaatacggtggaatttcaaaagctggaagagctcgagatcatgcctcaggcaaaggcgtgggtccatcgttcttccgagagggtttgtgtggcgactacaccctcagcgtccctggcaaggtgcagttggctctcgcccattcttgttatggaaacctaagatgatcattgggaagatcagtgatcttgggtcattgatccctggctcagaggatagcggtttccatcataaaccaagatgatgagttcagcctttatccctcgtggttccactagatgtaacttaaaggagttaacatttgaggactttgttctacatcagattttactatttgaatgtttaagatcactttattgaatttgaagatcatcaaattaaataaaatgatttatttaatttggatatcctgatcactgtcaagtgaaatggatctctctctttggtatttaaggaagtttgtcttt

SEQ ID NO: 1651 - protein, 929 aa, Homo sapiens
MRKSFSQPGLRSLAFRKELQDGGLRSSGFFSSFEESDIENHLISGHNIVQPTDIEENRTMLFTIGQSEVYLISPDTKKIALEKNFKEISFCSQGIRHVDHFGFICRESSGGGGFHFVCYVFQCTNEALVDEIMMTLKQAFTVAAVQQTAKAPAQLCEGCPLQSLHKLCERIEGMNSSKTKLELQKHLTTLTNQEQATIFEEVQKLRPRNEQRENELIISFLRCLYEEKQKEHIHIGEMKQTSQMAAENIGSELPPSATRFRLDMLKNKAKRSLTESLESILSRGNKRLQEHSISVDLDSSLSSTLSNTSKEPSVCEKEALPISESSFKLLGSSEDLSSDSESHLPEEPAPLSPQQAFRRRANTLSHFPIECQEPPQPRSPGVSQRKLMRYHSVSTETFRKDFESKANHLGDSGGTPVKTRRHSWRQQIFLRVATPQKACDSSSRYEDYSELGELPPRSPLEPVCEDGPFGPPPEEKKRTSRELRELWQKAILQQILLLRMEKENQKLQASENDLLNKRLKLDYEEITPCLKEVTTVWEKMLSTPGRSKIKFDMEKMHSAVGQGVPRHHRGEIWKFLAEQFHLKHQFPSKQQPKDVPYKELLKQLTSQQHAILIDLGRTFPTHPYFSAQLGAGQLSLYNILKAYSLLDQEVGYCQGLSFVAGILLLHMSEEEAFKMLKFLMFDMGLRKQYRPDMIILQIQMYQLSRLLHDYHRDLYNHLEEHEIGPSLYAAPWFLTMFASQFPLGFVARVFDMIFLQGTEVIFKVSLLGSHKPLILQHENLETIVDFIKSTLPNLGLVQMEKTINQVFEMDIAKQLQAYEVEYHVLQEELIDSSPLSDNQRMDKLEKTNSSLRKQNLDLLEQLQVANGRIQSLEATIEKLLSSESKLKQAMLTLELERSALLQTVEELRRRSAEPSDREPECTQPEPTGD

SEQ ID NO: 1652 - DNA, 44405 bp, Mus musculus
atggatggatagatagatagatggatggatggatggataaattgaccgaccactatacagtggacctagatcaggggtaataaaaaaaaagtctcagggagtgagaatacactagcttatagtgtgatcttcaaaaagggaatgtgcttaagaatacttgaggaagtagtaacttgatgtggagagaggaatgtttgtaagttcagtgaaagaggagatatacaaaatagttgacaagaagcagtttcttagtggtgattgtattgtgtgtgtgtgtgtgtgtgtgtgtgtgtgtgtgtgtgtgtgtgtaagaaagggcttcagaaacaaactctattaaaacttaaaagctgaaaatctagtttgtggggattgggaaatctgagagccagataccagtgctgtaggctcacggccagtgccttttggctgggttctccagaggctcagaggtatcagcttttccaccgtgtccttaaaaggtactaatttcattcatgatgcatccactctcttgacaaaattacccctcaaaggccacacttccaaatatcgtcactttggggatctggctttagaacatgaatctgcgagaggcagatccagccaaggcaatgctactagaaaaccagtaagaatgcatgactctggtcagtggtatttcatacgagatcactgggtaatggtcagttggcctgcatttgggggcatttgcttcctttactgatctggtcaaattctggaaaacattaatcataaacccaattcaacatttaagttaaaatttcaacattggaaaagatttaagttatcaaaaagaattaagtgttctgtgactttgtcttagtcactgttctattgctgtgaagagacaccatgaccaaagcaactcctacaagagagagcttttaactgggggctggcagtgtcagtggtttagtccattatcatcatggtgaggagcttggtggcatgcaggtaggcagacagacatactgctggacaagtagctgagagctacatcctgatctacaggcagcaggcagggtggaggtggagggagcacacttatgaaacctcaaagctcactcctagtagcacgatgcctccaacatgaccacaccccctaatccttcactcacagctcatcaactgaggactaagcctgcaaatgagcttatgagagacaatctcattcaaagcaccacagacttcatgggtaactcacttcattcaagacacagatttctaactttgctacacaaaatattttcagtagttcacaattttcctttaaaaatctgggagatggcttagtggttaagagcactggttgttctttcagaggacccaggttcaattcccagtacccacatggcagctcaaagctatctgtaactaatataggcatacatgcagtcaagacaccaatgcacatgaaataaaaatattataaaaatattagtgattgtgctgttatcgcttcttcatggcctgccatttcattcatcccatgatcttgctcatggctgatgttcaataaatatttgaatatttgttcactgaatcacatagggttaaacagcactagcatatttcctgggaaatatgacaaacgctggaaggaacctgaggccctctgtctcttaatgaagagatggcttgggagctctgggtcttgaaatcgaatggtacttaaattccacttttaaaagaatgcctaatcttgaaagacacagaaatggagactgtactagaaaaacaacatcaacaacaacacctaatttcttgaacttgttggcacacacaacataaaatgttctggcgagggtgcttcactctgggaaagaatcctccctgcaggttctctgcaggtcctaagtaaacaggcagagaaagcaaagagcaggtcttaaaagtcccctgagctccgaagagccggaagttgcggagggtttctgtgaaacagttttcctgacagaaacccactgcacgcacgaggctacatgcgtaacacctgagaaagaccaagccacttaggattccaccatgggtttgcggaggaactcacaaagctctcggtacccaaactgaggggtaattagcaactggtggccttagtggaggagtgtcccaggctgctggggaggttttcctcaggtaggttgccccgtttccagtgggtgaatgtaaccctacgtgctgcacagcaccacagcaccaattctactcagggactaaagaaaaaggtatatgaagctgggagaaagatttggtggctgggatctgagaggatgggaggggagggactagatatagatgtgattaaaatatgtatgaaactcaaattatatgcatatgtttatcaaataaatatatggatgcatggatggatgggtgaatatatcctttaaaacaaaacaaacaaacaaacaaacaaaactacatcgctggggctggagagatggctcagaggttaaaagtgcttcttactcttctaaaggacccaaatttggttcctgacacccatattaggtggcacagaactgtatctcacttcagctcctgggatccaatgagctcgtgtggcttctttgagcatccacatacatggcgtgttcacacatgtgcacacatacatacaaaataattataaataaataaataaataaataaaaatacaatttgaaaaaacgtttaaaaatacaacaaccataggttttgttttgttttgttttgtttttttcacacatctaagatccagtttctgtaactttaattaagaccttgtactttgaggaatatggcgtataaggaatgtgggagtagctgtgaaacacagtgtgaatccattcagggatactctgggaggaaaaaagatgaactggcatccacatcagccttttaatattcattattatacgtgtgctgtaacttcctgagttatagtttcagtggaccaataaaaatcgatcaggggccatctccaagagacgtggtagagaacatctgatatttggggaggaggtgagttgttctcacaaacagactgattcctttcaccacatatctctgatgctattttttttctctcaatatccaacattatcttcaaggattcagaaaggaatttaattctgaaagagatattatattatacattagaataatgaatttcaagtactgtgtgtgtaattttttcttctaaatgcaagtggttattaacatcataaagttgttttcaatgctgagggttggatgttggcctcgcccccctccgcccccccaatgtgctaggcaagggctctgccctgatctacactcccagttggattcttgtatttactttgaacagggtttcgctgagttgtcaggtagaccttgaacttatgatgatcctgcctcagtttcctgtgtctgtgaaggccagaagagggcatcagatctggaacaggagtggtagctactgcgctgagaacagaagcccagttctcagcaagagtggccaagtgctcttaatggctgagccccctctccagccctccatacagcaccgccacacacacttcatatggttgagtctccatcccttccccagcactgtgacttttacgtgcttctctgaacctttcttcccttttcatacgcattaagaattctttatgtagccaggtggtggtggctcatgcctttaatcccagcaatcgggaggcagaggcaggcagatctctgagttcgaggccagcctggtctccagagtgagttctaggacagccagggctacacagagaaaccctgtctcaaaacaaaacaaaacaaaacaaaacaaaaaacaaaacaaaacaaaaaactgagagagagagagaaagagagagacagacagagagatagagagatccttatgtttttaaattgatgtttccttcctcctgaggtcatggttgttggtttgggaaagttactcttgcattcagtctctgcagagatgggtgagagcagcaggtagattctagagacacgtgattatttataatggtgtgcagattgctcctgttctcaccctcttctacaagacagtgccttcataaattgctgcatgaaaacttcatctaaagagctcatttaagacaaaggagacaggcaattctactcactcaatatcaataggccaacactatggaaatcagtgtgtggcagttcctcaggaagatgggaactaatcaatctccagatccagctctaccactcttgggcacacccaaaggacactccatcctaccgctgaggactgctcaaccccggtcattgctgctcaatctagaatagtcagaaattggacacctagatgtctctcatcagataaatgggcaaagaaaatgtggttcattttcacaatagaatgtcactcagctgttaaaaaactgaaatcatgaaattcgtaggtaaatggatggaaccagaaaaaaaaatcattctggtgaggtaaccgagaaagacaaatatggtatatgtccacttgaatgtggatattagccattaagtcatgattactaagctataaaccactgaaccacagaggttaggtatagagtaagggatggggtggggagagcagatagatctccctagtaaagggaaatagaagagatgggggagggggagagaagaggttgatgaaggtttgtggggagagacagctaaaattaagagccatctgaggggtagtagcttcctacatatatgaaggcaatctacatgaaactgacaaataatgggggagacatgtccctaactagttatcttgtcactaaatgaagcttccagtactaggaaagggtacatctaattgagttgttggccaaaagggttccatgagaaaccacaaacaacccagggtttttggcaagaagaagactatatagtttgttctccacaaaatgataaaaatgtcctattgctgaagacacatcaaatctctctcatcaggactcagggaatcctgctgaagaggaggtagaaagattgtaaaagccagaggggatagcagacaccaaggcaacaaggccttcaaatcaacagaatcgatgcacatttgaactcacagaggctgaggcagcatgcacagggcctgaataggaccagcgggggtcctagagctgaaaggagaaatggacacaagccccatccaagctaacccagaagatatctctgactgataaccacttacaaaagaaactttaggctgggcagtggtggcacatgcctttaatcccagcacttgggagacagaggcagacagatttctgagtttgaggccagcctggtctacagagccagttccaggacagccagggctatacagagaaaccctgtctcaaaaaaaaaaaaaagaaagaaagaaagaaaagaaaatttagtttttttccaagagaatctcagtggggaaacaaactacttttaagggtaggtcacatgcagaaaatgaactaaaatggcttagagtagtattcctaaattataggtcaggacccctttgggaggaggggagaataattttatggttgggtgtcatcacaacatgagcaactgtattaaggggtcgcagcattaggagggttgagaactgctggcttagaggttccttgtcttgtaatgttgtgtcaaggctttttttttttaatctttaaaatgtattattttatattcatattctctctctgtctctgtctctcactagagtaccctacaggtcctgtgtgtgtgtgtttatatcatggcttctagtttagtgtttttatgggattcctgagtgtgcaaaagagttggtctctgcatctggatctgttccttgtgcctttcttgggctctttctcttctgttttatgctatttgaatatgttagtttttgttgtatcatcttttattgttatctcttagaagccagtttgttttctaatgagagacagaaagaagatggatggagaaaggagggcgagtgtggaggaactgggaggaggagagggagaggaaactgtaactaggatatattatatgagaaaaatatttttcaataaaagaaaaaaggatgtattctaatataaaaaagattaataggcttatcttctttacatataaaaatgtgaacacagcatttctatatttcttgaaaaaattaagtatatcaaaccagtgtatattaatttgattaatttgtgttgtttcacaagtgtctgacctgtgtgtgtgtgtgtgtgtgtgtgtgtgatgctcccagaagccagaagagaacactgaatcccttggaactggagttactggtggtcattagccacagtgtaggtagtgcaaattgaacataagtcctctggaaaagcacccagcactctcaaccacaaagcctggaactcactatgtagaccaggctagcctcaaacactcagagattcacttgcctttgcccctcaagtgctgggaccaaaggcatgtgccaacatgcctagcatgtctaacaagaattttaattatcccttctccaaaacaaggcaaaacactttagaaaccaaagtaaaaactactcactagaatgggaaaaaaaaaaagattaaaggcaaaccaaaaatatagtgtttttattctataatttaacaaagccagaaatatccacagggacaagtccaaagtggtccctgaaagtacaggcaagtgtggagtaggtcaagctggggttgagtcctagctgtgtctttctgtgtggtcaaccttagacatctactgtcttccactgcacaggggcagcaaaaatacctactgtatagagtgatttcaggatttaaaaaaaaaaaatgatgcgcttattgccacaactactacatcatgagccatagtctcaaagtccatgtagaagggtactctaaaaacttattatttgggagccattcctaatcaatacatttgtctttataagacttcttttctcaggggactttataactttctactgtgcaacagtgcttcatgtaaaatacagttatcaagcaagaaaagatcccgaaccaatgtttaacgaatgagtggtggtgggttgagagatggttcgggggttgagagctctggatgctcttccagatgacctgggttcaattcccagcacccgcatggcagctcccaacagtgcataaataccagggatccaaacacatgcaggatgtctagacaacacatgctgtagaacagaacacccattcacataaaataaaaggttaaatttttttaaaatagtgaagaatatatttttctttagacaactgacactggtttctagaagacacaccatcacagaaggcctatttcagggaatgtcccaaatacacaggtctacggaggaaggaactcacatggctttgggctggggtgggcacagcactggcaggtgattcgggaaggatgctaggtttattttcaaggtgatgaaaatgttctgaaatggattgtgatgatgagtgctcagcgaggtgaaccacatgctttaaatggatagtttacgtgtcaataaagctgctactgggaaaaatgggaaaagagtcatctagtatctccatgcgtaacctcctttgaggttatttctgcatccagcaggacttacattcttatggcttttgatgactattttgccaagttgtttgatataagagttaagccaatgaaacataaccaggagtatttaagagctctcacttaattataaactttttttttgaagttcatgaatgctagtggccatttaatccacggtaagatatggagatatacacgtaacaccaggcagctgagaaaccactttctgttgctttatcttttacctcttatgaacaatgcttctgtgaccatccacatagaacttctttttaagaatgcatattttatttttaattatgtgtatatatgtgcatgggagctatgcacctgcgtactgcaggtcccgatggagttcagaagaggggatcagatgactaggagtgaatcactgtgagccactgtaacttgggtcttgtacttgcccttaactaatgaatcatctatccagctcccatatatatgaattcacacacacacacacatacacacggccactactgctgtgctacactcttacccagtcttccttgaagaaatgagaggcagaaacgattccacggtgtcacaatagttgtgccacgataagttatgcagaaaggccatactcttgagacttttatccaggaaaaaaaaatgttggtcatattaaaaaaaaaaaaaagaacgtgtaacaatacagaaaaagactagatgggggtgggaaatgcaggcacacgtagaacctacttaaaaccctccagtgcttcctgagccccgctgtgccctatagaatcctctctgacctcagctttctgccccttgagtctcagaggcaatgtaagcttcagtgctttccatatgttgcttcctgtgcctatatttttctttgcccagtggtttcaagactcatcttaaatgtcacttcctcagagaaacctttactgagagcccagagcaggttaaaggcgtttccacactggtctgaaattttccatcttaatccttctgctactgacacttgtttatgaggtcagaaatcaaatactgagagcctttcacatacagaaatgcagtataaaacaaactatacaagatccaggccatccatgagttcatatggggaggggatggctatagagtaaaacagtcttttgggtaatttcatacagtgatcaatgggtatctctgtgcctgagttgcaaactccttgaagacaggagccttttgttttcaagctaattccagttctgtaaaaacctgatcgggttttttttttgtttttgtttttgtttttttccagtgatgtaaaatgaatgcttgactaggtaaatggttaagttccaggtctccccttcttcccaaagctatctgcattcttttcataagtagaaccattgtaagatttgcaaaatttaccaactggagtaaaaagtactcaagtaaataaaacacatttagttcacattcgttaaggacctagttagtgataaacaggaccctgaaatactagacatactggctcatgactagaattccattggcgcacagccaagccgtcagtagtctaatccactgtttttacaagtagccttaagcacgcaggatatgatccccttaattttcttaattctaaagtgcttcagtctcccatcacccacaggatggttaaaaagatgcatgtccttactcactaataggaacgggacaacataattttgcgtaaggtcaacaaagaatgtgatctttacacaaaagatctccatccacgtctaataaattcgttcaggagggctaaggacaagttgggctgggaaacactgggagactctaggttgggcgcaggcgctcacccagaaacccttccctgaggctaggctcctttctttccagaggcgcatgcgcagcacactctccggccactgcacgcctcctcggctaacaagcctcttacgtcaccgaacaggcggcgggggttcttccgcgcgcccgagaaaaaagagtccgcgcacctttccttctctttgtgcacacaaaacgcactttcccttttcatcccagtcccagcgccttccccaggtcgtctccggaagctcgtctttgttcaaactctcctgtgcgtccataagacacggaagttcgtctttgttcaaactctcctatgcgtccgtgggacaccggaggtggccaggaagagacgagaacactggcgttgtttacagacacgcgcggccgaaatcagtccgcgagggcggggctaggcggccggcgctttttcgtacgctcctccctccccagccttcccccgcgagcggacgcgccagcgcctctgtctcgctttttcttattttctccccctttccccttccttttcttttcttttttccccttccccccttccaccatttcccctcggaggcgtttccctcgggcaggggcagagccggcctcaccccgcgcctctccccggcccccgccgccctatggcgagagggcgccccctcctcacccgggcaccagcggcggcggtcggaggagcgggaccggcggcggcggcctcgggcccagggtcatcatggaactagttcgctgagtgacccctcggccgcagccgtgcgtcccgcccgagtacccgcgcccgccggcccggtttgccctcttctccctcctcagacggcccggccctggtcccgcgcgccccgctgccgcgcgccgaggatcatgaggtggtaacgggcccccggatgaccccgcgtcaccactgtgaggcctacagctctgccggggaggaggaggaggaggaagaggaggagaagaagaaggtgagggcgggggcgcggcgcggtcgccgtgcgcgccgctggagtgggagctcgcgggggcgcgcgccgctcccccgaggaccggtcccctcggcgaacctttcctgggcacctcggggaccccctcgccgtctctggcagcgctgcgtgggtttcctttgagcccggcctttttttctttttttttttttttttttggtccccaagtaacttgtagccacagcccgtcaccgactggggtgccagttccaggctccgcgagccagtgctaataaagaaggtgacacacccccacccacagaagccaccgatccctcgtgaccaccgaacataatttaccgggcagagtattgtgaatgtcaagccaatagttatcttcctctgccctacccccacccccccgccacccacacaccgcgcgcgggagtgtaacgtcgtctagggcttgggccggtggaggaaactagagaggtgagggaactgagttgcatcataaaggacagaaaaatgccgaattttgcaagagctaaatgctctctgcagagttagcctgctccaccgcaggtcatttaggcagaagttgaacattgtgtagtaaattcgtggaaagtgtgaggtaaatagatcaacgaggtaaatggatcaactgaaggtcttagaatagcaaagtaaaatacttacgtttcactttgtcagtgaagagccattgagtgtttgaacagcagcctggtaaacctagaaactttctggacagctagggatggagacatacacacacatacatatatgtatgtaccctgtcttaaaaggggttaaaaaaagggttaggttaaaagccaagagtatttgtttattctggtcaagtaattcttaaaaattaagagtattcaacctacctgtgtgtttgttcatcttttaaatggatttagtaattccaccatcatagggttaaacaaggattacttagagtaatatgaacaatagctagccaagtagtagcaaagcattgagggctattgataagcacctgacaagggtaagctgtgatttggggggcagggaggtacagtgctaaagtttggaaactgttagtggtaaagatactcatgattagttgagaaagcaggtctagcaatggtcatgacagtaattacatacaaaggcaggattatgtccaagtatggatacagaaaggcagggtagtgtgtttctgcacaattctagacggtgatgtgggatcgcctatgacccggtattgctggttcataaagtcaaggagggaatagtagctacaaaaaccttaaaggctcacattgatcttctctgttcagaaaaggaaggaaggaccagaagtcaacagtcagtacaggattattaatagagttggcattgtgatcaccataataggataattatgtattgatgaagcttgctattaatgtggttgtttaccggcattgtgttccactcttaagatcagggggtcctggatgtatgttggtagtacagtttgatgtaaggtaagcattatgctagcttgttaatgcaaaatctaagccttttaataagcatgaacagtatagaagtatttgagacaatgggaggaatatgtaaagctattttaaatgttaaggaaaatttaaagtttaacagttcatttagaatatgccaagcaaaaatcaaattgagcaccctaaatttgtggaaagtaatttcataagttcacaagtgaaaaattatttttaaattatagaaaattatctggcatatatataggtatatatggatttcatatttatattggattcccttctaattatgtatatgtaaatattctaaaaccacacatacaatatatgaaaaaattggacacattatataagggatgcccaacctctatagcccttttgtttttagagactaaaaagataattcacatttgtgcatgtaactaatagtgggtaaagatgaacaagaaacaataaaattctatcattaaaataagagttgtcctgagaggctgaggtggggcattcagggctggcctgggctacataacaggaaagttctcatgacacttttaagggtttatgttagcaaaattccttattcatttagcttaaatctcttatatgttagaggatagacctgtaagttttctgtaaaaggagcaaaaactgaattccctgctacctgtgagcagctgtcttaaaggagtgtaaaaatgtttctcctacaatattgacaaataatttacaacttaattctatgcatatttaagtttttgcccactttatagtcttgtgaatgtggtgtatactcctggactctgtaccctatggataggagtgtttccattcagaatcacagcacagttaaatttagtaaatgtagttctgaggcctgcagtcagtacctctttaggtaatgctcctgaaaattgccttgtttttatacaggatccaattcagttaaagctgcatttaagcctcaacttcttaatactaattctcaattgattcagtgtttttcctcatcttgtgtcaacagctaattatttgaaaagcccaggctgataataaatgtgatatgtaaccaagggtgactttgaacttctcatcctcttgtctctacccaaattgacaggtgtgtgcacaaggcctggtttacagttctgtttgttgttgttggttttgttttgttttgttttgttttgttttttaagtttaaggacattttaaatttattttaaagaccaagcctggctgtgtagcacaggtcctcagaagttctgagattacaaacatgcaccgcttcctatgcttacattgtctttaggtggaggttaagtaaatgatttgggatgttttaatacaagcattttcaggaattaattttccccttaaccccactttctttgtatcttatacgttttaaatttcttcatttttactcatctcagaatatattctagattttttttttaataacatctgaacatttgaaaatcttactaaggaccttaattgtagagcagaggctcccttaaagcagtcttcaccctcacgtgacttcaaatgctttaatgtaattcttaatgtatttaagtggtaaataaaagtaatgacccttagtgattaattttatttcacttctagggagaatatttgggataactatatctaagaatttctaataaaaaaagttagtggtcttagttttacacaatactgaattataactgaatttcaaatttaaagtgaggttactttagatgacattgttgccaactttaatatatggtattttaaagagctataaaatcgtatactgcctcataacattcttactttgttttataaattgcttaataagcattgacatttataaatgtgtataacatacttattctgtaactatgtgatgtacattatttgtatttgttaataggtagctacatcaagctgggtggcaggcagatccaaagggataccatgaagtttccaggacctttggaaaaccagagattgtcttctctgttggaaagggcaatctccagggaagcccagatgtggaaggtgaatgtgccgaaaatacctacaaatcaggtaatttctcactcgagacaagagctcgttattagatatacactgttgcataatgtgatgctacactgggaatatttgtactgttaaacatgttctcagctgtgtgtgctgatgcatatttgtaaccctaaagcttaagagagttcaaggccagtattagatggaggctagcctgacctacacaagactgtgtctcaaggaagcaaaaggctcgtttagaaacatcatctttctgaaacaaagcagataaaacttttttatctgatttaatgacatccattcattttctgtatagactaatacagccataggtttctttatttctaattgtgtagttagtcatgaagagggaaacatcttcatagtattaagtttagggaacaacaacagcaaaaatctcttgtcaatatttctaaggagttcaagtggattactaggtaatggcagtgctgaaagtcttgagatattagctgaactctttgctgttgctgtacactttttaaaaactattttatgtctgttagtattttgcctggatgtatatctgtgtgcctagtgcctttggtggtcagaaaaggcccctgggactggagttggagatagttgttagctatgtgggtactggaacttgaactcatgtcctctgcaagatcaacaagtgatcttaaccactgagccatcactccagtcacctatacacttttacttttagacattttacactttgatcatattctggaagataaattttaataactaaaagttttatcttaacagttgaatatgtaaaatttatacatctttttatcccttttgtctcataaggtgcttggagtgcagaagagtagccaagaaaattttaatgttgccagtgatcaaatggcaaacagctgttttacattagttttagatttataggctgttgaagtctgcgttttctggttctacccttaactcttcctacaagctgaagaaatctgtttcacatttactgtctgtcattgtgcacattgaagactagttgactttgaataagtactgtctgtggttgaaacacttagacactatcatttagtggatagtttggttttcttaaattaggcacagttctgtgttgttcaagacttcgatatcaaataatagttataatttgaatctttacttgaggcagactcttctagttctacttttccatttatttttgtatgtatgtgtggtttagatttctttaaatgtatattgaatatttgctatgcttccaggtacaattctacacactgaagatatgaatggagaaaactccaaatttcttgactctgttagaatttaaaacccttcgacagagttctaagaagagctctgtctttctcctttctcctgccatctccttaaatcagtatgtagctaaccctaacaaccatttgcagcacagctgtgaaggtgacattttcctgtgactgcagtaaatggctgagttaccatgttgcctggtcttttaacatgtagccaagttaacaggtatcagtgaggtaataccagagcacaagacaggatcacaacttataaggcaaacctacctttctccttctccctgtctgaaacaacttcttaaacagcaggacaactacaacacaatttagaatatttgtaatttggtcacaaagaaagatacaaagtatttatggcattgcttacagattctctttccttacatttatatattatctctgatattgattcacttatcaaatagaatatacaaactacatttttaaattttgttaaagaatgaataaaattctttagccaaatagtttagtttacagaaaattctgggacatgtgagataaagtactaagattaacacttacatataatatacacaaaacccctatttatgattctgatactaatacactcctttttttttattttaaagatttatttcatgtatgtgagtaaactgtcactgtcttcagacacaccagaagagggcatcagatcccattactgatggttgtgagccaccatgtggttgctgggaattgaactcaggacgtttggaagagcagtcagtgctcttaaccactgagccatctctccagcccactactacactcctaatttatgtatgtatgtgtgtgggtgctgtagcatttatgtggaggacaaaggacaacatgtgggagttggtgctcttcctctccttaggggtcaaacagcttgctaggtctgagctgcaggggcctccacctcctaagccatcctgctgaccctaagagctgaccctaagagcaatacactcatacattttgcaaaagttgatctgagtactacaagtaatccttgggaccaaactctgaactgggtgcttttaacacgaagcttgctgctgtgtgacagacttcctgaggaggcacaatacatgtctacttgtccccacaagtagagagatagagagcccacaacagatcaaagtacagatacccctaaagtccttggtaaatcagtgagctttattggagttacttacaggatcaaaaacgactcaatagatatatcaaagtccaccccagcatgggtagcaactcaaaaaggctgaaaatagggcccacactgcacagccctgagcagccctgagcagcatgccatggtgagggaagaagagtgaccctttcccgtggctgagctagtcctcagcctttcccaggcagcttttctaataccagggactagaatgcctgtatttttagataccaaacgggttattttgtactaaaggagttattgataaactttcttcatatgacaattcagttctctagaaaaatctcaaaatatacacagttttttgttttgaaagcagcagctccagaaaaaggaaatgggcttgcttcagctagaaaagcactagagatggtacgaggttttgcatatatcgtcgtaagaatttgattttctaattttagctttccatctttttccttatgttcttaagaaagatttccaagagtgtattggaattccaacattgtcatgttctttttccttctgttccacctgattttcagcatcaagttgacatcagtgttcattattttcaaataataaacttggaagccttggatactaaatctttgaatggacttttggttaaggcacccagagtgagtcatcaggtcgggacactgagaaccagcagatgcaggcttttccacccttcctgtgcactgagagcagaggacctgtgattgagccactggagagatttcttgacgatcatgctgattaaagcaattaaaagtctagtcctttttattgatgggcagaccaagagcaggcttttgcctctgaaaagtctcttggtgccaagcttagggatacagaggttataaaggcaaacccacaaagaccataatttatatcaaagttagatgggggtcggggtaaccttgaaatgttcattcctgtcagagcattgtaattattttacatgtaccatgccaatcatttttgacttacatcttttctagttattttagcttagttactttgcttaatacatctggaccatagtcaaggcgatgggatggcaaggcagatgtgaccgttaggggaagaggggatgaatccaggacggatggcgataaggcgttttacctattttaggacttgctttagtaatgccaaatagttctacttagtactagaactttgagtgggcttggtctgaggggaataggagaggatatggatttaggcttaaaagagcagttctaattcctggttatagactggcctttctcctgttacatagttttaagagctggtaaaaataggaaagtgcttttttttttttttaagagcttccttttatgccacttgcttctgcttccttttacttccctttccttgtcctagcaaggtcattctcacagctcgttttttaattttaactccaatatccagtgttgagcaaaatgtgtccaggcaagagaatatccctgttacgcctgtgactcccctgcttctcccgtagaactctgcacttcccttgtggtaacacagtataatctgactgagtttccttggtggtgatgttgtgtccttgttttctgaaacatttgttactctttaatgatgttctgagtcagggtctcaagtagcccaggctggctcagactagctttgcatgatccttctaggtctgtcggtgagtctgggttttaggtgtgtgttagcacaccagttgaacttttaatggacagcttctttgtaatttattcattgttggtctgttgtgtgttctttggtacttacagaaaagttcttctgtagagtagttgaagtttgtgcattaaatgaatttagggaaaacttaaaaaacactttcagataatctacatttattttgctgaagtctttttgattacaaagaaaaccctgtcacaaacttcaaagtgatttttgttggtattttgggacactaaggagtcaaaggctatctggttatatagttttgaaaaaacagatgtatgctaaggacagctgagacatacagaggtgtgcatgaatcacttggcaactagatagatgaggattgtctgaaagttgtaaaaattgaagtttcagctgggtgtagtggagcatgctagtgatgccagcatttgggaggctggggcagtaggatttcagaaacttacaggccagcaggctaagaataacaccctatctcaaaagagacaagggatcattttagttctcatatccagaccctttgaataatagtggcaactgttgaattttataataacttttctgctcttgtgggggtggctacacccttcatgtgggggtgaggactgactgactcggttttctgctttactttcattagagctccaggggttaaacttagatcagtcaagcttgaattgcaaggtcccttacttagccactttcctggccctagaatttgtattttaaagctgcttctttcttgtatttgttgtatgaagtttgggaacggatctaactgtacagtaaaaaggaacattttgtttaacatctaactactgatagtgcagtaatgttcctctgctttttggtccattataagaaaagttctaatttctaattatttcaaggcttttcctaaattggacctcagaaatacttctactggacagctcacaagcatgagaaactgagtttaattccccagaacccatgtaaacattctgggtgtggtagttcacacttgtagcccagcattggtgtggcagaggcaggagaacctctggagttcaaaggccagcctagcctagttaggcacttcaggccaatgaggaccctgcttcaaaggaagtaggtggcattcttgatacccatggttgtcctctggcttagatatgcacaccagtgtattcacacacaaacacacacacacacacaaatcatacacccatgcacatacaaatattgcttctaatcacttagtgagttctggttccatccatgtagatagtgcagagtaaatctgtgttttaaatgatggctctttatatatttaaagctagattttacttccacaaagtcatcacacatcttattcattagccatttttcatttgatcagacttacccttctccattccagtattttctttctcagactcttatatttcttttcttttcttggttgtttcttttttttttttttaagattgtaatgatctgactttattttacactaggtaaggggcacaaagcaatctttaataaattgacaattagcttcacttagaacattttaataatgcacatcaaaaaaaagtatttggccgggcgtggtgacgcacgcctttaatcccagcactcgggaggtagaaacaggtggatttctgagtttgaggccagcctggtctacaaagtgagttccaggacagccagggctacagagaagtcctgtctggaaaaacaaacaaacaaaaaagtatttgtcttacaattgttctgcaatccaaatatgcaacagcttggaaaacaacatttagaaaacaaaagccaatgtaaaaagacaactacaacagtatagtataggtttgatatggctcagattttacagctttcttactgtatcatctgtgtcagagatctgttccttcagctggctccattgttccatgtttaaagaaataccttttctccctgtttcatttcaccttctgagtccatccaacgttctctaatatcaattgaatttttcctttaacgtcttgaacactgacgtatctcgtctttccaatctggagcatgttgtcatctctgctgctgctgctctgcttggaggatgccagcgctctagaaggctcaccaggctgctgctgcttcacgggtttctctggaaccacttgctttttcctctttaactttttttgaacttccctgtccaaatcactgcctgaagagcttgaagaaacaagttcctttaatttaggcattgctctgctccagcctaccaacagcctctagctcgctcgctccagactgtgactcttaaactggtgtttcagatgtcattaatgcgtagtaaaattagactatgcctttgacttactttggcttcttttactagtttagccctaatctttgttttatttaggtaacagtacaatgttggcttgtatttcttctttagccgaatggattttatgtatattgtgcatgtgtttgctttttggtgtgctaggcagtgagcccagggtccggcaaatactagcaaagaactataccctaactctaaaactttatcaccactaccagcagtttccttggtcatgaatatagaaggaagggttagcttgcaacttaaatagagtacatttgtttccaaatactgcttttttaaaatcagaactttatcattttattacttgctgttttatttttcaaaaatacaacataatattctttaacgtagatacttaaattattttttagtatttttaactgtaatgtgtttagattcataaattctcttctctatgctttatggttttgtttttgtttttttttttttttacatttatctacttagtgtgagtggatgtggatacctgtgtgtgtggcatggcatttgtgtggggatcagaagacagatttgtcgaggttggttccttccttctaacatgtgggtcttgggggtcaaactcaggttctagggttaccaccatatgcctttactttgtgggccatctctctggctcctagacttcaaattttcttcaagactataaacatagctgcccaatcacatgtaatttttgtcagatggacacttgaatttttaattttcagtactgaatttctcatttttagctcttgggtcatattcatttacgtagtaaaattcaccattgtctttttaaataaagacttatggtggatgtgggtgtacacgcagaagggggctttatctgactccttgaagttaaaggggtttgagtaacctgatgtgggggctgaaatctgaattcaagttctctaatagttcatcactgagatatcttgcccctccgcccagtgtataataaatcctttattctaataaagatctaccttcctgttccctggtttcttctcttgtctttagtaattgtttactttgttctttttatgtttctgataaattttttatgtaacactgaacattctaccgttttaataatgatacaggcttaggttattttttatctttgtgttgttgagaggtcaaacccaggatgttctgtttatcaagcaagcattctaccattgagctacattctgaacctgttatagggacttagaggtatttccctctgtagagggttcagtcttctctggtgggcaaactaaatggggattaaacacttccgtccaaggaagggctgtgctaattgagggctagaccacagttggatgtgacttctttacctattactaggagtgaagctatatatgtgtgtgcacgcttaggttcttggatctctaactagagatcttaagggtttcattcaggaaatgttttaagaggaaaatcattgttaaagtgtgaatataaattatctcctgcagactcaatacatagaagcctagtccccagcagatagcactttgctcagaggtgctgggaactttagtaaatggggcctcactagggttctacatggtattttgtccctggcctcttttccccttttttgtttgcctgcctcttctttcataccatttcccctttctggtcatttaggatcccatcctgtctaatcctttttatttactcgtctgcctccttcctttactctccttcctcactctcactggagagtgatcacactgaaatctcagaaatggggccagaatacatcttccctgcttgtaaattgttctgccaggtactgggttgcagttctgaggaaaactaactgatgccataagtcaggtgactttttttccttcagatttctgacctcctattcctactattccttggtttttcaagtcccagattttgtctctcgctctataactcttctaagggctcaactggattactcctagctgcttgccctgatctcacagtgctgacttatcacttcattacttcctctcctgaatcatcgttcaggacctggttgccacagcagtattgtaacttttaaaaagcacattcagtgttttgaaatttagtgtgtgtgtgtgtatgttatgttaaatcaagtaaaataaaaaaaaagaatttcagctagagggaatgactaagcaaggaagcagggatgtaaaattgcatggtgaggaagaatcatagtctaagtactgttgttatagtatgaaggttaatgtagaaagtaataaaaggtatgcaggggtgggaagatagaggggttttgtctgtcaagcatgggaactatactactgttattaatcggtgaatcttttagagattaaagctaagccagatgcatggttgagtaaaggagactaggacatgttattgtgtctcaccatgtgaataaattctcttttcaactttaccctcttaacctcttaggcattgcctatgagaagtggcatctgggacttgtactgttcccttcttccattcattgatcctttcttttatatgattagagaatcttagatttggaactatttttcacaaagctgtccagatagttttgctgttgagtgctcttgagctgatattagcagtggtctagaatcagcattactgaagtacaaatgcatctcagctgtcaccttctgagagttttgttactaagagtgagtgggcttttttttttttttttttggtccgattcatctttccatgactaattactatatttaaaaataactgatgcataacattttatgaatatttgttctttttttaaaaaaagatttatttaatgtgagtatgttgtagctgtcttcagacactccaaaagagggcatcgggtcttattacagatggttgtgagccaccatgtggttgctgggaattgaactcaggacctttggaagaacagtcagtgctcttaaccgatgagccatctctccagcccccaaagttttgttcttaatcaggtagtatagcaggagggcagaagagaagtaatatttaattcttttctaaatcatctgtatacttatacagtttatatcacttagctaccataactatggtaaccatctatataagtgattgtattccttctattcatcttttataattctccttaaatttttgtttgtatttgtttaaagtgaagtgtaccagataaggatatagtctgctctttgggaatgttttttctgcctcttgactgtatgtctgaagtgtcagtgtagttagtgttgttcttctttcttgtgaccccagatcattgttcctttcctcccccgagagccctggaacgtatcaggtggtaccactgccttcctctctttcatgaatttgtttcttcattgttggttcattaggctggctgaattttccttaagtgcttaacttcttatttagaagagactacctttactttgagagatctttaggggacagaagtagattttactagtagcatcttggggctctaaaaatacaggaaattaatgtaattaaggaccttgccaactgatagttacgaagattctagctaaggctggagtgatatcctcttacctaaagaagtgatagctctagacagtagcgttttgtcaaaggattgattctccctatcttattgatggcctgactcctggctataggtgtatattacgctgttgttggagtgcttgtcgggcatatatgaagccctgggttttgtacccagcactgcataaaccaggtgtggtgtgtatacctgttatcctagtaatggtggaagcaggagaaacagaattttaaagtcatccttgcctatatagcaggtttgaggtgagcctgggctacatgagatccagtcttttaaagaaaaaaaaatgatcactgtttctctgtcaaacaggttataagtttccctggtactcatgcagtaagaaccttcaggctggcagttttattctcaaaccttccttaagtcttttttttttgatgtttgatcataaaattctaggattgattctctggacaacagttcctgggagtctctaccgatcttaatcttgactgttcttctgaagagcttaactatgttactgtcctgggtttgaaatcatctctgtcctccataggaaagtctatgtgcttaaacactaagactttttttctagtagcacatatgatccccaacctctttcttttttaacacactacttagttgctgtttcttctaagatttcattactcccacaccagctattaaaccaggtaactctggtttggtttaacacctttttatggtctgtctgactgtaagacttaagtttggaagggtaaacaacttttactcatttatcaactttgtagtgagtaagtatagattgtaaatcacctgtatcttactagtatttctattcatcactgtgacgttcccaaagggttgaacagaaggtaggtgtatgttaattccccactaaaaatacctgttaataaccaagtttagaactaggtataggaattatgtaagcatcttggtgtggctaatgaggaagaacactttgtcgtgtcacagctgacaagcagatgacagcaaggaggactcacaacagaagtcacagtggcaggggcagggatgtgatgagcaatagtcaatcctggaactctagagcaaaccaagaacagttgtagctagaattcctgtttgaggagctataccatagatacagtcattgaacgtttattttaatagctgttaggttttttgtaggataaaagaattagcttaggttggcattaatcaggaaaagggtcccatgatcactgcactatacttcataaagataagttagtatcattcaagtaattttgtactccattgtgttacatgacacggtgtggcgtaaggggctaggacatgggtctcagcaggtagtttgtgtccatgtagaagctctaacatcccaagcactgtgtaacctgggcatgctagtgcaccgctgcaccccagcacctgagaggtggagggcaggcaggagggtcctcattttaaggtcaccctcaactacatagtgagtttgaggcaagcctgggctacgtatggccgtataagtagtcctcaaaaggatctttcatttagcattagtagtatactaacagttcagccacaactgaaaatcaaataaaagtaaaatgcctgctatttaaaaaatacacacagacacatatcttaaaacttaagcctttacccaaaagttcaaaatactatttaggtaaattaaaatgctttttattgttgtttttaaagaaataatccttctgtttcatttcacagacgatcctcaacctcttttttttttttttttttttttttttaggatactactaaatattgatatttcacagcctatttatatttcctaagataagctaatggatattttctggctcagaagttacttctttcttaaaagttaggaaaacttaaattatcgattagtagtaatttttaaaatgttttgtttcctaaatatctgaatttaattcaaattgtagatatttggtgaaatgaatagtgaagatttatagtaaagtatcagatgatactaaatgtgatatggtatataaaattttcatctatctcaagtgtggtttttgaatgatcttcaaacattttaactattaatgcatttttgttttatttcctaacatttaaaaatatgtacgtgtatttactttgtgtatgtgggcatgcatgtgccatagcacatgttggaggtcagaggaaacttgtaagagttgtttctctcctttgaccttgtgagtctcagtgagtgaactcaggtcaccaagcttggcagcaagtgctgttccctgctgagctgtctgtcagccctgtatttagagagctctaaacgataactgaaactttgtgatctcttattttttaattatttccttctagaatgtttctccatcccagagagatgaagtaattcaatggttggccaaactcaaataccagttcaacctctatccagaaacatttgctctggcaagcagtcttttggataggtttttagctacagtaaaagtaagtattgtaagacacattcaaacacagcatctttttcagtgacttttgtgttaaaccacaggctactagtaaatgtgttgtcatgacagtagatgtaggattttgtgaggacattatttcttttgttttaaaattttggaagtgactcagtaagttcagagttttgcatagcacttattcaatgactggtataaatgaacagaaaagaaacttatttttgtgcctaagaagatgtaaactaggagaattgtaaacttaaatgtatgtttagattttaaaaacaaagagcttaattcaaaataatcattaatgtctttttttttctttttaaaattttaggcccatccaaaatatttgaattgtattgcaatcagctgtttttttctggctgctaagactgttgaggaagatgaggtaaggaatcctttcaaggtttattctttaggtttggttggttcacttggaggctttttttgtttgtttttaatgaaacctttattactaaatatgtaaatgttcagctctgagagtaaaggtctcctggtagtcaggagccaagaaataccatagagtcacaccacacaacaagcctcacatgagagattgggaaagacataggaggccagccgcctgtgctcaggagagaaacagcaaagaactgagcaggagacagactgtatatagggctccttagaactgtgggagatggtttgtgggatggtctggaatggtagaattctttggcctgatcttgggctctttttctctgtagggtgtaatttgggtgcctgcaccttgaggggctggaaacaaccattaaagagtatataggggcagggccaggctacttgagccttgagaggcttaaaaatgaatgctgtctttaaaactccaattttagttaagtgtttttgatgcattaatcctctaatatgcttctttggaagatcagctgtctctttgaaagatttatttatttatttatttaagacaggacttcttcgggtagccctggttgtcctagaacttgcttggtagaccaggctctcctacaactgcctgcctgcctctgcctcctgatttttagtgttttgccccagtgtatgtaagtacactgcatgcatgcctggtgcacacaagtcagaacggcattggtttccctgggactggtataaagacagttgtgagttgccatgtagttgagaattgaacttaggcctgggaaaagcagccctgctcttagcgactgagccacctctccagttcattttggttttttaatattatttttctctatttacatttctgaccttgtttcttactccttttgccttggatagaaaattccagtgctaaaggtattggcaagagacagtttctgtggatgttcctcatctgagattttgagaatggagagaattattctggataaattgaattgggatcttcacacggctacaccattggattttcttcacattgtaagtatatctaaaatgttttagttcttacttggaatacaaagtcctagtccagtaacttggacagaggttgcctcttcctatggatttaggggaaactattaaagttagtcaaggaaaaaattagactctgaaaatgtatcaaatcaccacagataaaagttacaaacttgcatcgtacctgagatgttatttctgtgtatactttcttagatattttccttaagtaacaattttgtgttttctcccccaaacctccagttccatgccattgcggtgtcagctaggcctcagttacttttcagtttgcccaaattgagcccatctcaacatttggcagtcctgaccaagcagctgcttcactgtatggcctgcaaccaacttctgcagttcaaagggtccatgcttgctctggccatggttagtctggaaatggagaaactcattcctgattggcttcctcttacgattgaactgcttcagaaagcacaggtatcaagcttgacttttgttcattccactattttttcccttggttgaattgagagggctactctatggttttaaataaaactgagaagaggggtgggagagttagttcatgatagagaaggccctgactttagcaaaaaaaaaaaaaaaaaaaaaaaaaatcagtttgtaactggcatcttcaaatgctacctcaatttaatgaaaacattagatagcagatgtgataaagtagtcgtgctgtttgttagtaactacctcagagaaatcaagtttagatttgcaacctgacatccatagagactgatgagctttctttcccttctctactgcacagctctaggagttgattttctttgtatacattctgatgctcagagaaatttgtttaattttattttttccttagctgtacaggatctcagaaatcattttactcatgaattagagtttcagtctagggaatttgagagttcattagagtgacatagaactcctcggttgtgaagactagaaagagtcagtggtggtttgattactctgtacatgccgtgagctacctggtgtgggtgctgggatttgaacttgtgtcctctgcaagagcagtttgtgctcttaaccacagagccatctccaactcttctctttttgataacacacaaaccttaaagagtctagagcaggctggagaattggattggtgggtgaagttgttgcaagcatggggagcaacctttgggacccaaggatggctgctagttcttctgggcatggttcctgtccttgctaggctcacctgtgttgatttagatcagaatataaggtcttgtttctttgtaagtaaacctatggcaagacttcgacttggggtaggttctagtatcagaagctttgtatcagatcatgccagtattgccccctcctgctgcccctggtgctgggatcaaatctagggctttgcacatggtaagcaagttttgtaccattgagttacacccccattcttgatgcactttgttctgtcttagctctgcctgtgcatcttttgtacttggtacatattctctggtttgagagctttcctacccagcctatgccaattcttctgtgccactgttgatctccacagtaggacggctgcacctttctcattacccctcccttcctggagtttatttatatggctgtgttcatgtcctttgctttcttaactgtagtgacccaccctgattgtcagggtatagattctattgtggtcttcctagctgcctgctagtcagtggtcaaagtagatgttcttaaataaaactaaagtagagaattaaaacgcataccctcctaccatggactcttggttaccttgaaaggtgcctaatattctaacaggtattttcaggattttaccctgctcaccatatgtgggtcctctgggatctgtcacgtgtatcatgtcattctcttcaccctcttcattggaaatctatgtgtggccttattttattgctgcttgacacagtctcctggtcaactaaatggttagcaacttgttgttgctgtttttgataagatcacttagcaatgattactatattgaaatttgggcaagatagttataaggatggccagtaaaggttctcttgattctcataataagtgagataagtaaataaacaaaaaaatggttcatttaaaatgcttaaattttaagcgcaagatcaaggacttgtgtgcatctagagctggtaatcgtagtgcatgcacctaaacaagtgcactttactacagaagcggtggggtgggggtggcttgttacttttcaagatcgagttcatattgtactagattagggtttattttggacagagtttgttttgaaactccaatggaaagtatttttaatattttataatgccttactattttttgatagtctttacctccaaataataactctcatttctctttttcaccatcagagatcatagtgagcatttcttttaaacgcatgttcaggatcatgaccagtgaatttgtggcacttttcctcttcttggatgccaaatgtcttcaaagccttttctctgtttattggttctcttttgtattctgcttgaaatattggaaactccacttcttacatgttatagtttttagcaggggtcttcatcgctgggctaataattagatctagtccacatcacacctagccacctgtaaggtggaaggggtacctccatgtgtgtgctatggcacacgtgtccactcacacatcataagcatgcatgaatgcatgcacaaacaaaattagggactattaaaatggcttttcaataaaataaattctgatacttgatgtcttactactgtagtgtcttctaaagtattttaaaaagggggaaatggcggatgccaaagtcttgatttaagtattctgatagtttcatgtaactgtacatttatgtttttcccattgattctttcctgatcaacatagtgaatacatttagagatgagctaattttgtgacaaaatgtgtacttgtagagtggtacttacttcttcatagtattacaaatagttctgctgtgtacttcggtctgtgggatgggtaaaatgtgggtaagaaatgtccaaaatgagcttggtgtgatggtacacacccctagtgccagcacctgggaggctgaggtgcaagggccaagaatgaaaaccagcctgagctcccagctagaaacaggaaggaaagatgcggaaagggagcgtcaagggagtgcacatccaatagggaagtgcttcccgtgcctacgtggcccaggagcatcctggagggaaagggcaacagtttgagtatgcagaggcaggtatgcaaggcacagtggcagaggggccagtgcgcattacgtagactaggcctatgccaggagtgtaaactgtcagtatgggatacactgggaagtgcagttatgagagttatagagagccttgtccatgttacaccagagagtatttggcttactctgaagacactgccatgctgctgaagaaatgttgactagaagagaagtggatagtgacagagaaggtcactcagtgctacaagttaaaagtaaggcagatacctgctaggaaaactttgaaggcctttcactgtagttattaatatttgatataaagcagtggttctcaaatgctttgtaatgctacaaccctttagtaaaatttctcatgttgtggtgacccaaccatacaattattttcattgctacttcataactgtaattttgctactgttatgaactctaatgtaaacatatgtgttttctaatggttttaggcaacccttatgaaaggacccaacccccaaagggttgtgactcatagagaatgaaagcaatggctaagacataatgcctaaaacttgagtcttgaagtcggcagatgcaagggtagatttgttacctggatggttgtgattgattgattgattgcttaactgagggcatattgaaacagaaacatatgaccatggaattgctcaagaggttgaggggatcaaatgtgtgttactccagaatggattaatacctgaactattccaaaggataaggaaaaaaataccaattcccaaactatgtagttttgttaactattttctacaaaaatatgcttgcttaacatttgcaattgttttgtaacatgatacttaaaataaaataaaaaattagctaaacaagcttccccattatccctagcttaatgttttccgttgcttttgactcttccttaaatagttgatggctgctccgtgcctttcttgattttggccttcaccggagaagttagaagagggcaagagaatagggactggccttatagacaggaggcatagacagaagaaagcagacattgctaataaagcaatggacaaagacaagttctgccttcatgtgagtgctcacacacaaaaccagatgtatgttggaagcgcaagcatgtgcacgtatttcagaagaaggctctgtaggtagagtaatcagtggggtggagggtgtggcggaggaaagcaagctgaagggagagaaggtccagggtgaggccagtggcagtaaagggaacagtgggccatgttactgaccagtgtggttttgtttctttccttgatccagatggacagctcccagttgatccactgtcgggagctggtggcatatcacctttctgctctgcagtctgccctgcctctaaattccgtttatgtctaccgtcccctcaagcacaccctggtaacctgtgacaaaggagcattcaaattacatccctcctctgtctcaggcccagatttctccaaggacaacagcaagccagaagtgccagtccgaggtccagcagccttccacctgcatctccccgctgccagtgggtgcaagcaaacctctgctaaacggaaagtggaggagatggaggtggatgacttctacgatgggatcaagcggctctataatgaggacaatggtcctgagaatgtgggttctgtatgtggcactgatttatcaaggcaagagggccatgcttccccctgtccacctttgcagcctgtttctgtcatgtagtttcaggtgtcagcttccagtgcacacgaaggctgactactcggggtgagactagaaacccagggaaggctgtggagaaggcatgtgctttatcagactgactgaagtgagccaggaaaaaaagaaaaccactcttaatctttcgtgcggttacttacaatccaacgtaatttaatataaaggctatatttgtagactcaagatccaaaatatatttaaaagtaaagcaaaagttctttgtactatgtcagttccaccattgttaaataagtttgccccatgtcaaaaaaaaatgtttagcggaaagttgcaaactctcagctaggaaccttgttccagtgtccttattttcctcttgccttttcttgcctcggttgaatacttaactaagctgtgtgcttgttgatctatgtattctgacttcacttgagtaccacccaccttttcttttaaagtaattcagtaagtaaattatttttgtgtggcagccatgtttaatccacagttcaagtatgttagtttgaaaagggcactttgaagctatccccatgaatcagtggcagtaggaaaagttctctttttttgtgtctcatttcagtttttagtttaaaattattattgtcctttttttgtttatcttgaagctcaataaaatggcacgtaattaggacattttaagcatttttgacatttatataaaagaatttctgataaggttaatatatccaggtgctcaccaaagaaacatgtatgtaatatacacgtagatttttgtaactgatctgttcttgctcatttataatccgtagaagcaactgtctagatactggggcagccctgatttgagtctgtaacttataatttaattcattaccctagtttcatattatgccattaggattttcttgataaggaattattcccttgtttctctctgagcaatgtctggaccctgagctccctttgcagtctgaaggcactgcagtcagaaccatgtactgctgataaagcctctggtagcaataaaatgttgtccttaacgttggtttgtgtaggagtttttgttggtctgttttgctgatgagaaggtatggtttctgacttcttggacactttgttttcaactaaggaaaccagcaaggagcctaagcacaagcttagacagggtgttgggtgtcctctcccattcctgattttaatggggcttattaatggttttattcatttaggatattggccatgagtttgtcatacataacctttattatgttggaatatgtttcctacagtcctacttgttctagggcttttattcagaatgcatgttgaagccggacagtggtggctcacgcctttaatcccagcactcaggaggcaaaggcaggcggatttctgagtacagagtgagttccaggacagccaggacttcgaaaaacaaacagaaaagaatgcatgttgaatcttaaaaaaaaaaaaaaaaaaaatttaaaaagatggagggggttgactgcaagtttcacatttgtagtattttcttcctgtgggctagagaccttacaaccaactgggattgcttatgagggagggcaggctccagcttacagataaggaattttattcttagctcattgatttttaagtttaacagcaagagtattttcagatcactaacatttagaaagttgtagaagactttaactgctaaatttctatgaccttgaaaatccaattggagtaagcattaagtgtgcaaggatggggtttgggagagccatgaacaaagggttgtatgcaaaggattggcctcacacaggtatgtatttttataaaaatcacacgtcctcattatctttcttgacattaattatgggagctttgggttcacagttcaatgtgttcataatgtgtgtgatatgaatgggacaccacacacacacaaacctacacatgcacttagatgcacatctgatctataatacagacgatccagactgcagaagttggagacaacaggactttagctgctccatcttgaggttccttaatgctgatggtgaactggtgctggcatgcatctgtggtcctagctactaaagagactaagacaagaagactgctttagcccaggaagtctgggcagtagtgagacctctagagtgaggctggatgacccaggttcaaatcccagcacccacatggtggttcacaaccaactgtgattccaattccagaaaccatagtaccatcgctttactgggcctatacatacatgcaagcaaggcacctacatgaataaaaataacaaactttagagcagagtatgtttgggttgttcttttgatttgggtcagtggtaattaatacttaatagctgctgtcctttcagctaaatctagtaaatatccagagccctcggcatttttcaaaaccagcctgagactgaaatagcaaacactgaacactgtagagcctcgatgaagagtattcctgcattaagaatattcctgatgctcacttagttccttggggtaattgttgcctcctggtggttaaaaggtgcatcattcttgggctctccagaaagttcaaaggatgggcttagtaactaatccaccaaaagcaaaacaggactatgatatattcacaagtgagatgagaaactctccatcctctgaaagctgggcaagttggttattggcaaacaagatgctttctctaccagaggaaggggaactggggctgagtcgtccatatcccctactgaaagagtcaggttttgttagagtgctcctgacaccatggttggctgaggaagctgatgagaacctataggctaaacactttactgcttgcctgcccaaaaacatcccaacctctagaagaaaatggtggttaagatgttgacgttccttctgcgtgcttttcaggagaaaggaaaggaactgtgccaaatgttctcaccagcatcctgaggggtaaatatcctcagatcaaagtcatctcgcaacttctgaaagctcctaagttcttgaacctttaaactatgttaatgaggtcttctgtacccattactaaatagtgctttggttttctggtggtgttttcagggggtgggggaaaaaaaacatcttttcagcctcatggtgaaactgagctgtctgggttgactggtactaagcagatacatctgtgtgctttgtggttacaattttactccattttgtggtgtgtgtgtgtactgaggtgcttgtgtggatggaggtcaaaggacaactccttccatcactggggtctcaagctagcagtcaggtctcccagaatactcactgagccatctcactggcctttgtacttacagttgtatgcaacttaaggtataggtggggcaagcttgtgagcctgaagaagttagcaaggagcgcctcaggcaaataacccagaaccatgtgtgtatctatatccatgcggagtgagttgtacatagtcccacaaaagaggctagaaataaatagaaccgaaagggtgtgaaggtggccctagcccagaattttctgctgttggtctgagttggacttaaccagccattaggacgtgagagatgaagtgcacacatgtaacacaaatgtcattaaggagttagactggaaattttctattccagttagatgtggttttgtggccttttggatataccgatggaggagtagggcaaggataactgcttgggccagctctgctactcttttgttgttttgttttttcgagacagggtttctctgtgtagccctggctgtcctggaactcactttgtataccaggctggcctcgaactcagaaatccgcctgcctctgcctcccaagagctgggattaaaggtgtgcgccaccactgagcagcaagctctgttactctttctccaaggtatccaagaatgttttattgctgtagaagctttggggttaagggtaaaaagaacaactcttatcttgactcagtataaccttcatagcccatcaactgccagactgttcagcctgctaatacatgtagcccacagaaggaaaaagctaacgcctctctgcacagcaaacctgctgttcatttcgtgggaacagctcgctttgagaggacactccagaatgaaaaccagtagcaaacagccattgagacaagcttgtgggaggatggggccctgttggtgttcagaataggattcatcttcgatagttgagtatgagacagcaccgtttccctttgttccacacttggtatgctcaggagggacagagggcaaatacaggtaagagtgtgcccctgtgtgactaatgctcatggccacgtggcacagaataaagtactagaaagggggaaaggggaagtactgcagacagctgggaatgctgtccctgctgcagagaaactgcgagaagcccagcttttaatggaatgttactcaattcctctcatacattaagttgtgctttgtgagaaagggacaagctcatggtaatatcctctgttccactcatttgggagccacaatcttaagttcccaagacagactgaatgactccaccaacagtgaaacagacatggaatttctgcatctcctgtgatgtgcggcagacatccagcagatcgcatacagagttaccagtgaggttggagagggagggagtgggcacttaggctccaatgaccatacatctatccctttcactagtgtgggtattgataggtgcttgctagctactgacgtgaagagacataaggcctaggtatcactataggcattcaagcacaggatctttgaagagacagtgccctgttggtctccatggcagaaggatggctatctgcaaagctttgtgtaggtagatcattaaacacggtcacaattgtgtatttcttagatgtccagaaacatctatcctgcagtcatttccaatggtgaacaaaaaaccaactaagaaagttaatgataaggtaccattgatggtgaaatgtttggtcaaacataatgacacatgggctttggtttgggctgggggtggggggttgttttttaactttttaaattacccatcttagcatacactaatccaggatgtctttctctttcataatggattatgctggtctcaaatagacagctagactatacttggataggcaagtatttgaaactcagtaatttttttaaagtttggggggaaaaataaaaaggctattgcctgcagaaacaggttctgtggctcaagtctttcccacagtgtagatgagggtaagccagtgcacttcttattcctggtgatggtcctcggcacaattccacaggaggccctgaggaccacggctttgtcaacatctgagaaaaggagtcatgtgaagcaaaatgccaaatcaatggcagtcagtcttaggagacaggacacaagatacttggccagtgatgtccacagcaaggttctctatggtcactgaatggaagctagcttgcttggaaccccctcacttctcatctcgatcttagtatgaagagaagaagagcaatgaaactacacactctccttaggcaaaatcctgcacctgacctgatttttaaacattgctcaactatcacctgaaacaaaatgcattttgaaacaagtgaaatgatagtataaaattgatattaaatgattttaagttaaaaatgaagtaaattatacttagtggtttcaacatgacctcatgtttaacatagcaccgctatatgctggcatcagagttggtacccacgccccgtccattagtcacagcactgagtttctgccactgcgtacggtgaaggggcatttgggcagcttagtagctccagtgaaactgcctttacttacacttagaaatactttctagtaacaagctgcttgctaacaaactcatccggttgctctaagggacctcttcccgagaataagaactactgtgtcttcactggccgacagaagcactgcacctttctcacagagggcaccgccccaaaggcttctgaccaaatgcaactcgcacctcccatggagatgaaagtattttaagatgcaaacaacgctgtagacagtagcgaatttagaagggaacttcaaccattctttgctgatgggaatttggatagttggattagattgatagggatctggcaggtgtcttttgtctgacaggtgaatattattttaagtgtcctgactcagcctagaccccggtcagcattggaaaacataagctaactcaactggcacaagtgtttctacatgtgggtgggttctaagttttctgatgtaaatgctttgattcctagcaggccttttgcagatactgtggagaaagccctgtgagtccctctgagaagatatgaactgaacctttgttaacacagcagtgacctgggaaaggtgtgtacagtttggtgttcatttcgtggtttaaaaaagaaaagaaaaaatggataggaggtaaagcacagcttcacaacaaattcaaaggcagggatgggccagacaggattttaagttatctttaaatataaattgagccccaaaggcagaaaagtcatttacccaacactggcacaattcaaacatagttaagacttgtagatcaaaactctagtaacaaaaaggggcactttaaaattgcatctaagagaagaacatattaaacagaattctcccctgaagtgaacttaggattgccatgatttttgataccaaaagtttgaataacaaatacaaaatgcaggagtggctagttgggaattccccacccccaaaacgagcagaaccccctccccaaacaacttcggtaagggatgcaggtaacagagtcaaataaaaaaaaaaatggttcctgaatttaaaggtaggatgcccacttctttctctcaagaggcagatggtcagctgaaaaataaaaacaccgtatcaataggacattccggagggagaactgcagccacctctgtgcatgcaatagcattttttttttaatcccacaccagaaaaacccacaaaaccaacagaaggcagcaagggttggcccactctgatgacctgctgatagctgaggatcctgatgggttggtgagagttgcccataggatcgagaccaggaataccatgggctacgtttgccccacagatgatgacaacaacctcaagtgaggcacaggccctcctcggtccttaaggtcttagatcaggaggttcaagaaaacggcagctaagccacaggattccaaccccaaatcccggggtttgggcctaagttttctatcccactcttttcattaatatagcgttactatttttggtagttgaagtcacttcggtagccactgagggtggtggtttgtaaacagacattgacatttacaaacagcagtgcaatatttgacccagactttaaagaatgggaggcgatggtggagatgaggtaactcttccccaactcgagtggacagacagctcccgctcttctaatgctgtccattaagagagagtagggcttgtcaacgggatggctacataaagaagaagctacagaagagaaaaaagaaaggttcaggttcaaattgattcttaaagcggaaaaaaaaaaaagcacttctctacaaccagcggtgaaagtagcagtctgtcagttaaagggccagtgtcatcaggcatggtttggtgaggagtaggtggactagcaatgtgggcactcagggccagggaggggaagatgcctctgctggacactgagggtcatccatgtactgggaaccagtgtggtggcgggaaatgtgtgagccacaggacgccacagggcaagtgtctcagagaagccgggccaaccagcaacactgaagtccagcacacaaagtaaaagagcaggacacagccgccatccccatttctttatgtgacataacaagcacatgtgtgtacataggcatatcaggcagggactggaaagaactcacaaacgggcacacagaacaacggttgggtaaaaatatatttccccactttaagtcttggcactagtgatatatgcataggtcacctggcaccacactacgataacagacaccaagttactcggcaggttgctgagtcagcactttcatacttgtaggaacaataggcttcacgtcaatacagttattttagtttataaaaaaaaaagacaagtgtctaacatgcagcttacatacatgacaatctgcattaacactgaaaggttacacaacagtttagaaaacattggttatcttcaaacagcaaaaaatgacaattctacaactacagtttaaggcattatcagcatattttaaaatcaagaaatagacaaagttctaatgctgttcacagcttaattttcaatttattttttaaaattcccttcatacctacatacaaactagactctgtaggtcatgattcacttaatgactccataataaatgtcctgtcaatagaactaagacttttggaacctgacaactccagacacttatgaatggcaaagctgggggattcagatggacagttctgggaggaccacacagagacagtacgatgtgggtaggggacgcctgaacaaccaactctgtggaacacttaggggtgtgtgaggaaagtgagagagtcaagtccacccattcaaggtgcacgggatggagaggaagcaagagctgttgctggtgagttgcaaagtaaaggaggacgaaagcaagaaacccacacctaacctcaggtggaggagctcccctggctgagagagacccttctggatcgattcatacagagcccaagctgagaaaacagttctcaactgctacccgagtacttgctgaccaagtactcagtcgtcctcccacagcacagatgacaattacaggggaccacagtcctgaaggagcagaagatgctcaccgtgcagagaggccaaagctgtccaaccaaaaactaaaaagaagtggccattgtgcactgagcataaaggagaagccactagcctgagatccggaatgtcagggagcaagcagaaaggcagcatggcagagacatcattttcaggatttttgtcccgtggacagtgggaatctttccccagctttttgccactgtcacaatcaaaggccctctacatgacctccaggaggccatacacaacagtggtacacaacattcagtacccaatccccaacttcctctgacatcaagaggaagcataaactgtcgggtaaaatagaaatgtggccagtatttagctttaaaaagaaaaaaaaaaagaaaaagaaaaaaaaaaagattactcagactatccaggacaccttctaaaagaagacctcatctgccccatttgttttccctaatctgaaacagaaagatccgagttcttactcctgtacttacatgcaaaggcgaaagcacgtccagttagatttgagagtatcgtttattccgtgcagagccagggactactgtgaagaaaggtatagatacggaaagaaagagcagcaataaccagctaccagaggctcgggagcagtgggaggaaaaagttgcagaagcaatgcttttctcttttttaagcttctttaggattctcttgacttcttattccctgactctccagaggatttattttactgagaacaaaaacttaatgcaaaaaaaattcaataattttggcatcaaaaaagtcaattgtttgggttttttgtttgtttgtttgtttgtttctgagcatgtctttaaaagcttttagggatgagagaaattgaatgcaaaggggtgttttctattccaaggcacatacacacacacaaaataaagctcacacaagcagtggccggaacaagcagaggacaccagtgctcaagctcttacgtggtgcccggtgaagaagcaaacgcagcgtcggttagtcagcatgccattagtccctgctgctccacagctagctagaaaaatggaagcaaagccgatgtctgtgttggagctatccccttcaccagtgaagatggctgtggctgctctccagcctggtctacaccccagtgaagccaatgtccttatttgtctaacgaagcctaatttagtttatgaaaggccactgctttcttcttacgatggggaggtaaaagataacacaaaacttggctggggtcagataggggctggctggacaatgtttttttaagtgtgtgtgacagaggggaatgcagcctgcattgtcccattcacgtgtaactggtgacgtgagaggaaaatgcagaggcggaggcctgggttcatgagaaatgagagggaagagccaagatctggttagaagggggtggccaagcaggtgacaggagcgtcagggaaaagatgacaggacaaatgatgcacccctctcagttcttacacagcaggcaacatgtcctggcttctgagttaatcctcatggggtgaggtgaggtaactgaaggacccaagagtcatagcagatggaactggtcacagtgaggggacagggaggacaactccttagaggcaactgagttacactgtcagcaaggaagtggaccagaggctggctatcaggcctctatctctgctttgagtagcggctgcactgtccattcactcccctgccaccttcaactgaggacgtcctttcagacttgtgctaccggtagtacaatgtatagagcaagttttctcatggtgagtcatgaaaacttactagaagtagccacatcctagagtcagcctccaagtcccccctcagcctgcttaaagcaaatgcaggtgtgtgtgcagagaggctggagggaagtgggaatccagcctccttaaccaaagattctttagccaagcagtaccaaatgaggtgttctttgagatctggacccgtgagagtgtccgggacgccctggtgggggtgaacgtaatcatgtttctcgtgccagtctgtagctgtggcctggctctgaaggtaggcattcagatgcagactccatccctaa

SEQ ID NO: 1653 - DNA, 2579 bp, Mus musculus
ttccccccttccaccatttcccctcggaggcggcgccccctcctcacccgggcaccagcggcggcggtcggaggagcgggaccggcggcggcggcctcgggcccagggtcatcatggaactagttcgctgagtgacccctcggccgcagccgtgcgtcccgcccgagtacccgcgcccgccggcccggtttgccctcttctccctcctcagacggcccggccctggtcccgcgcgccccgctgccgcgcgccgaggatcatgaggtggtaacgggcccccggatgaccccgcgtcaccactgtgaggcctacagctctgccggggaggaggaggaggaggaagaggaggagaagaagaaggtagctacatcaagctgggtggcaggcagatccaaagggataccatgaagtttccaggacctttggaaaaccagagattgtcttctctgttggaaagggcaatctccagggaagcccagatgtggaaggtgaatgtgccgaaaatacctacaaatcagaatgtttctccatcccagagagatgaagtaattcaatggttggccaaactcaaataccagttcaacctctatccagaaacatttgctctggcaagcagtcttttggataggtttttagctacagtaaaagcccatccaaaatatttgaattgtattgcaatcagctgtttttttctggctgctaagactgttgaggaagatgagaaaattccagtgctaaaggtattggcaagagacagtttctgtggatgttcctcatctgagattttgagaatggagagaattattctggataaattgaattgggatcttcacacggctacaccattggattttcttcacattttccatgccattgcggtgtcagctaggcctcagttacttttcagtttgcccaaattgagcccatctcaacatttggcagtcctgaccaagcagctgcttcactgtatggcctgcaaccaacttctgcagttcaaagggtccatgcttgctctggccatggttagtctggaaatggagaaactcattcctgattggcttcctcttacgattgaactgcttcagaaagcacagatggacagctcccagttgatccactgtcgggagctggtggcatatcacctttctgctctgcagtctgccctgcctctaaattccgtttatgtctaccgtcccctcaagcacaccctggtaacctgtgacaaaggagcattcaaattacatccctcctctgtctcaggcccagatttctccaaggacaacagcaagccagaagtgccagtccgaggtccagcagccttccacctgcatctccccgctgccagtgggtgcaagcaaacctctgctaaacggaaagtggaggagatggaggtggatgacttctacgatgggatcaagcggctctataatgaggacaatggtcctgagaatgtgggttctgtatgtggcactgatttatcaaggcaagagggccatgcttccccctgtccacctttgcagcctgtttctgtcatgtagtttcaggtgtcagcttccagtgcacacgaaggctgactactcggggtgagactagaaacccagggaaggctgtggagaaggcatgtgctttatcagactgactgaagtgagccaggaaaaaaagaaaaccactcttaatctttcgtgcggttacttacaatccaacgtaatttaatataaaggctatatttgtagactcaagatccaaaatatatttaaaagtaaagcaaaagttctttgtactatgtcagttccaccattgttaaataagtttgccccatgtcaaaaaaaaatgtttagcggaaagttgcaaactctcagctaggaaccttgttccagtgtccttattttcctcttgccttttcttgcctcggttgaatacttaactaagctgtgtgcttgttgatctatgtattctgacttcacttgagtaccacccaccttttcttttaaagtaattcagtaagtaaattatttttgtgtggcagccatgtttaatccacagttcaagtatgttagtttgaaaagggcactttgaagctatccccatgaatcagtggcagtaggaaaagttctctttttttgtgtctcatttcagtttttagtttaaaattattattgtcctttttttgtttatcttgaagctcaataaaatggcacgtaattaggacattttaagcatttttgacatttatataaaagaatttctgataaggttaatatatccaggtgctcaccaaagaaacatgtatgtaatatacacgtagatttttgtaactgatctgttcttgctcatttataatccgtagaagcaactgtctagatactggggcagccctgatttgagtctgtaacttataatttaattcattaccctagtttcatattatgccattaggattttcttgataaggaattattcccttgtttctctctgagcaatgtctggaccctgagctccctttgcagtctgaaggcactgcagtcagaaccatgtactgctgataaagcctctggtagcaataaaatgttgtccttaac

SEQ ID NO: 1654 - protein, 371 aa, Mus musculus
MKFPGPLENQRLSSLLERAISREAQMWKVNVPKIPTNQNVSPSQRDEVIQWLAKLKYQFNLYPETFASSLLDRFLATVKAHPKYLNCIAISCFFLAAKTVEEDEKIPVLKVLARDSFCGCSSSEILRMERIILDKLNWDLHTATPLDFLHIFHAIAVSARPQLLFSLPKLSPSQHLAVLTKQLLHCMACNQLLQFKGSMLAMVSLEMEKLIPDWLPLTIELLQKAQMDSSQLIHCRELVAYHLSALQSALPLNSVYVYRPLKHTLVTCDKGAFKLHPSSVSGPDFSKDNSKPEVPVRGPAAFHLHLPAASGCKQTSAKRKVEEMEVDDFYDGIKRLYNEDNGPENVGSVCGTDLSRQEGHDCPPLQPVSVM

SEQ ID NO: 1655 - DNA, 2320 bp, Mus musculus
aacagctaattatttgaaaagcccaggctgataataaatgtgatatgtaaccaagggtgactttgaacttctcatcctcttgtctctacccaaattgacaggtagctacatcaagctgggtggcaggcagatccaaagggataccatgaagtttccaggacctttggaaaaccagagattgtcttctctgttggaaagggcaatctccagggaagcccagatgtggaaggtgaatgtgccgaaaatacctacaaatcagaatgtttctccatcccagagagatgaagtaattcaatggttggccaaactcaaataccagttcaacctctatccagaaacatttgctctggcaagcagtcttttggataggtttttagctacagtaaaagcccatccaaaatatttgaattgtattgcaatcagctgtttttttctggctgctaagactgttgaggaagatgagaaaattccagtgctaaaggtattggcaagagacagtttctgtggatgttcctcatctgagattttgagaatggagagaattattctggataaattgaattgggatcttcacacggctacaccattggattttcttcacattttccatgccattgcggtgtcagctaggcctcagttacttttcagtttgcccaaattgagcccatctcaacatttggcagtcctgaccaagcagctgcttcactgtatggcctgcaaccaacttctgcagttcaaagggtccatgcttgctctggccatggttagtctggaaatggagaaactcattcctgattggcttcctcttacgattgaactgcttcagaaagcacagatggacagctcccagttgatccactgtcgggagctggtggcatatcacctttctgctctgcagtctgccctgcctctaaattccgtttatgtctaccgtcccctcaagcacaccctggtaacctgtgacaaaggagcattcaaattacatccctcctctgtctcaggcccagatttctccaaggacaacagcaagccagaagtgccagtccgaggtccagcagccttccacctgcatctccccgctgccagtgggtgcaagcaaacctctgctaaacggaaagtggaggagatggaggtggatgacttctacgatgggatcaagcggctctataatgaggacaatggtcctgagaatgtgggttctgtatgtggcactgatttatcaaggcaagagggccatgcttccccctgtccacctttgcagcctgtttctgtcatgtagtttcaggtgtcagcttccagtgcacacgaaggctgactactcggggtgagactagaaacccagggaaggctgtggagaaggcatgtgctttatcagactgactgaagtgagccaggaaaaaaagaaaaccactcttaatctttcgtgcggttacttacaatccaacgtaatttaatataaaggctatatttgtagactcaagatccaaaatatatttaaaagtaaagcaaaagttctttgtactatgtcagttccaccattgttaaataagtttgccccatgtcaaaaaaaaatgtttagcggaaagttgcaaactctcagctaggaaccttgttccagtgtccttattttcctcttgccttttcttgcctcggttgaatacttaactaagctgtgtgcttgttgatctatgtattctgacttcacttgagtaccacccaccttttcttttaaagtaattcagtaagtaaattatttttgtgtggcagccatgtttaatccacagttcaagtatgttagtttgaaaagggcactttgaagctatccccatgaatcagtggcagtaggaaaagttctctttttttgtgtctcatttcagtttttagtttaaaattattattgtcctttttttgtttatcttgaagctcaataaaatggcacgtaattaggacattttaagcatttttgacatttatataaaagaatttctgataaggttaatatatccaggtgctcaccaaagaaacatgtatgtaatatacacgtagatttttgtaactgatctgttcttgctcatttataatccgtagaagcaactgtctagatactggggcagccctgatttgagtctgtaacttataatttaattcattaccctagtttcatattatgccattaggattttcttgataaggaattattcccttgtttctctctgagcaatgtctggaccctgagctccctttgcagtctgaaggcactgcagtcagaaccatgtactgctgataaagcctctggtagcaataaaatgttgtccttaac

SEQ ID NO: 1656 - protein, 371 aa, Mus musculus; identical to SEQ ID NO: 1654

SEQ ID NO: 1657 - DNA, 49866 bp, Homo sapiens
caacctctacctcccaggttcaagtgatcctcccacctcagccgcctcagacccccgagtagctgggactacaggcaggcaccaccaccccagctaattttttgtatttttggtagagacaaggtttcaccatgttgcccaggttggtctccaacacctgagctcaaacaatcctcctgctttggcctcccaaagtgctgggattacaggcatgagccactgctcctggcttgattgtggataatttaaattgactcccaaaacataattcttttcctttactgagaagaaataagtgttatagtaaacatatgtgtgaggagactaaaataaaacttggaggatttttacccttctctacacatcttcccccgcaagtgcttgataagtgtgtgttgatagtctgattacatgctgaatttggtggttcctgcttctgttaaataaaaattacaggaggccattgttttggactaagctcctgcactaggccccaacggactagactaaaaatcaaaacagtcacccatgctgaagtttcatgtcaccaaactaagttgttatctgagaaatcaggagagagaggtaacagctaatcttccaaacaggccagttttaatctgcgtgataataaagtcctccctggtttagtttattttcatatttattttttaagagatgcgtttcattaccttccccagactgaccttgatctcctgaactcaaggaatcctcctgcctcagcctcccaagtagctgggattacagtgtgtgcattctaccactcccaagaaaattccctctgttgtaatccttaaccccaaataacttgatgttaaccaatcagtcatttttctactgttctctctgttcctgctttacaaggaaagcgactttgaaatgaccagttctttctttgtttctgcttcagtccttctctgcctataaagccaacctcttctactcagctcactgggacagttaaattgtattttatggaataaataataaataataaaataagtgttgcctgattctagaattgcagtaaagccagttgaggtctttaaatttgctgtaactttgtcctttgacaattcaaaacagttctggaaaagagtaaaatgatactttgttttaatgatgtatttttctcccaactaaaaataagtaaataaaatgtgagaactaaactctgacctttttcttctcttgcccaaattcctacataaggggcctggggagtcacgccctataaaccataaagtttcattagaggggttttatttaacaccagataacatggattgatttccaacctaactggcataacgtcacatgacagacaaagagggaaatcaaaatattttaatcccaaacatgtttctttgccgtatctagaaacagcccggcaaagctgtctcttgtggggaaaatctacattctctagagaatcccctttcctttccaggactttttcctaatccaggagaaaatcaacagaagtctcgcactttctaaaatctgataagaaacacttgcagaccgttttctctgaagcctgctgcctgtaggctttgcctcataatgggaaccttggtgtccacaaccccttatcttaacccagacattcatttcaactgattctaggtttctagacaacaatttaactctttcaactaattgccagttcaaaaatccttgaatcggctgtgtggtggctcaagcttttaatcccagcactttgggaggctgaagcaaccatgccaagagtttgagaccagcctggccaacatggtgaaaccctgtctctactaaaaaaacatgaaaattagctgggcgtgatggcacacgcctgtaatcccagctactcaggaggctgaggcaggaaaactgaaaatcacttaagcctgggaggtggaggttgcagcggggctgtcatcgtgccactgcactgcagcctgggcgacagagtgagactctctctcaaaaaaagaaaaaaagaaaggaaggaagaaaaagaaaaagacagagaaagaaaagaaaatccttgaattcacttattacctggaatcccctcaccccccaccctccttgtttccagttatcccacctttctggacagacgaatgtacatcatacatgtattgatgtcttatatctccctaaattgtataaatccaagctaccaccctaggcacatgttcttaggacctcttgagactgagtcttgggccattggtcactcctatttgaatcagaataaatctcttcaaatgttttacagactttgactcttccccttggcaaatgtttctactgaagtcttttgagatacaactttcaaataggtggttgctgtttgatctccgtggctcctcttaatgaagcatgaaaccaatgatcccttctggtgagactttcctaaatcactccttaaatatgagaaacctaaagctagtttatattgagtgttggctcaagtttagaaagcagcttgaggctgcagcagagccgcgcgggaagtgcggcgccatcactagagcggaagctgtaggtgcgttgtgggaagcactttattgtccaaagccaaaccgccagtgtgatgaaactaacctacaagaaaagggctgggttttgtaaatgacacaggctctaaaaagcttggaagcactgcaacttttggcaggaatcagggttagcaggacctcagtgtctcaatgctgctaagtgcaggctggctctctgggtcctccagcgtgagctagaactgatgtctctatggtcaagtaaacagagtgagtgctgtcttccccatgtggtggggttgtgccagatcagtagctgctacactagaaagacggtggatcaagggcaaagaaaaatccctttggttccagaaaatctcctgaaaaaggtgaaggcttatcaagccctcaaagccacccaggcaaagcaggcacttttggcaaagaaggagcaaaggaaaagagctcaggtttaagcgactggaatcattccaacatgattcctggtggcagaaacatgacaagctgcttctcagacaactagaagtgaaacctcatgccttggaattgccagatgaacattccttggcctttgttgtgtgcatcaaaaggattgatggtgtgagtttactggggcagagaaccattgcaagacttcgcctaaagaaaatttttaatggtgtctttgtaaaagccacccccaagaacctaaaaatgctgcgtatagtggaaccttatgtgacctagggatttccaaatctgaagtctgtccaggaattttgaattttgaaacgtggacaagccaaggtcaagaataagaccatctctctgacagaaaacacagtgattgaggagcacctggggaagtttggtgtcatttgcttggaagacctcattcatgaaactgccttcccagggaagcatttccaggagagctcatggttcttgtgccctttccaccactcagtggcccgtcatgctaccaaaaatagagtgggcttcctcaaggagatgggcacagctggctatcagggtgaatgcatcaatcagctcatccgccagctgaactagacccaggtgccaaatggcagtaaatttttgtcaatgaagtggaagcatgtgtttttgcttttttggaaatttttatcaagtatcttcagagaagattatttcctgccttatcttcaaacactggaaaggaagggtcagagacagtagctggccggaacagtggttcacgcctgtaatcccagcactttgggaggctgaggtgggaggatcacctgaggtcgggagttcgagaccagcctgaccaacatggagaaaccctgtccctactaaaaatacaaaaattagctgggcatggtggcacatgcctgtaatcccagctactcgggaggctgaggcaagagaatcgcttgaacccgggaggcagaggttgtggtgagctgagatcacgccattgcactccagcctgggcaacaagagtgaaactctgtctcaaaaaaaaaaaaaaaaaagaaaacaaaagacagtagcttaggttcatggcaagcacctctcatcacagtccagttccaaggaaaaatttcagcgttttctacattggctgtcgcctcatctgaaatcagcatattccatggaagaaggagtcctgcttttgttgcatcttctatcctaaggtttaatgttggtaaatgagtaactctagcatttgtacaaggttccctaagactcctgcagcagtcgaccaagcccagggacacaattgaatctggagattcctggggccttgttttgaaaaagacttgaaatacacataggaagaaaggcacaaaaataaatgttcacttgtctcttaaaaaaaaaaaaaaaggcagcttgaggcttccttgacttattccctctgagcactttccccacttaatattaaggaggaggtctttatattatttggtgaatggggacttttttttctcttaatatcttgatgccaagttggtttgggacatttactcctcttacattctatctctgtatagataaatgaaaaatattttagaagttgttaaaagaatcctaaagtgtgggcagatgctaagtgattatgacagtaaataatttcctttgttcttgtaggctttaacatctctcctacaagatagtaccttcataaattgtcttgtggaaacattatctaaaaatttcatttaggacaaaggagaatagaagcttctgtcattaaacatgaaacagccttgctttctttactcctaaaaatgtaggcagtatttctagaaatatttaatgatagcgaaccacttcctggccatcaatttgattcccttccattttcctagacttctgaagaggtctcactttacactattttgcattacagaacagtctttatacttcctttttttttttttgacacaggatgtcactctgtcgccaatgctggagtgcagtggcgctatctcagctcattgcaacctccgcctcccaggttcaaacgattctcctgactcagcctccagagtagctgagactacaggcacacaccaccatgcccggctaactttttgtatttttagtagagatggggtttcgccatgttggccaggctggtctcaaacttctggcctcaagtgatccactcacctcagcctcccaaagtgctgggcttacaggcatgaggcatcacacccgctcactgtctttattctgatagctgtttctcatgtgcttccttatgctgctcctctttgatttgaagcaaggtatagtttaatttcaagatttaatattctagtcatgaaataaaacaagtctgaaatccttttccagtaaaaatctactctttagacacacaaataactgcatattagatttttaaaaatatttaagattaaacacaagccaaaaatcaccacaaggtgactatttttgtcctaaaatttactgcaagccagaaacttctaagggagaggcagtaaagagtagtgattaaaaacataccatgctttggagatagtcaacctgggtttgaatcctggctgtgcccctctaagctatgtgacgaatattgggatttactttacctctttatcttttgtaaaataggaacaacaaaaatacctactatagaggagtgctgtggggataaacacaaaagaatgcaataaaaatgcttagtataatgtttgctacatagtgagtgatcaacatgtgttagttattattattctctctctcctttttttttcagatacagggtctttctgtgttgcccaggctggtgcaaactcctgggcttaatgatcctcccagcttggcctcccaaagcaattacaggcatgaactaccacacctagaaatgccgtgtagaatggtagtctaactttactatttagaattactaaatagaagttatttaccaatacgcggataatatgttctctttatatatcttatttattttctcagggaatttcataaactttcgattttttacaactacaattaattgtaaaaacaattattagttattaaaaaaaatatggcctggcgcagtggctcaagcctgtaatcccagcactttggaaggccgaggcaggtggactacctgaggttaggagttcgagaccagcctagccaacatggtgaaactgtctctactaaaaatacaaaaattacccaggcacggtggcacacctgtaatctcagctactcgggaggctgaggcagaagaactgcttaaacccgggatatggaggttgcagtgaactgagattgcaccattgcactccagcctgggtgacaagagagagactgtttcaaaaaaaaaaaaaggtgaattaaagtatggtcttacaaatggatactgaagaacaagaatgtccatattggctgtgcacagtggctcatgcatgtcatcccagcactttgggaggctgacgtagctggattgcttgagctctggcattcgagatcagcctgggcaacatgacaaaaccccgtctgtacaaaaaatacaaaagttagctgggcatggtggtgcacacctgtattcccagctagttagaagtctgaggtggaaggatcgcttgagcctaggaagttgaggctgcagtgagctgagatcgcaccactgcaacctgggtgacagggtgagaccttgtctcaaaggaaaaaaaaaaaagaaagaaaatatccatactttttgttcagacaactgcaactagttacttacccacctattaattacttgtaattatatttatagtagattaaattgtcactggcaatctcataggcagtaagatagttttaataaggataagtatataattaaatgggagctcttaaagactcctggtaacattttaattggtttaatcttctgccttgcaactggcaactggtattcagtaaaagccataaaaacataatattgttggacctaggaatagccccaaagaggttatgaagatgttaattgaattatttttgtttttcattttttgggtagcagctttattataattcaaacaccatagaagtaatacatttaaagtgtacaattcaatggtttttagtacaggttgcatatccctgatacaaaaatctgaaatgctccaaaatccaaagctttttgagtgccaacatgacactcagaggaaatgctcattttggattttcagactaggttgctcaaccagtaagtatataatttaatgcaaacatttccaaaactgaaaaaaaagtttaaaattcaaaatacttctggtctcaaatattttggataatactcaacctaaatattcacagttgcgcaaccatcaacacaatcaatctcagaacatttttctcacctcaaaaagaaaccttcaaaaaatcagttgggcatggaggcatgcgcctgtggttccagctacacaggaggctgaggcaggaggattgcttgatcctggaggtcaaggctacagtgagtcatgttcacaccattgcactccagcctgcagcctgggtgacagagcaaggccctgtttccaaaaaaaaaaaaaaaaaaaaaaagaaaagaaaaaaagaaagaaacccccatatcatttaactatcatcccctaatcccatgcctgcccctagccctaagcaaccacttccttactttctgtctctatatatttgcctattctggacattcacgtaagtggaatcatataatatgtggtcttttgtgactggcttctttcatttagcatactgctttcaaaggttatgcatgttatagcatgtattagtattttctttttatggcccaataagattccattgtataggtcggtgtgacggctcatgcctgtaatcccatcactttcaggctaaggagggagaattgctagaggccaggagtttgagaccagcctggacaacataagaagtctcatggcacccccatctgcgccacggagccagaccccatctcttaaaaataaaaatttgattgtacatagatgtatcacatttgatttatacaggcgccagctgatgaacatttaggttgtttcatctttggctattatgaataatgctaacgtttgtaaaaaagtttttgcatggacaaatattttcctttctcttgggtatatatttaggagtggaatttgcattattcttattggagtgaaaatcagaagcaatttcatggtctaacaatggaattatgttacactctcaatagtattatgcagaaatgctacagtctcaagagtaacatgcagaaaaatggtggcttttttgaatgaagaccatataataataggctacatgaagtgaaaaaaagaaaaaaaaaggatacaacccacttgaaatcctcctagggcttcccattccttcttctgttctatggcatctgtcctctgcttccacatcctgcctcagttgtctgagggccagccacactagctttcagagatttttagaacgtctcagcttcggagccttttcacataacttcctctgcttgtatcattctttgcccagtggtttcaagtctcatcttaaatgtcacttcttcagaaaaaccttctctgatatcccaaaccaggcggaaaggcaagcgtttccacagcagccggcgattttccatcttaacggttttaataccagaattgtttacttggtcaaatattgagagccttttatacacagggatagagggtgaaacatgcaagatccctgccgcctgcgaccttatattctagggaggggatacatgcacaagtaaacaagtaaatgtacttggtaattttacatagtgataattagctcaatggttatcctctgtttggactgtaaactccatgaaggcaggagctatgtctgtcttggctacttccagtttgctgagtctggccactaaataaactcaacacatattttttcactgacagttaaaataactatataaaaaacaaatggaaaaaacaaacgagacttctataaatggttgagatctagctcttcctctttcaaaactctgtaatactacatatttttaaataattaaaacaatcaaaatagcaaaaagttaccgtttgtactaacagaaccccaaataaaacccatttatgtcaccacacattctttaagcacctggtaataaaacctattcggaaatactcagacgtgttggttgagtggataaaatccccttgccacattgccaagcaggttcctcgccgtcagcagtataatttacagtgtttcactgaggccttaagcacccatgatttgattctccctaattttccgattcctaaaaccctttagaatctccctccacccacacaatgtggcagtgagaaaaaccgcaattctatttacatgtcaacggtaagaacacgtaatactttgctaggtcaacaaatctgcaagatctccacccaagagatcagtagccccttcccagtgaatccttctaagagcctggggacgagtagggctagataaaaccaagctgctgtaaagctggaccacaggagcggatcgtgaaatcccctcccccaagcgcagcgctcggccgcttctttcttccccaggcgcatgcgcagcgcactctccggccaccgcacgccccctcagtgggggcccagagacgctgacgtcaccgtgcggtctgcaagcaacccttccgctccttcaaggaaaatgagtccacggaccttcggcttttcttagccacgagaaaacgtcctccctccttccatcctagtgccaacgacttccccagcccgtctcctttcggccgcacttctctgtactttcgttggaccgggaaggcggcggggaggaacaggaagggtgaaagaccaagtccgcgtagtttacaaggagtgggcgagtctaggaatcggtccgcgagggcggagccgaggaagccggcacttcttcctcccttcccctctcttcccctccctccccagccttccccgcgagcggacgcggcagcgcctctgtctcgctttttcttatttttcccccctttcccctttctttttttttttttcttttcttttctcccctccccccctttcaccatttcccctcggaggcgctttccccgggcaggggcagagccggtctcaccccccgcctctccccggcccccgccgccctatggcgagagggagccccctcccaacccgggctcgagcggcggcggcctcaggccgggggtcatcatggaactaattcgctgaccgacccagcggccgcagccgtgcgtcccgctcgagcgccagcgcccgcgcccgcgccccccgatccgcttcccctttctccctcctcagttggccgagtcgtcccgcgcgcaccgcctccgcgcgcctatgagaatgaggtggtaacgggcccccggatgaccccgcgtcaccactgtgaggcctacagctctgccggggaggaggaggaggaggaagaggaggagaaggtgaggggcgggggcgggggcgggggctcgacgcgtctccgcggccggcgtcgacgcgctggggccccgctgctccccccgcgccgcccccgtggcagcgcccttggccgcgcgctgctcgccggagacccaccctcccgcatcccccagcccggggaacctcggggccgccctcttcgtcctctccggcccagacagacccgtcacctgcccacttgaaaacggcactactgtgttccttttcgggccagtttttctgtcagcgagtaacttttttttgtggcagcggcaaattagctactctatagtgcgtgttggaggctctacgagcccgtgttaatacacaaagaaggggacacacccccaccctcaggttgaacgattctccggggacaccaggaggattactaactttgcacggcagactgaatgccaaatgaatggggtgaacctccggtgctgtgaaattcgggggagggcaacgttacccagggcttggggcgggtgggtggggggaatccgggggaggtgagatttgagttgtgctctaaaggctagattaaataactggaatttgaaaggaggacagaggagcctccgctggagctagggggctccgttacagatccttttggcagaagttgacaattgggtatcaaaacagtggaaggtgtttcgggaggtaggatggattcagactctgaaggggtttgaactaaaatgtttatgttttattctgtcagtggggagccactcgacttagagcagcagagcattacagtaatgacgttaaataacaacatttgatgaggcttattatctgccaggcattctcctaagtggcttgcaattcacttaatccccccaaggctggtagtaggagcctcattttacagatgaggaaaactgagactccacaagattaactttctccttaggtaacgcggctaaaacccagtagccagaattaagtctgattctacgctgtgtggtctctgtcctgaaaatgagtttgttgaaatagcagtgttatctgctgctagcttttccaggtcatttgtggcagatgaaatagaaaggattggacaaatagattaagaaataatggacggaatagatgtagattggctaatctgggaccagagaatctccgagagattctgagcccctctactagaaatttcttgataccgatgaagggcagactaatacagtcagcatgtgttagggaagttcagtaaaaatgatctgcagttacaggtagtttatgtggtaatgtgacatcctagtaggttagaatggagcttagcatgtgtgttggtcaagattggaagctgagtgtgtccgtgttttgttttgattgtgtaatacattaaaaatgaatattcatcttcctatgtatgtttcttcgtctttaaaatgggctttatggctgaaatgggggtgtagtaagaaaaataaaaaactagaaaaaaagggctttccacagtttcatcaaattgtgggaacattacatgagttaatatggcatagcgctttgaacaataggtagtcaaatagtaagcactcagtgcttttacttgttaagctgtttacaagtgaagctattaggcatatgctcaactctggagattaacatcaaagaattcattattaggaaaggcaagtttaccaatagtctcaaagcaactaaatgtaaaggtagaattatgtccaagtacagatgttggaaggcagggcacaactgcacaaatccagagagtcttacagactgatggctactttaggaagggaagtatgagctagaggacatttcaagttgaaacagcagtgcttgtacagccagggagattgggaaagagcatacacttggaattgcaaatacctttaattcattgtttctagtgcataaagtcaaggagggaatagtagaacttcagtttcttgtatggccacgttaatccctcctttcagaagaggaactaagattcagaagtcagcactagtacaggattattaatggaattggtgtgatgatgatagcaaatacaataatacatattagtgaagttgtttatattgtatacccagcactgtgcagcacttttcctcagaggagcagggggccctgtatgtatatctgtaatagttatgctgtacagtaagccttttataaactattacctcagacattaagctatttgataaccgtggagaaaggagaagcggcagcaattgagaggatgggaggagaaatgtgaaactggcataaagtttgatgtgtgtggaatatgccaactaaaatagtcttttgttatttcttgcttttctaaaaaagcatgcaaagttggatgtaaccaacaataggcatacagtaacaaaacataactatatagttctgttaaaactaaaattgtattttaaatgtttgcattttcttagcggaatttattaattcaactcaaaatgtgctttacccgtagaaaataggcttgtgcactgtcagtaaaagaaaagccaagcccatgctttctgtatcatagtatgtcttactagtcttgtcttttgttcttttatgtggaacatacattatgaccctatactgctaaatatttcacaagaatagtaatattctcttacagaatcacagcaaaattttcaattttggtaaatttagcatttgatacattgacttgtgtaatctaccgtcccaattatctcatttgacccaataatgacctttacaccatttgtctccttccagtacaggatctagttgagggtcaggtattgcagtttcgtttcttttcttttttttttttttttttttttaagagattgggtctcactttgttacccaggctggagtgaggtgctgtaatcatagctgactgcagcctcaagctcctgggcttacgtaatcctcccacctgagtctcctgagtagctgagactacaggcaggtgtgtgacatcatgcctggctagtttaaatttttttttttttttttttttttttggtggagacagggatctcgctctgttgtccaggctggtctcaaactcctggcctcaagtgctcctctcctgcctcacaaagttctgggatcacaagcaggtgccaccatgccctgccttctgtcctgtttttaaaagtttaaggaaattttacctcgttttactttttctttgttagctttctctagagtgagcaaagagtgattcttttttttactattgataatgtattgcgttgatttctgaatcttaaaacaagcttgcattcctggaacaaatcccacttggttatggtatataatcctttttttaatattgctggattcagtttgctagtattttgttgagaaattttgcatttatattcagaagaaatactaatctgtagttttctagtgatgtctgtctggttttggtagcagggtaataactggcttcaacgaataagttgggaagaatttgtaaagattgctattagtttttctgaaaatggttggtagaattaaccagtgaagccatctgggcatggatttttctttggcagtgctttaaaaaaattaactgtttaaatctttggttttacaaatactcagcttttttctttctttctttttttctgtttttgtttttttggaatcatctcaccagtgcagctttttacttcctaagttttggtattttgtatttctgggaactggaccatttcatctaaaattgccaatttagttgcacacagttgttcataaattcctttataattctttttatttctgtaaggtaggtagtgtcttctttttagtcttgattttagtaatttgtcctctgtattttcgtggtcagtctagctggctaaaggtttgtccattttgatcttttcaaacaatcagcttctggtttcattgacttttcactgctgtttttgtattctctacttcattaatttccattctaatatttagtatttccttgcttctgtcttgctttaggaacagtttactcttctttttccattaccttaaggtggaagattaggctcttgatttgagatatccttttttagtagaggcattttcaggtattaatttatttctaagcactgctttaattgtatctggtaagttttggtatatcttcattttcactcatctcaaagtattatctaatttcccctgtgactcttctttgaccagatacctttgttttaaaaaaagttattacaatataaatatttgaaagtcatactgagggctttaattataggcaattggagaacgggaatccattgaacctgatttacttctttttacatgattctactttatgtgtctctttctgtaccatctaaaccccctaaaaataatcttgaaacctagtgaaggaacttgagtcactagtgacagtcggttgttgggatagcttgtgaaggctggtggatccatttggttgtagctaatggcgtgaaagaattattaaagttttaaggtttttaataggagtttggaagaaaccttagaacctatgaagtctaatcttgacccaaatagctgtttcttctaaatatctcttgtcagatggtcatctggtttacattccatttcttttatataaagattttcactgtgttgcccaggctggtcgtgaactactgggctcctcctgccttggcctcccaaaacttcgatagctcctcctgccttggcctcccaaagtgttggaattacaggaatgagccacagcacctggcctacattccgtttctagtgttaatacttatgtctgcattagaagaaattatagtgagcttgcctaccaaattgttgaagatctgagaaaggcaccaaggcaacaaaattggaatctcagaacatctcagcagtatgcaacagggatagaatataacaggatgaccttttttcttttttataaagaatatttttaaagttgtgaacaaggatgtgtcaaaaaaaaaaaaaaaaaaagaaagtacccaaacctcgcacacaatgggttggggcaggtaggggtagaactggcttaacaaggaacctgagaaagtctcctaagagtttttgttgaccgtaaattatatctgaattgataccgaggtgtggtcttcaaaaaaaaaaaagctaatgagggccacgagtggtggctcatgccagtactcccagcactttgggaggccaaggcaggcagatcacttgaggtcaggagttcaagaccagcctggccaacatggtaaaacctgcctctactaaaaatacaaaaattagccatgtgtggtggtgtgtgcctgtaatcccagctactcaggaggctaagggaggagaatcacttgaacccaggaggtggaggttgcagtgagccgagatcgtgccactacactctagcctgggcaacagagtgagactcttgtctcaaaaaaaaaaaaaaaaagcccatgattttagactgtatttatggtaaaattaaagctaatttagaagaggcaaaatatcgtgaggagctatcgaagttttcagctatggaaaagatgaattggtgagcatgatagcacccttcaaagattggaaggattggtgtgaaagagattagattttggtaggttaaagttgtgaacaaggatgtatcaaaaaaaagaaggtaccaaaaccccacacacagtgggttggtacaggtgggggtagagtttttggttgtgtgtttttgtttggggcaccagtggttgaaactggaacaattggttgggtctctgttccgtcgaagtactgtgctgtggacacagtgagtaataaaaaaaatgaggacacttggacacaggaaggggaacatcacacaccggggcctgttgtggggtggggggaggggggagggatagcattaggagatatacctaatgtaaatgatgagttaatgggtgcagcacaccaacatgacacatgtatacatatgtaacaaacctgaactttgtgcacatgtaccctagaacttaaagtataataataaaaaaaatatatatatataaaaatgatattggcagatgtgactgcatagggatttctttatttggagacacggtctcattctgttgctggggctggagtgcagtggcatgattttggctcactgcaacctcagcctcccaagtagcttggaccacaggcacgtgccaccacgcctgcctaatttttgtatgttttatagagatggagtttcaccacattgcccaggctggcgtcgaactccttgactcaagcaatctgtcctcctcagccttcgaaagtgcaaggattacaggccggagccgctgcgcctggccaggaatttataacgtagttggggagttaacagaaagctgctttatgacatgattaaagaatcaagagtttttagaagaaattacctttgagataggtctttttggattaatattagttctttttcctctctatttaccccttgtcatcttagtatgaagatattttatgctaattatagaagatttgcaaaaactcaggcgtttaaagacacaaaaattaacaaaatcataattgagttaaccagaattagtctctagtaagttgagaagcaaataggtagcatatgtggagtggtacataggaaggaggatagtagctggagttgggatagaatgtggaaattaaagaagtggtttgctattttttgcttttccaaattttttatttttaaaaaaattggaactttttacatgttaattctggatatttaaaaaaattcttagagcccatgaatctgaagtgtgtaatacagatacatagtttacaggtacatagttgagaaagtcaaattgttagtgaaatttataatgaaaaacagcattctcctacgctaggcctttctcacccttttcttactctgcagaggttaactactcccaactctttcctccttgtcccgttatttagcatcacattttcaaacaacttgctctgctgctgttttttgacatttcagtttgagatatttatgaatttcctactatgaaatgtaaagacgtggcttttattttaccctcttccaatatccatagttatgtctccacatcctgccaatgtagttttatcatattgcgatccctatccagtcttttcattattattgctgtataaatattgtgatacattactttcttaaattcttttttctgaagttaattacctttttagttgcttacctttcaacaaatccagctaagccttttcacattcttttttgtttgtttgtttgtttgttttgagacggagtcttgctctgtcgccaggctggagtgcagtggtgcaatcttggctcattgcaccctctgtctcctgggttaaagcgattttcctgcctcaggcttccaagtaactgggattacaggtgcctgccaccatgcctggctaagttttgtatttttagtagagacgggggtctcaccatgttttgtcaggctggtctggaactactgacctcgtgatctgcccgcctccacctcccaaagtgctaggattacaggtgtgagccaccgtgcccagccaccttttcacattctttagcagtttcttaatccaattttctacacacagtcaaacctcaagtctgtagtttgcttcttttttttttttttttttttaaacctagaagcctgcacggtggctcacacctgtaaccccagtgctttgggaggccaagccaggaggactgcgtgaggctgggcaacatagcaaaactgcatctctacaaaaaaaaaaaaaaaccccacaaaattacctgggcttggtgatgtgcatctgtagtcccagctatttgggaggctgaggcaggaggatcacctgaacccaggagttcgaggctgcagtgagccactacaccactgtactctaacctgggcaacagagtgggactcttgtttccaaatacatataaacataaaacctagagacatttctcttggactctatgttgtcttgcactgctaaacttgctatttagacatgctgctcattttagagtgctagtcaatgtactgtggagctttctaggtgagcactgttcagtagaacttactgtattaataggaatgttccttttgtgcactgtccgatatagtatccactagccacatctggttattgaagtaaggctattgtgactgaagaaatacattttttttttttggtttgtttgtttttgagacggagtgtcaccctgttgcccaggctggagtgcaatggtgtgatctcagctcactgcaacctctgcctccctggttcaaacgattctcctgcttcagcctcccgagtagctgggattacaggcgcccaccaccatgcccagttaatttttgtattttcagtagtgatggggtttcaccatgttggccaggctggtctccaactcctgacctagtgatccacccgcctcggcctcccaaagtgatgggattacaggcgtgagccaccatgcctggccaatttttaaattttattcagctcatagttaaatatccacatgtgtagctaatggatactgaattggaagcgcaatttaagatgatttcatactggagggtatggtttcatactgaagaagtgggaatgggtaggatttaatgtaatatattttctttttaatgaaggaaaaatgttagtggtccttatctgattaggtttttaagaggaatgtttggaataactacttctaagaattcctggtaaaaaagccagtgacaaagttttgacaatttgaaacagtaataacatgttttgatcagagtccaaaggttccatcaattacatggccttgtttttattctctttataactgaatttcagatttcaagtgtgaatgttttagataactgattattttggtattttaatacgatattttaaagagctataaaatcctatactgcctcatagcattcttattttgttttatgagttgcttaattagtactttatataatgctacacttattctataactaattttaaaacttacttgattctgtaggtagctacagcaagctgggtagcaggcagatccaaaggatatcatgaagtttccagggcctttggaaaaccagagattgtctttcctgttggaaaaggcaatcactagggaagcacagatgtggaaagtgaatgtgcggaaaatgccttcaaatcaggtaatgatttttctcttaagacagatgaattttattagaaataaacataccactgccatacataataatatcttgacactacattggaggagtgtgtaccatttaaggatgtgctgtatttgagagactctccctgtttcttttttgtgtaacagggtctcactctgtcatccagtctggagtgctgtggcatgatctcagctcactgcaacccctgcctcccgggctcaagcaatcctctcacctcagcctcctgagtagctgggactacaggcgcatgctaccatgcctggctaattttttgtatttttggtagagatggggtttcaccatgttgcccagcctagtctggaagtcctgagctcaagcagtccaccagccttggcctcccaaagtggtaggattataggcgtgagccaccatgcccggcctcttcttttttaaaaactcctgctcctgctgtggccttttctttctgaaacaagagttaactgtttttgtttgttgacctgttttgttgttatctgagttacagctttgggaaaatagttaggtttgttttctttcatcataatctatactaacagtagtaaccttctttagatatatagtttatagttagccacagaggctgaacatcttcataccattgtctttagtcaactaaaaacctactctttcatcattagcggtaaggagttcatgtgaattactaaggtaataccaatgttggaagctttttagaagatagccagctggtctcttaactactgttagctgcatagtttttcttttagaaatttttatacttctgtcatatataattatttttcacaaataactgtgaactttatccactccaaaagtttattgtataagatgtcttatatgtcttttatccttaatatctaacatggtgcttggaaaatagaatagtggtcaaatgttcttttaatatgcatgagtgaatgaatggcaaatatgtaagttcctcgtgtgttgttttaggctatcctttgcttattggttttgaaagtatatatgcctttttaattcaattctaatttttcctacttattctttcccacaagctaaagaaatacattcttcatttactgttacttgtcattttgcaaactgattagttaacttgaatgaggagtgtttatatatatgctatctcatttaatatctcatttaattctttgaaaaagtactcagtagtcccaatttgctcaagactttaataagtaatagaatgataatttgggctggacgcagtggctcacgcctgtagtcccagcactttgggaggctgaggtgggcagatcacctgaggtcaggcgttcgagaccagccatggtcaacatggcgaaaccccatctctactaaaaatacaaaaattagctgggtgtggtgagtcattcctgtgacccagctacttgggaggctgaggtatgagaattgcttgaacccaggaggcagaggttgcagtgagccgagatcacgtcactgcactccagcctgaacgacagggtaagtgagactccgtctcaaaaaaaaaaaaaagaaaaaaaattataattcgatccttttcctaaggtagtcctcttcctgtgatattttgtgtgtgtgtgtgtgtgtgtgtgtgtgtgtgtgtgtgtgcgcgcgcgcgcatgtgtgatttttagattagttgggaattcaagtcatttagcaaatgtctgctgagtatctgctatactctaggcactattctaggtattggggatacaacaggagaaaataaattcctgcccttatgttgtgacattctagtgagcctcaaaacttttttatagctgcttgtaggaccattcctttcctcctcctgctatctccttaagtcagcatgtaaccaacaataatatatttttacagcctggtctttgaaggtgatattctacctagattgtagtatattgctatattaccaaataatctgacctatttcttttttttttttgagaaggagtttttttctctttttgcccaggctggagtgcaatggcatgatctcggctcactgtaacctcggcctcccgggctcaagtgattctcttgcctcagcttcccaagtagctggaattaacaggcacccgccaccatacctggctaatttttgtatttttagtagggacagggtttcaccatgttggccgagctggtctcgaactcctcacctcagatgatcttcctgccccagcaacccaaagtgctgggattacaggcgtgagcaaccacacccaaatctggcctatttctgtaggtgatttaatgaatactggtgtggtaataccagagaacagaatagtatcagaacttctgagagagatccacttcttaaggatttgcctttagtaatgccaagtagaagccatatttaatacttgtaaaatttgggtggccttggtctggtggggataggagttaagaataggggtaaaaggctataggggcttgagttgcttgccagggtaacccccagggacacttctctattctatttttttttttttttggagacagagtcttgctctgctgcccaggctggagtgcactggcgcgatcttggctcactgcaagctccgcctcccgggttcacgctattctcctgcctcagcctccccattagctgggactacaggcgcccgccacaacgcccggctaattttttgtattttttagtagagacggggtttcactgtgttagccaggatggtctcgatctcctgaccttgtgatccggccttccaaagtgctgggattacaggcatgagccaccgcacccagcaccttctctattctagttctaactcttattttcctctaagggactggctttttttttttttttttttttttttacctccctttccactgttgctctgacttttctaatttggttttgaagtgttggtaaaaatggaaaagtaagatatttttaagctttctcttatgcctttttcctccagtttccttctaacttcccccctgccccaactatattttgaagtcagtctctcacataattcttgtttaatttgcatcccctatccccaaatttaggacagtgtggtcaggcaagaatattatgcagctgtcactcaccttctatgtgtttctgccacactctgcttcccttatgacagcacaaagtattataattttctggtgatttgactgtgagtttccctgaggggtatggtggtgtcatttttgtttacttgcatataatagactcaaagtaagcatttaagtgaatggtgattatcatttctttatgattcattcaggtaccttactgtgttcttggcacttgcagagaacttcttttatattatgtaatagtactttcaagttcatgataattttgttacatgaatttggggaaaacattgaaactggtcaaagtggcacatactttcagatgttctcaatttattttgccaaagtgcttttgatttacaaagataaaaccctgccacaaattgttgatatacagatgattttcagtagaattttagaactctaaggaatcttaaaaagaggttgttaacagcttttctagtcattctcaactggagtttagatttgctgcttcctacttcatcaaagccaaaaggaaaaatttaattttttttttttttctgagacagggtcttgctctgttgcccaggctggggtgcagtggctccatcacagttcactacagcctctatttcccaggctcaagtgatcctcccacctcagcctcccaagtagctgaggtaacaggcacgcaccaccatgcctaatttttttatttgtggagatgaagtctcactgtgttacccaggctagtttcaaactcctgggctcaagcagttttcctgccttggccccctacagtactgggattacaattgtgagccatgcccagaaatttaatttttaaaaaaatgttgaacgtttaacaggtgtaatgagatgctgtgggaacataggaaggtactcagcccaacttgaattatcaggaaaagtatctggcggggagtaacatcaaaatagctctcaagagatacataataaggcaggtgagagagaagggagtgcgttccagtcagtaggagcaatatgaacaaaggagcagtaacgtaaaataccaggggcaaggaaggatcatcagtagaagttactattacagcatgaagtttaagacagaaagtgatggaagatgtccgaggttagagaggtaggtcatagccgggcatggtggcttgcacctgtaatctcaacactttgggaggccgaggcgggtggatcacaaggtcaggagatcgagactatcctggctaacatggtgaaaccccgtctctactaaaaatacaaaaaattagctgggtgtggtggcgggtgcctgtagtcccagctacccaggaggctgaggcaggagaatggtgtgaacctgggaggcggagcttgcagttagccaagattgcgccactgcactccagcctgggtgacagagcaagactgtctcaaaaacaaaaaacaaaaacaacaacaacaaagaagaggtaggtcatagatttgtatgccatgctggggaattgtacttaatcttttaggtaatggtgaaccttttagagtttaaagctggggaggttgtatattttaaggagaagactagcagcatgtggaatataatatatatacagaatatatattaatagcagtctatattttaccatgtttgatcaatccattataaattctctttaggattatttgttcaactactgaatccttctaatcctatttaagcagtccatatgagaaacagttcacctgatggaatcaggaaatactgttttgggctttttctttttctctctcattctttattttagaggaataggaatgaaatgaattaggcgcagaacttactatttgtaatgctgtcatgatgatattactgtttagtacatatttgaattgatttgaaaaagtgaccttagactcagtattacttcagttaaattgagtcttcttaaactgttatcttttggattttaaaaaaattattgctggttttggctagtgatgataacattggctatgcaggaatgcttttcttggccctgttgttaaattttactatctggtatatgggccaaacatagtggcttacacctgtaatcccaacactttgggaggccgaggtgggaggattacttgagcctgggagttgaagaccagcctgggtaacatagtgagacctcgtctctacaaaaaagtaaaattaggccgggcgcagtggctcacgtctgtaatcccagcactttgggaggctgagatgggtagatcacttgaggtcagggatttgagaccagcctggccaacatggcgaaaccccatctctactaaaaatacaaaaattagccaggcgtgatggcacaagcctgtaatcccagctacttgggaggctgaggcagggagaattgcttgaacctaggaggcggaggctgcagtgaactgagattgaaccactgcactccagcctgggtgacagagcgagactccatctcaaaaaaaaaaaaaaaattagccgggcctggtggcacgtacctctggtcctagctacttcaggatgctgaggtgggaggatcacttggggctgggaggtcgaggctgcagtgtgccatggttgtgccactgtactccagcctgggtgacagagcaagaccctgtctcaaaaagtatatggaatattaaagttcaaagatattgtcatgatttctttcatgactaattgttaacagtgtttaaaataacttcatagataatgttttgtaaatttgtttttctgacattattagagaattgggtagtttagaggtgggaaaggagaactaatatttgagtacgtttgcattccatatatatgctttacattagttatgtcatttagttataactatatgataatctccatataactgtattctctttttttgtatgttacctttgtgattcttcttacaattgtatgtttctgttattgtttaatgccaaacaccaaatagtgacattatttaatgtaatctgtcattcagggattttttttttctcccataccccacattgtatctctaactgaaggttagagttaatggtgttcttgttttcatagctactgtaagtcatcgttcctttcatctccctaaaagccttcccagtttcatcagattataacatcacctacctctcctgggaatttatttccttgttgatgtgtttggctggcttagttaacattacttttccttatttgttgtggcattttggataaaagctcatcttgataggaatttaatttctcttgaatgcttaactcttcatccagaagtcttgtgattggctttacttggttctcagggatttttatggatccttagtccagaactagatcttaaagtagcctggatacagaattacagctagatatgaggaataacttctagtgttccataccattgtaggcttactatggttaacttaggaaatacaaatgaactatgataacagaatgatagcccatttaaaaaactgaaatcaatattaataagtgaaagttaccaggggcaacagatgaattatacatttagagatgatgaaaaaaaatattgaacaggaaatcaacctgaagtaaatgactattttgaaagctttccacaaacacaaaacattgttgttttaatcttcctacatattatttgagtattctccttacagctctttcaaactgtttgaaactacagtttgaaagagctgtaaggagaatactgaatgttcccaaaataaacaaccggttttatttttttaatggcgactccaaaactcaagagtaaaagttttctaatcactattactttaaagtgtgtccctgctaaaaattaagcttatactcaataggcttacaacaacaataaaacaataatgttttgtgtttgtggaaatttttcaaaatagtaatttacttcagattaatttcctgttcaatattttttcatcatctctaagtgtataattcatctgttgtccctggtatcttttacttattactattgattttagtttttcaaatgggctatcatttccattatcatagttcatttatatttcctaagataagttaatggctacttgctgcgggagaaattcactgtattttcttaatcttaagaggtggggtaacttaactccaaattactatcagttgataatagtgttacttaaactttaaaatgttatattctctgagcacctaaatttaattcaactatggatatttggtgagatgacatagtgaaaattttaataaagagtaggagaatattggatattgatattaaatgtgataatacataaagttttatttcatgtgtctcaagtctgatagattttgaataaccttaacatttttaaatatattttgtagtattacctaaccttttatgagagagaattctaaacatactcttgatgatagctcaaactttgtcttctgttttcaaaattgttcccttatagaatgtttctccatcccagagagatgaagtaattcaatggctggccaaactcaagtaccaattcaacctttacccagaaacatttgctctggctagcagtcttttggataggtttttagctaccgtaaaggtaagtgttttaagatagacttacatataacctcatttgagtgtatgtatgctaaactagaggctattagtgaacattctgtaaggtagaaagaagtggagaactttgctggagaatgatgtatgtacccataagaagacatggtgatgtcttctgctattgtttattttatttttattttttgatagttttgctctgttgccctggctggagtgtgtctgcctcctgggttcaagcaatttttgtgcctcagcctcccaagtagttgggactgcagacacgtgccaccatgccagtctaatttttgtatttttagtagagacagggttttgccgtgttggccaggctggtcttgaactcccgacgtcaagtcatcagcctgccttggcctcccaaagtgctgggattacaggcatgagccaccactcccggctttctactattgtttaaaaagcagaagtgtttttggaagtgtttctaatagtattctgtaattttctttttgttacaagtattcataactttttagcctatgaaattttttatctcttgattttagcacaaaccgtatagcatcagcagaatacttagtcattttctaacatattggtgtacagaggtggacaaggaatcagactagaataaagtataagcctattgcacgtttttctctgtcactacttattgaatatccatactgtgtggctttctgaaaaacaaagtgctttctacgggcttactttggtatataacaagatgtcataaagcaactttggtatatttttgttgaatgacagcatacaaataattaggttttatattgtccccattgccatgtcattggctgtgtcaagttagtaaataggccctcaacatatttaaagcagaaaatgagcatttatttaatggcaaggcatgaaaaagtagcatagtatttaaacttgtaggcattagtatgcaaaagaatatgtaaactgggggaactgtcaattaaatgctttattaggtatacagaatagaagccaaataattacggagtgtaagactgaatagctgctcaaacttctactcttaagacacttactaaacatgacaggacccaataaataagaaatatgaaaaaatgagatatttggcaaaattctctaattgttccacaaatttctccaactttgtttcaaatgtttaataaacacagcaagaaactcatgatagaaactacaacaatgtgttcactaataatttttgaaaaatgtactgtccaagaaaggacactaactttaaactcatctttctgtggaattatctgtgaaaagtaggttagatgtagtagagagggagggaggagtgatgtggacttgttgctgagataaaagtaggcatttttcagatatcccagattgcaagcaattagctttaaaaaatgtttacatacacaaaaaattttttaattttgggaatattatttattaaaaacttctaaatcaagctttttttctgctggatagaaatgaactttggttaattggctttggttgaactttgagcaatggaattgatattatttttgtagaatatcatatggctaggattgtaatgctaacagttagctctcaggccgggcacggtggctgacgcctgtaatcccagcactttgggaggccgaggcgggcagatcacgaggtcaggagatgagaccatcctggctaacacagtgaaacccccgtctctactaaaaatacaaaaaaaaattagctgggcgtggtggcgggcgttgtagtagcagctacttgggaggctgaggcaggagaatggcatgaacccaggaggcggagcttgcactgagctgacatcgtgccactgcactgcagcctgggcgacaggccaagactccgtctcaaaaaaaaaaaaaaaaaaaaagttagctctagacacacttgatcttgcaagtgtactttccttcctttcattactgctctaaagctttttaataaactttctttcctgttcttaaagttagctctgatctaaaaagtaatgagtggcagtcacattaattgaattccatagtattttgtgtatacctgtctcatctgcatatctaggtttttaaaacagttacaaaaagttaaattgtttttgaaaaatcactaaagttgctttttccctcttcaaaattttaggctcatccaaaatacttgagttgtattgcaatcagctgttttttcctagctgccaagactgttgaggaagatgaggtaataaatcctttcaagataatgtttcttccgtgaaaatttctctccacatttattaacttgcttcgtttgctaaaacaaaaatcataaatgagtttcttttctgtccttttctccctgtccctgttcccctttgctttggatagagaattccagtactaaaggtattggcaagagacagtttctgtggatgttcctcatctgaaattttgagaatggagagaattattctggataagttgaattgggatcttcacacagccacaccattggattttcttcatattgtaaatatacctgaagtcttttagtttcttatttgagtgtgtagttttcagtaaattaaaaaatagattgcctactcatttattttgtactggaaataggaaaaagaaaacttgatatccaaggaaaaattataaattagtatatatgtcatatcactgaagcttaattcgcagacttagaaattgaataggttaggctgggcgcggtggctcacgcctgtaatcccagcactttgagaggctgaggcaggcggatcacttgaggtcaggaatttgagaccagcctggccaacatggtgaaaccctgtctctactaaaaatacaaaaattagccgggcatggtggcaggcgcctgtaatcgcagctactcaggatgctgaggcaggcaggagaattgcttgaatccaggaggcggatgttgcagtgagttgagatcatgctactgcactccagcctgggcaacagagtgagactctgtctcaaaaaaaaaaaaaaaagaaattgaataggttgcatcaatttctatatgtaatttcccagatatttaaataaagttaaaatgatgttcttgtgattttcagttccatgccattgcagtgtcaactaggcctcagttacttttcagtttgcccaaattgagcccatctcaacatttggcagtccttaccaagcaactacttcactgtatggcctgcaaccaacttctgcaattcagaggatccatgcttgctctggccatggttagtctggaaatggagaaactcattcctgattggctttctcttacaattgaactgcttcagaaagcacaggtaggtgtcagtctaattaaatagtgttctttttaagtttttctattattggaatacatagagttaccaaactaaaagacatttctcatgttgtaatggcaaaccattcttaagagtagacaagagtaaagtatatattttaaatttacgggctaggtgatctctttttttcatataaaacttatatagtatttttaagattccttttaaccatttctcttatttttaagaattctaaaatgttcataagattgtcaataccatattgtcctttagttttttgtaaagaaacttcctagctacatctgtaggttttaatgtagtacttctttacttcactcattttataacggatgtcaggaacaaaaattagaataagttgctttttagacaagcaaataatttattgttggctagtaagtgaagtatttataccaaactggcaggtagaagccacttttctgaaagaggtttttccctggcagttccattattacctaagattagtttgtaacttgtatctacagattattataaaatgtataggttgataaattatcaactacctaagtaaaatgtaaaggttcagtggagaaaattctcattcaaatggaaagttggtgagagtgctgtatgttagcaactactttgagagaaggcttactggttctattcatgtcaccaaatagaacttaccgagtttagatctgctgcagaccattttcctgccacctgaatccataaaagactcatgaacctactttccctttatatggctatttattcttatttaacagtagttattctgatttgttttattggattttacttagaagattgtgaaattctaagcttaacattttgcaataaactaattgtagcaaagaactgcagttattgagctaaaaatttagattattataaaagaaaaacataatagttgaatttggtgtttttctaagaaagttataattgatcttatagcaaacattttaagaagtatgtctgaagaaaatgaaccaggcaaaaaaataattttttttttaaacaagtatgtcagtgcttccaagaattttaggctctagtttgtgagcagaggggagctcagtcttttcataaaaaggttgatgatcagagcagtatgttagctagagatctacctatgtagtgtaacatgggctgttttttgttttgaagggatatcttaattgtcttagattaaaataattaaatgctgtaatgagaataaatcctaggaggtagttgctacttagaatttttagaaattatgataaaccaccatttaaatgaataatatgacacagaaaatttactttgctcaccctggagtgttagaaagaaaagttgaatattaatcactcacattagactgtgaagtagaggaataggcttaatagaaaacctcctacattacattatttttattggaacaaatgacatctctctaaatgccttctgacttattctctgtgcttactctcaagatagtacagaaaaagattgctttaaagtgttagtgtcagaggacagattttgaagcataaataataatgttgtaaatagcatgtgtattctgtagctttgagatcatgttttcctagtgaaaaacactggaaaatctgatactcttttgtaagttttctggtgctagaggaagagagtattcactgaaacttttttttcttcttagctgaaggagtattgcaaacctgggatttgacagaatctttggagaagttatttcattcacctcctttattttatagctctggtgtagggaactggagactttcttagagccgtgtagagctacttagtagtgatttaaaagaaccaatgctttttttcataccacacaaaccttaaaaattctagttcagtggttttcataatttgttttagaagtggaaccctttcccagtcccccttccccaaagaaaatcttgtacacacacaatcccagaatatagaatagaagaacggagctatacttgtgtttaagggcagatctccactcaacatagcgttttcccttccatagctagaaatctacctatgtagtgtaggtttagattatattatgtaggtagtctttggacgtagtttgaaaactggaaatacagtgaattttttttctttttaagagatatgccccatgtagtatataattgcagtggggaagttagtgaagaaaaggaaggtcataaatcttggtagagacttttgggacttgttctagcagttctctaacaccaacccatgtggtccaaacatggatggctcctagttctttaggactcatttctgtttttgctaagtttgctgtgttcaggtagggaacaccaggtctaatatctttgtgtttagacgtgtgacaaggccacaatatcagatttcttcctagttttctggttttaatataggaaagtcttgcatcagattgatgagatcatgccaaaattatttgcgacatgattcccagtgtcttggtttgaggagagtccatcacagacataccgtgctgtgaggaggccactctcactagttctgcctgagcccccactttgagacaaagtatggtgagtgttcccaggtttgaaaggcaatcttccttttgtccctgttaacctcccactacacccccttaagctcttgcgccacctgttggtcaccattctgggatggctaaacctctttctctccttagccttataaactcaggctgttaactctacctagattagtgtggtggtctttgtagttcctagctgggcagtagtcaaagtacatgttctagtttaaaactagagtaggtgcagccataaaacagaacaaaatcatgtcctttgcagcaacatggatgcagctggaggccattatcctgagtgaattaacgcaggaacagaaaaccaaataccacacgttctcacaagtgggagctaaacgttgggtacacgcggacataaagatggcaacagtagaaactggggactactagaagggggagggagggaggggagcaagggttgaaaaactgttgggtactgtgctcactacctggttgacaggatcacttgtactccaaacctcagcatcatgcaatatatatctagttaataaacctgcacatgtaccatctaaaagtaaaaagaagcaaatttaaaaaaaaaaaaacaaaaaaacagacccctccccaccagtctcctggttctttttgaaggtggctgtggtcagactattccagcaggttcctcagtgcttcatgctgttcatcaaacctggatccatctggacctaccatttatgtcatttattgttataaaaaataatacatattctcttgacaccttataattagagttcatttaagtcctttttatcaactccattagagtacttgtctggtgtcgagagttttggtagttccagtatatgtgcttgttttgtttcttccactggatctcaagaaggaacaaattattttggtgtcttatagaacaaattcagattgtactagattagaaggaatttattttgatgttattttggagaaaagacttacttgggacttgggtggaagtggagttcatatggatggttttgttttgaataatttctaaggtcttttagctctatcatttcttgtcagtctcccaccgctaaaatataactctatttacttcgttttttcacacagaaagattatagtgacatagtcttcctcttacttaaatacatgtctttttaggattctgccatagtattgattctgccatggcatttattatgcccagtgaccaaggcattagaatatttgtggtacctttacctttttaggccaataaatatcattcatttgctaaagaacatttcattaaacgaggtacagttggctctccatatccatgggtttggcatctggattcaaccaaccgtgaattgaaaatattcaggaagaaatttcacagagttccaaaaaaacctggaatttgtggcatgctgagtactacattgaatctacacagatgaagtgatgtgtaggcattctgttaggtattataagtaatctagggatgatttaaagtatacaggacaatgcgagtgggttatatgcaaatactacattattttatataagagacttgagcatgttgggttttgttatcttttgggggatcctagaactaatcccccatggatactgtgggatgactgtacttattttttagaaataatttctacactatagccccttttttactcccagtttctttcatttttttttttttaggcttcctaaaatattggcagaagctccatcctttctctgtgctttgttccaatgtttttagcatgtttcagcttgttctacatccctgggatatataataagacctagcctaaatgtaagcttgatagttcagggactatcttaagtgttatgttaactttttttcttttaagggagggagaacaaattctaatactagttaatagtgtcttacccacagtgtgttatctaatgcctttcaaactaggggaaaaaaatcagtgaacattatggtagatgctaaaatctgccattttcttgtatatttctgacagtttcagttactttgcatttgtattatacaatgactaacatcagccttttaccattctttcctctggtatttttcagtaacaaatagtgaatgtatttagagataaaaataattttgtgaccaaatgtgttcttgtagagtgcgttattttcccctattttctctgtggtattgcaaacagtcatggtgagtgctgcaggttatatgaggataagtaagacttggtacagaaatgtccagaatactcaaaactggaaaaaagtgatccctgatagttaaatggtcaagataggcttcctgaaggtgatggtgtttagccagtcctggaaggaatgcgcaatacaatttcaacaggtagaaataagatgattaagggtaaaataagaaaggggaagattagtgcatcatatagagcaggactgttgagcaagagtgtagaccacaagttgagggtatgctaggaaataaggctagaaaagaaggttgagatcagattatggagattcttattaatactaaactaagcagtttagcttatttctggtaggcattggggtgccgctggagagagcagggaaggaatatatgatgctaactaaggttattttgacaatgctgtaattgaaagtgaggaagagagacactttactacaggtaataatttaaaggccttccatgtacagtcattgtgccagaaacttagggataaaaagatgaatataatacaatgccacacctttggtcttgtagtctataatggaaaggctaaatggttaaatagattattatactgaaatgtggtaaatacgttgaaaggttttagtgtcttttttttttttttttaagacagagtcttgctctgtctgttggcctggctggaatgcagtggtttgatctcacctcactgcaacctccacctcctgggctcaagctattctcatgcctcagcctcctgagtagctgggattacaggcatctgccaccatgtcctgctaatgttttgtatttttagtagagaaggggtttcgccatgttggccaggctggtctgaacttctggcttcaagcgatccacctgccttggcctcccaaagtgctaggattacaggcatgagccaccacgcctggccataaatatgttaaaaggttgatatagaaacagatgaccgtggcatttagagttttggggtgttgagggagtcaggggtaactccagaaaggattgatatctgtgaattgtcctgaagggtaagaaggaatcagcaaaactcccaaattaaaaactttaccaaaaacatttcatcttagtgctaagtctactattttctacaaaatacatatttctaaatttttcatttactattttaaaattcttagcttccctcctcatccctgattaaaaaaaattttttttttgccctttggcttcttacatttttaatgaatgtgtttatgagtactttggactccactgaaaaaaattagaagaggccaagagagtaggatgaagggccttccagacagggggaatagactgaaaaaaaaaaaaaaaaaaaaaaaaaacagacgttggatacaaaaaagtagtttctgttctcatgtaaatgttcagcatacattgcaaatacaaaactcaagttccaaagataattatattagaaatacagatttggacctaatttctaagatgatgttgatggatgggtagctggataaataaatgagttggaggtagatgtggggagagaaaagactcagcggggacggaaagcacagggaggaaaaatggccaccagagataacagagcagcctatgttaattaatgatcaactgtgtgtggctttttttttttcctggcccagatggatagctcccagttgatccattgtcgggagcttgtggcacatcacctttctactctgcagtcttccctgcctctgaattccgtttatgtctaccgtcccctcaagcacaccctggtgacctgtgacaaaggagtgttcagattacatccctcctctgtcccaggcccagacttctccaaggacaacagcaagccagaagtgccagtcagaggtacagcagccttttaccatcatctcccagctgccagtgggtgcaagcagacctctactaaacgcaaagtagaggaaatggaagtggatgacttctatgatggaatcaaacggctctataatgaagataatgtctcagaaaatgtgggttctgtgtgtggcactgatttatcaagacaagagggacatgcttccccttgtccacctttgcagcctgtttctgtcatgtagtttcaacaagtgctacctttgagtgtaaactaaggtagactactttgggaatgagaacatgcaaaatcaggaaaggctgtagaaggaaatataccttaacaggctgatttggagtgagccagaaaaaaaaaataaaactctcattatttgtgtggctaattataattcagcgttatttaagcacataaagaccaaaaaaaaaaaaaagaaatccaaaagatccaaactttttttaaacttaaaaaatctctttgtagtatgtcagttgcactttttttctgccataatgtaacgtagcttgccccgtcaaaaattcaattaaaattcatggccagcaatcctgttccccctcagcatcctgatttaattttcctgttgcttttgcttgcttctccatttaatagttactgaactttatgcatgttgatctatattgattttcactgcagttgaatgaacaaattatttcagtgtgacagccatgactcaagttccaattagtctgaaaagggtactttggaattgtcccatattaatcagagatggcaaaagaaaaagttctcatattaccaggttgattttgtgtctcatttcaaattttaatttaaaattatggttttcatttttgtttaccttaaagtgatgcttaaaagtggcatgtaattaggacacttaggtttgttgaaagcattttcgacatttgtataaaagaatttgtgataaatatatccaggtgctcaccaaagaaacatgtattaacaacttaaattagatttttctaactgatagttttcactcatttataatcagtaggagagactgtctagatgttggggcagctctatgatttaagtctgtaacatgttataactgaatttagtaccctagttttgttaagctattaggattttctaatagaacttactccccctgcctccccagccttatgtttcttttaatgacttctggatcctgagctccctttgcagtctgaaaaaggtattgcagtcagaactgtgtactgatgataaaagcctctggtagcaataaaaagttgtccttaacttttgtttttgtgacttttttctggttgtgaagaggtacaggttcctgattggctaggcactgctatttcaactagagaaaacaatagaaagaccaagaatacacttactgaaaataaaacatgaagaggatctgaatgtgatcgagggatataggttttagacataagaatttttctttcgtgatattttttcactggtgcactgtgaatcctccaaatagtaaatttacatcttaatgtgactgcttgtgagagtaggctcagacccctatctttaaaatgtcatttttagccattttgtaatgttcagatttagcagaacaagagtattttcaggtcatcatctgatttgtaaaaaattcttgtggtagggttgacttacctgttttatgaccttaaaatccaattaaatgggaagcatttactcacatgtcagtaaagggagtgggagggaagatagcaaaggattggcttcacagatagacattttaaaaatttctcatcctgatcttcatctgtttaattcatctgaattgtaggagctctaagaagtttacaactgcatatgttcatagtatctgtaaaatgatacagatactatgaaacttcctcctatttaacagatgaggacatagttgtgttatgtagacagctagggataaaactgagtttagagtcagtatttcatttgtagtccagtagctgcaaattgagcagaatgttagaggacaataggattttcacttttcagtcttaaggttttcaacatttacaaattgctggtaagttagtttggaacacagcattcttctcatgggacaccgaatcaagtgggatagtgggctgctagccctcatgcctcagagcttatttaacccatcgttcagttcagtgatagttttggagacctggccctcaaaagcactgttaaaccttggccaccatttcagaggactgagcccacttcctcacaacttactgtgggcccttagagaactgtggcttgtgacagaaagagcctagtattcttgaacagtgtagaacttttcattaagaatgttccggtcgggtgcggtggctcacgcatgtaatcccagcactttgggaggctgaggcaggcggatcacgaggtcaggagttcaagaccagcctgaccaacatgctgaaaccccatctctactaaaaaatacaaaaattaaccaggtgtgtaatcccagctactcgggatgttgaggcaggagaatcgcttgaacccaggaggcggtgagccgagatcgtgccattgcactccagcctgggcaacagaggaagactatcaaaaaaaaaaaaaaaaaaaaaaagttcctgctgttcaattagttccttttacctgaaactattctcagcctgtcccaagttacttgtgttaaactttggcatcacatcacaaactcaagatccagaaacttgagcactctgcatcataattgtcttgtgcctcctggtggttaaaaaacctgtcgctccgtgaagcctctggaaaggcaagggaatatacttgatggggatagtagttattctctaatcctccattcaaccaaaaaaaaaaaaaaaaaaaaaacctaaacatgttctagcccttgaagatcagactggaagctaaatattttacttcttcattctctacgagatgaatataaagttagttatatagagaactataagttttctctacagatagacgatgtattagtttggagggagaagggaaagctgggaacgcagaatgctcccaaatgtcagtaaaaggtcaaatatgaccagtttgtcataaatgttcctgatgctacctttggctgtgaaggaaggtagaatgtagctcttcactcagccaagttgaagagaatctgaacctatgttcttgagagaattaagacactggtgtttgtgcccccaagaaatactatgtattttctcctgtgttattagagtcagccacttgtgtgtgtcctctgtgctctttacaaacctgaattttcaagctattaaatttactcctagatttcctgaagcaagttatgcttgagcattagtgcccaaagcagcatggtggcttttcacttgagaagaaaatgtggttaagctactgatgtacagccaacatgatgaggagcttatctttatctaaagtagtttgcacattttcaactggaaagcgaagatactatgtcacaggttctcacaaccaacctggcagaatgcatccccagtttaacagggttcaacttctaactcatctcaaacgtttaccctttctatttgacatcatgaagttttgtctaacatgtaaatgttacttctaaagcctcgaaaattctttcagtctttatgttgaggagaatgtctcctatacctgttatcaaataatgctatgagttttggccactagatggtgcttttagaaaaatacagcatctttttcaatttctgggagaaattgagttgagtttactgtatgttagtgagcagttgaacactcatctggttgctgagccaactgtgttggcttagttagttagaagttcatattacttaaggtacaggaggcctgtgtgtgtgagagacagggaactttggcaagatcagccagggttaaggggcagatggtgactggataccacgtttcagaccaagaaaaaccagaaccagtcttacaaatcccaattagtgagttgtgtggttctgtaaagtagcctagaaatacaattgggaaggcttgaatatagccaagtcccaaaaccttgctgctttcagtttgaattggatttggccaatcattaggagagaaaaattgaagagcacgcttacttagcacagcttgcatcaagaaatagcaagttttccctcaccatatttagtggcttttatgatgtactcgtatgtaagaccaatgtcagacataactctcccttgtgccagttttactttaaaaggcgtaataagataaccaagaatgtcttatcagagaaatttgagaagaactcacttttttagttcctaagagcctctggagttaaggatgaaatgagaaggatgaaatgcctttctcttaactctagaagtatagccttcataccagatcaaatgccagaattgttgaccttattgtgttacacaacagtaaggttgtaaaaaagcagtttgaatagccctaggcctagtgaactggtctcccatttcttggaaatagcttattttgttaggcaataggacactccagaatgaaggccaactttaggcaagcagccacgacaaagtgactggtggggagcagaatcctttttgcttttcaggatatgatctatcttcagcaaacgacttagcatagaaaaggcttgccttttctttctttcactcttaacgttgctgtgcttatatgagttatacaagttcaattcatagtgcatggctaaatccccagtacctaatgtaggcctggtgcagtatacacaataaagtatttggaaagagggaaggaggggttgggggaagatggatgagtgaataagaaaaaaagacaaggaaagctagaactgcaactctccagagttctaaacacattgttcacagttaagcccagctcttttgtttatataagagacagggtctaggtctgttgcccagggtagagtgcagtggcacgatcctagctcactgcagccttgaactcctgggctcaagcaatcctcccacctcagcctcctgagtagctaggactacaggcacacaccaccatgcctggctaactttaaaaatttttttaaagatacggtctcactatgtttcctaggctggtttcaaactccaggcctcaagtgatccttccacttctgcctcccaaagtgctgggattacagatgttgagccaatgcacctgtctaagcccagctctttatggaatgttattctgctccccgttccccaccctcaaacacacacatttatttgttcttttgtgagacagggaccaaaaaaatcttgttataatagcctttgcctccccggtctaggtgccataactttggaagaaactttccacaatggactgaaaggctattcatctcacatccctacaagtaactgatttgaggcagatgtgaaatcttttgtacctcacgtgatgttccactgacaaccaataggtctcatttatatatagctgttaatcaggaatagcaaggtaggaaagggagatgagtagacacctaggctcccaattagtcttctcaaattagcacatgcaacctgggcacagtagctcatgcctgtaatctcagtattgtgggcagctgaggtgggaggaatgcttgcggccgggagtttgagaccagcttgggcaacatgagaccccatccctacaaaaaataaaaaaattagccaggcatagttgctgatgtctatagtcctacctactcaggaggctgaggtgggaggattgcttgaaccaaggaagtcaaggctgcagtgagctgtgattatgccactgtacttcagcctaagcaacagagtgagagtccaataaagaaaaaaaaaattaatacaagcaatcccttcaccagccctgggtatgccagttgcttgctggagattgacctgaaagacagatggcatccttcgcaaaaactagataccatggtcttaaaaattcaagcactaggaactctgaagtgagccacactgccatcactgtcagtctccaggtgggaagataagtcagttgtgaaacaaaaggttttaaaggtggcttaaaaaaactttaatagtcttttgtgttttttattttattattatttctgagacggagatgtgctttgtcgcccaggctggagtgcactggggcggccttgcctcactgcaacctccgcatcctgtgttcaagcgattctcctgcctcagtctcctgagtagctggaattataggcacgcgccaccatgcctagctaatttttgtatttttagtagacacagggttttaccatgttggtcaggctgttttcaaactcctgacatcaaacaatccaccggcctcagcctcccaaatgctgggattgcaggtgtgagccatcgcacttagccacgtatttgtttgataccagacctgtttacccataatctgggccaatagcaggccaaaaataaataaataaataaataaataaataaataaatagatagatagatagatagataaccaaataagaaggaacttgataagcactgttgacgggaaaagaagttcggtcaattattgggggtgaggacctgtttctatctgtccagctcagtgcataaccattgagaaagttggatctctcctttacacgtgtgctgggctaatctcaaggagaccatctagactatgctcgtattaaggcagagtctgtatctgaaaagaactaatatttgtttaagattgatgaagaacaaaaagcctattaccaatggaaacaggtttagatggctcacttctccctgctttgcttttccacaatcttgtttgagataagccagtaatttttattgctagtaattatacccaagatggtttcacatcccttacttggtcagccaggagaaaatctaccagttttatcaacactagagaaaaagaactgcctattgtaaaatgccaaatgaatggcaatctatcttaggggaattgagatggcaaggcactcggttggccagaggtgtacatgatcaggttcccctaggtaactggactgaggctaacgtactgataatattctcagttccccaactcctcccattaacatggttcatattaacttcctctactctgggagctaaaacagaaaaacaaaaaaggaaatagcaacaacagacatacatttcttacttaaatattgcctaatttgatttttaaatactgctcaaaaaatatttacaatctgatgcagaatttgtttttaaaatgatagaataaagttaaaatatcaaaatagggagtttaagaataaagtcacttatatgtagtgatgacagtagtctcacacaacaggaactacatgtttaacttgcaaaactgatgtcatgctctggcatcagctggtaaggagctgctattcctttcccactccactggtcacattactagcagatttctgtccttacagattatagtgtagaatgaaggggatggcttttgatgctgacattttgatcatttaatggctcacatgtatctgactttacttacatttacttagtttctaagtaaagaaagcagcttgccaacttgttcatccaattgctctaaataatctctttccaggaatcaagtgattcaagaggcagggactgttgcttcttcatttcactgtctaaaggaaccatatgttaccattcttattcagaggggaacactcctgaggatcttgattaaaggcaactcatgccaccaacggtatttctatgatctacctactatggagctgaaaagtaaagatggaaataagcctatctacaaacaggtaatgaaattgaaagataacaaaatatatgtccatgctttataatacatacgatttgaaaattgtcccttcactatgaaaactgcccccaagaagtgactgctaactaaagtaatctagccctgaatctgactcatcacaaacaggtcagcattagaaatcagaggcttactcaactggcagaagtatgtgtttggatatggatgttattttaagtgatcaagtctgaatgctttgattctcagcaggtttttttgcagatattgtagagaaatccacctaggtaactctgagaagacaatgtgaatcagaaccattgttaatgatgctgttatctgggagaagagacatgtacttgtttggggttcatttcccatggtccaagacatatgggtcttggtaaaaagctgtggacacaaggtacagagcttcacaacaaataaaaaggcagggatgggccagtaagttattttaaggtatctttaaatataaattgaaccccagaggcagaaaagtcatctacccaacaccggcacattttaaacatgattaggatttgtaggtcaaaatcccgtaacaaaaaagggaagtttttggttgtttccaaaacaaggaaagcatgttaaacagaatcttgtgacttaaacttcactcaagtgagcttaaaactggcataattttgataccaaaagtaagctgaataaccaatacaaaaaacagaactaactggagtttttctcccccaaaacatagtcccaaatccaaaacaacttatataagggatgcaagtaacagaaaaagtcaaataaaacaacagtggttcctgaatttaaaggaaggatgcccacttctctctctctcaagaggcagatggtcagctgaaaaataaaaacattgtatcaatagaacactccaaagaaaaaaaattgcagccatctctgttcatgcaatatcaaatgattttttttttttaaaaaccccaaacaccaaaacaacccataaaactaacaaaaggaaggaaaatgttgctcggatcttatgacctgacggttgaggatcctgatcaggctgttcagaatgtggctcatgggacagaaaggacaggagttaccatgagatcaagtttgtgggccctgggtgtggtggccccctcaggttagggtacacgctgtcttcagtccatcagttcttggatcagcagcttcaagaacatgatagttctaagcaaggggatcccagcacaagaccttgggtcttggcccacgttttctgtttcagtcaatttcctttttcctttttaattaatattattgaatatgactatttttggtagtggtaagtcacttcagtatccactatgggcagacattgacaagtacaaacagcagtgcaatatttgacccagactttaaaagaacaggaggcgatggtggaaatgaggtaactcttccccaacacgtgtgaacagacagctcctgctcttctaatgctctatgtccattaggagagagtagggcttgtcaacaggatggttacataaagaagaagctacagaagagaaaaaagaaaggttcagattcaaatttgattcttaatggcttaagaaaagaaaaggagcttctctacaacaagctgtgaaagaacagcagtgtgtcagttaatggggtgacttcctcgagctcgacgggagggtgagcagcagcagggaagaggaggccagtgaagaagacgatgcctcagctgggcaccaaggcacatgaattggcagggtggacagggacaggcatgggggaaaaagggtgataacatgatatgtgaagtacaggacaccacatggcacgtatctttgagaaactggtgtaacccagacggcagccatttgaagtctaccacacgaggcaggaaagcatgagactcttatccctatttcttttatccagtaagcacgtgtacatatgcaaaccaagcagtgactaaaaagaactcacaaaaaagggcacacaaataatgtttgggtaaaaatatattttcccccgctttatgtcttggcactagtgatatatgcatagattatctgttcaccactctcctaccttaacagatgccaaattaccaagcatgttgctaagtgatcactttcatatttgaaaaaatgatatgcttcacatcaatacaattactttagtttaaaaaagacaaatgtctaacatgcagcttacatatatgacaattctgcattaacaatgaaagtagattacacgacagttttagaaaacacattggttattttcaaacagcaaaatgacaaggatctacaactacagtttaaggcatatcagcatattttaaaattaagaaatagacaaagttctaatgctgttcacagcttttcaatttatttaaaaaattcccttcatacctacatacaaactagactttgtaggtcttaattcccactaaagaatgtgtcctgtcagtggaaccaggacttttcgaagctgagacctgacaattccagactcttgcaaatggcaaagcaaaggggtgggaatggacagtttttgtaggaccacacagagacagcaggacgtgggtcggtaacagctgaaaaacctcacccaatagtttgtatgtgaaacagtcatggaaatgtcaagaaagcaaggaaaccaagtctgttcatttgaggtgcacaagatgtggattgtgtgtgttactgctggtgagtcacaaagcagagaaggaagataagtaatctgtgcccactgttacattaaataattcccattgttgaaatgccctttttggagaaaaccttaaccaattaataaagagcctaagttgggaaaacacaatctgaactgccaataaattctcatcaatgcttttccatcacattctacagtacatgtgttatggagatctaaagttcagaagaagcaaaaagatggtattatgtttgaacaaaagatatggggtaaggccagctagttatgtaggcccctcaacccccaaaaaagaggtggccactgtcagcagttagcaccagggagagaccattaaactaagattaaaaaattaagtggtcataaaggcatcctagcataaaaatttttctcttggttttctctagtagaagatggtaatttctcattctggctttatttgccttgccagaatcaagggccctctgagctatccaatgatgcccatgaggctatgtagagcacaggcagggattaataatttcttttttttttttggagagtctcacttcatcacccaggttggaatgcagtggtgcaatcttggctcactgcaacctccatctcccaagttcaagcaattctcctgacttagcctcccaagtagctgggactacaggcacgtgccaccacgcctggctaatttttgtattttttgtagagacggggtttcaccgtgttcgccaaggtggtcttgaactccaggcctcaagtgatctgcccacctcggcctctcaaagtgctgggattacaggcatgagccaccacacctggcctggattagtaatttcggatttccaaattcaggtcaagaagtggaatttattatgtggttcttgtgaaaaaaatataaatgtggccttttaaatatatttagttttttttttaaacaaaggctactcaaaccattaccttcctgccccccttgaaaagaaaaaaaaaatctatccatcccatttgctttctctaattttgaaaagtcagaaagatctcaaaggtttcttactaccgtacttacatgcaaaggcgaaagcacatccaattagatttgagggtatcatttattccgtgcagagccaaggactactgtgaaaaaaaggcatagatacagaaagaaaaaagaaaagcagcaataacaaactaaacagggctagggagcagtggcagaaaaaagttcagaagcaatacattttttaaaaaaaaaagcttctatttgtttcttttgactttttattccctgactcgccatatgatttattttgctgggaaaaatttaatgcaaaaaagtcaatccaatcaataatcttggaatcaaaaagtcagctggatgcctttcgttgttatgctcattttaaaaaaattttagtgatgcaagagacaatttaaaagtgtactttctgtacaagccacaaaaatgctcacacaagcggtggttggaacaagcatacaacacaaatattcaagcttttgtctgatgcacagcctatgagcaaattcagcccatggtttgaatcaacatgccagctactatttggctgctccacagttagctccagactagaattatttaaaaaaacaaaagcaaaaacaagaatgttggtccagtagctcctaaacctgtgaagactatgactactgctgtgtctagtgtgtagtttctattccagctttgtttaggcttccatgaaactaatttccttactttgcttaattaagcataatcagttcatggaagac

SEQ ID NO: 1658 - DNA, 2541 bp, Homo sapiens
gaggagcctccgctggagctagggggctccgttacagatccttttggcagaagttgacaattgggtatcaaaacagtggaaggtgtttcgggaggtagctacagcaagctgggtagcaggcagatccaaaggatatcatgaagtttccagggcctttggaaaaccagagattgtctttcctgttggaaaaggcaatcactagggaagcacagatgtggaaagtgaatgtgcggaaaatgccttcaaatcagaatgtttctccatcccagagagatgaagtaattcaatggctggccaaactcaagtaccaattcaacctttacccagaaacatttgctctggctagcagtcttttggataggtttttagctaccgtaaaggctcatccaaaatacttgagttgtattgcaatcagctgttttttcctagctgccaagactgttgaggaagatgagagaattccagtactaaaggtattggcaagagacagtttctgtggatgttcctcatctgaaattttgagaatggagagaattattctggataagttgaattgggatcttcacacagccacaccattggattttcttcatattttccatgccattgcagtgtcaactaggcctcagttacttttcagtttgcccaaattgagcccatctcaacatttggcagtccttaccaagcaactacttcactgtatggcctgcaaccaacttctgcaattcagaggatccatgcttgctctggccatggttagtctggaaatggagaaactcattcctgattggctttctcttacaattgaactgcttcagaaagcacagatggatagctcccagttgatccattgtcgggagcttgtggcacatcacctttctactctgcagtcttccctgcctctgaattccgtttatgtctaccgtcccctcaagcacaccctggtgacctgtgacaaaggagtgttcagattacatccctcctctgtcccaggcccagacttctccaaggacaacagcaagccagaagtgccagtcagaggtacagcagccttttaccatcatctcccagctgccagtgggtgcaagcagacctctactaaacgcaaagtagaggaaatggaagtggatgacttctatgatggaatcaaacggctctataatgaagataatgtctcagaaaatgtgggttctgtgtgtggcactgatttatcaagacaagagggacatgcttccccttgtccacctttgcagcctgtttctgtcatgtagtttcaacaagtgctacctttgagtgtaaactaaggtagactactttgggaatgagaacatgcaaaatcaggaaaggctgtagaaggaaatataccttaacaggctgatttggagtgagccagaaaaaaaaaataaaactctcattatttgtgtggctaattataattcagcgttatttaagcacataaagaccaaaaaaaaaaaaaagaaatccaaaagatccaaactttttttaaacttaaaaaatctctttgtagtatgtcagttgcactttttttctgccataatgtaacgtagcttgccccgtcaaaaattcaattaaaattcatggccagcaatcctgttccccctcagcatcctgatttaattttcctgttgcttttgcttgcttctccatttaatagttactgaactttatgcatgttgatctatattgattttcactgcagttgaatgaacaaattatttcagtgtgacagccatgactcaagttccaattagtctgaaaagggtactttggaattgtcccatattaatcagagatggcaaaagaaaaagttctcatattaccaggttgattttgtgtctcatttcaaattttaatttaaaattatggttttcatttttgtttaccttaaagtgatgcttaaaagtggcatgtaattaggacacttaggtttgttgaaagcattttcgacatttgtataaaagaatttgtgataaatatatccaggtgctcaccaaagaaacatgtattaacaacttaaattagatttttctaactgatagttttcactcatttataatcagtaggagagactgtctagatgttggggcagctctatgatttaagtctgtaacatgttataactgaatttagtaccctagttttgttaagctattaggattttctaatagaacttactccccctgcctccccagccttatgtttcttttaatgacttctggatcctgagctccctttgcagtctgaaaaaggtattgcagtcagaactgtgtactgatgataaaagcctctggtagcaataaaaagttgtccttaacttttgtttttgtgacttttttctggttgtgaagaggtacaggttcctgattggctaggcactgctatttcaactagagaaaacaatagaaagaccaagaatacacttactgaaaataaaacatgaagaggatctgaatgtgatcgagggatataggttttagacataagaatttttctttcgtgatattttttcactggtgcact

SEQ ID NO: 1659 - protein, 369 aa, Homo sapiens
MKFPGPLENQRLSFLLEKAITREAQMWKVNVRKMPSNQNVSPSQRDEVIQWLAKLKYQFNLYPETFASSLLDRFLATVKAHPKYLSCIAISCFFLAAKTVEEDERIPVLKVLARDSFCGCSSSEILRMERIILDKLNWDLHTATPLDFLHIFHAIAVSWQLLFSLPKLSPSQHLAVLTKQLLHCMACNQLLQFRGSMLAMVSLEMEKLIPDWLSLTIELLQKAQMDSSQLIHCRELVAHHLSTLQSSLPLNSVYVYRPLKHTLVTCDKGVFRLHPSSVPGPDFSKDNSKPEVPVRGTAAFYHHLPAASGCKQTSTKRKVEEMEVDDFYDGIKRLYNEDNVSENVGSVCGTDLSRQEGHDCPPLQPVSVM

SEQ ID NO: 1660 - DNA, 2139 bp, Homo sapiens
accactgtgaggcctacagctctgccggggaggtagctacagcaagctgggtagcaggcagatccaaaggatatcatgaagtttccagggcctttggaaaaccagagattgtctttcctgttggaaaaggcaatcactagggaagcacagatgtggaaagtgaatgtgcggaaaatgccttcaaatcagaatgtttctccatcccagagagatgaagtaattcaatggctggccaaactcaagtaccaattcaacctttacccagaaacatttgctctggctagcagtcttttggataggtttttagctaccgtaaaggctcatccaaaatacttgagttgtattgcaatcagctgttttttcctagctgccaagactgttgaggaagatgagagaattccagtactaaaggtattggcaagagacagtttctgtggatgttcctcatctgaaattttgagaatggagagaattattctggataagttgaattgggatcttcacacagccacaccattggattttcttcatattttccatgccattgcagtgtcaactaggcctcagttacttttcagtttgcccaaattgagcccatctcaacatttggcagtccttaccaagcaactacttcactgtatggcctgcaaccaacttctgcaattcagaggatccatgcttgctctggccatggttagtctggaaatggagaaactcattcctgattggctttctcttacaattgaactgcttcagaaagcacagatggatagctcccagttgatccattgtcgggagcttgtggcacatcacctttctactctgcagtcttccctgcctctgaattccgtttatgtctaccgtcccctcaagcacaccctggtgacctgtgacaaaggagtgttcagattacatccctcctctgtcccaggcccagacttctccaaggacaacagcaagccagaagtgccagtcagaggtacagcagccttttaccatcatctcccagctgccagtgggtgcaagcagacctctactaaacgcaaagtagaggaaatggaagtggatgacttctatgatggaatcaaacggctctataatgaagataatgtctcagaaaatgtgggttctgtgtgtggcactgatttatcaagacaagagggacatgcttccccttgtccacctttgcagcctgtttctgtcatgtagtttcaacaagtgctacctttgagtgtaaactaaggtagactactttgggaatgagaacatgcaaaatcaggaaaggctgtagaaggaaatataccttaacaggctgatttggagtgagccagaaaaaaaaaataaaactctcattatttgtgtggctaattataattcagcgttatttaagcacataaagaccaaaaaaaaaaaaaagaaatccaaaagatccaaacttttttggccagcaatcctgttccccctcagcatcctgatttaattttcctgttgcttttgcttgcttctccatttaatagttactgaactttatgcatgttgatctatattgattttcactgcagttgaatgaacaaattatttcagtgtgacagccatgactcaagttccaattagtctgaaaagggtactttggaattgtcccatattaatcagagatggcaaaagaaaaagttctcatattaccaggttgattttgtgtctcatttcaaattttaatttaaaattatggttttcatttttgtttaccttaaagtgatgcttaaaacattttcgacatttgtataaaagaatttgtgataaatatatccaggtgctcaccaaagaaacatgtattaacaacttaaattagatttttctaactgatagttttcactcatttataatcagtaggagagactgtctagatgttggggcagctctatgatttaagtctgtaacatgttataactgaatttagtaccctagttttgttaagctattaggattttctaatagaacttactccccctgcctccccagccttatgtttcttttaatgacttctggatcctgagctccctttgcagtctgaaaaaggtattgcagtcagaactgtgtactgatgataaaagcctctggtagcaataaaaagttgtcctt

SEQ ID NO: 1661 - protein, 369 aa, Homo sapiens; identical to SEQ ID NO: 1659

SEQ ID NO: 1662 - DNA, 2968 bp, Homo sapiens
cccctccctccccagccttccccgcgagcggacgcggcagcgcctctgtctcgctttttcttatttttcccccctttcccctttctttttttttttttcttttcttttctcccctccccccctttcaccatttcccctcggaggcgctttccccgggcaggggcagagccggtctcaccccccgcctctccccggcccccgccgccctatggcgagagggagccccctcccaacccgggctcgagcggcggcggcctcaggccgggggtcatcatggaactaattcgctgaccgacccagcggccgcagccgtgcgtcccgctcgagcgccagcgcccgcgcccgcgccccccgatccgcttcccctttctccctcctcagttggccgagtcgtcccgcgcgcaccgcctccgcgcgcctatgagaatgaggtggtaacgggcccccggatgaccccgcgtcaccactgtgaggcctacagctctgccggggaggaggaggaggaggaagaggaggagaaggtagctacagcaagctgggtagcaggcagatccaaaggatatcatgaagtttccagggcctttggaaaaccagagattgtctttcctgttggaaaaggcaatcactagggaagcacagatgtggaaagtgaatgtgcggaaaatgccttcaaatcagaatgtttctccatcccagagagatgaagtaattcaatggctggccaaactcaagtaccaattcaacctttacccagaaacatttgctctggctagcagtcttttggataggtttttagctaccgtaaaggctcatccaaaatacttgagttgtattgcaatcagctgttttttcctagctgccaagactgttgaggaagatgagagaattccagtactaaaggtattggcaagagacagtttctgtggatgttcctcatctgaaattttgagaatggagagaattattctggataagttgaattgggatcttcacacagccacaccattggattttcttcatattttccatgccattgcagtgtcaactaggcctcagttacttttcagtttgcccaaattgagcccatctcaacatttggcagtccttaccaagcaactacttcactgtatggcctgcaaccaacttctgcaattcagaggatccatgcttgctctggccatggttagtctggaaatggagaaactcattcctgattggctttctcttacaattgaactgcttcagaaagcacagatggatagctcccagttgatccattgtcgggagcttgtggcacatcacctttctactctgcagtcttccctgcctctgaattccgtttatgtctaccgtcccctcaagcacaccctggtgacctgtgacaaaggagtgttcagattacatccctcctctgtcccaggcccagacttctccaaggacaacagcaagccagaagtgccagtcagaggtacagcagccttttaccatcatctcccagctgccagtgggtgcaagcagacctctactaaacgcaaagtagaggaaatggaagtggatgacttctatgatggaatcaaacggctctataatgaagataatgtctcagaaaatgtgggttctgtgtgtggcactgatttatcaagacaagagggacatgcttccccttgtccacctttgcagcctgtttctgtcatgtagtttcaacaagtgctacctttgagtgtaaactaaggtagactactttgggaatgagaacatgcaaaatcaggaaaggctgtagaaggaaatataccttaacaggctgatttggagtgagccagaaaaaaaaaataaaactctcattatttgtgtggctaattataattcagcgttatttaagcacataaagaccaaaaaaaaaaaaaagaaatccaaaagatccaaactttttttaaacttaaaaaatctctttgtagtatgtcagttgcactttttttctgccataatgtaacgtagcttgccccgtcaaaaattcaattaaaattcatggccagcaatcctgttccccctcagcatcctgatttaattttcctgttgcttttgcttgcttctccatttaatagttactgaactttatgcatgttgatctatattgattttcactgcagttgaatgaacaaattatttcagtgtgacagccatgactcaagttccaattagtctgaaaagggtactttggaattgtcccatattaatcagagatggcaaaagaaaaagttctcatattaccaggttgattttgtgtctcatttcaaattttaatttaaaattatggttttcatttttgtttaccttaaagtgatgcttaaaagtggcatgtaattaggacacttaggtttgttgaaagcattttcgacatttgtataaaagaatttgtgataaatatatccaggtgctcaccaaagaaacatgtattaacaacttaaattagatttttctaactgatagttttcactcatttataatcagtaggagagactgtctagatgttggggcagctctatgatttaagtctgtaacatgttataactgaatttagtaccctagttttgttaagctattaggattttctaatagaacttactccccctgcctccccagccttatgtttcttttaatgacttctggatcctgagctccctttgcagtctgaaaaaggtattgcagtcagaactgtgtactgatgataaaagcctctggtagcaataaaaagttgtccttaacttttgtttttgtgacttttttctggttgtgaagaggtacaggttcctgattggctaggcactgctatttcaactagagaaaacaatagaaagaccaagaatacacttactgaaaataaaacatgaagaggatctgaatgtgatcgagggatataggttttagacataagaatttttctttcgtgatattttttcactggtgcact

SEQ ID NO: 1663 - protein, 369 aa, Homo sapiens; identical to SEQ ID NO: 1659

SEQ ID NO: 1664 - DNA, 3052 bp, Homo sapiens
gaggagcctccgctggagctagggggctccgttacagatccttttggcagaagttgacaattgggtatcaaaacagtggaaggtgtttcgggaggtagctacagcaagctgggtagcaggcagatccaaaggatatcatgaagtttccagggcctttggaaaaccagagattgtctttcctgttggaaaaggcaatcactagggaagcacagatgtggaaagtgaatgtgcggaaaatgccttcaaatcagaatgtttctccatcccagagagatgaagtaattcaatggctggccaaactcaagtaccaattcaacctttacccagaaacatttgctctggctagcagtcttttggataggtttttagctaccgtaaaggctcatccaaaatacttgagttgtattgcaatcagctgttttttcctagctgccaagactgttgaggaagatgagagaattccagtactaaaggtattggcaagagacagtttctgtggatgttcctcatctgaaattttgagaatggagagaattattctggataagttgaattgggatcttcacacagccacaccattggattttcttcatattttccatgccattgcagtgtcaactaggcctcagttacttttcagtttgcccaaattgagcccatctcaacatttggcagtccttaccaagcaactacttcactgtatggcctgcaaccaacttctgcaattcagaggatccatgcttgctctggccatggttagtctggaaatggagaaactcattcctgattggctttctcttacaattgaactgcttcagaaagcacagatggatagctcccagttgatccattgtcgggagcttgtggcacatcacctttctactctgcagtcttccctgcctctgaattccgtttatgtctaccgtcccctcaagcacaccctggtgacctgtgacaaaggagtgttcagattacatccctcctctgtcccaggcccagacttctccaaggacaacagcaagccagaagtgccagtcagaggtacagcagccttttaccatcatctcccagctgccagtgggtgcaagcagacctctactaaacgcaaagtagaggaaatggaagtggatgacttctatgatggaatcaaacggctctataatgaagataatgtctcagaaaatgtgggttctgtgtgtggcactgatttatcaagacaagagggacatgcttccccttgtccacctttgcagcctgtttctgtcatgtagtttcaacaagtgctacctttgagtgtaaactaaggtagactactttgggaatgagaacatgcaaaatcaggaaaggctgtagaaggaaatataccttaacaggctgatttggagtgagccagaaaaaaaaaataaaactctcattatttgtgtggctaattataattcagcgttatttaagcacataaagaccaaaaaaaaaaaaaagaaatccaaaagatccaaactttttttaaacttaaaaaatctctttgtagtatgtcagttgcactttttttctgccataatgtaacgtagcttgccccgtcaaaaattcaattaaaattcatggccagcaatcctgttccccctcagcatcctgatttaattttcctgttgcttttgcttgcttctccatttaatagttactgaactttatgcatgttgatctatattgattttcactgcagttgaatgaacaaattatttcagtgtgacagccatgactcaagttccaattagtctgaaaagggtactttggaattgtcccatattaatcagagatggcaaaagaaaaagttctcatattaccaggttgattttgtgtctcatttcaaattttaatttaaaattatggttttcatttttgtttaccttaaagtgatgcttaaaagtggcatgtaattaggacacttaggtttgttgaaagcattttcgacatttgtataaaagaatttgtgataaatatatccaggtgctcaccaaagaaacatgtattaacaacttaaattagatttttctaactgatagttttcactcatttataatcagtaggagagactgtctagatgttggggcagctctatgatttaagtctgtaacatgttataactgaatttagtaccctagttttgttaagctattaggattttctaatagaacttactccccctgcctccccagccttatgtttcttttaatgacttctggatcctgagctccctttgcagtctgaaaaaggtattgcagtcagaactgtgtactgatgataaaagcctctggtagcaataaaaagttgtccttaacttttgtttttgtgacttttttctggttgtgaagaggtacaggttcctgattggctaggcactgctatttcaactagagaaaacaatagaaagaccaagaatacacttactgaaaataaaacatgaagaggatctgaatgtgatcgagggatataggttttagacataagaatttttctttcgtgatattttttcactggtgcacttcatctgaattgtaggagctctaagaagtttacaactgcatatgttcatagtatctgtaaaatgatacagatactatgaaacttcctcctatttaacagatgaggacatagttgtgttatgtagacagctagggataaaactgagtttagagtcagtatttcatttgtagtccagtagctgcaaattgagcagaatgttagaggacaataggattttcacttttcagtcttaaggttttcaacatttacaaattgctggtaagttagtttggaacacagcattcttctcatgggacaccgaatcaagtgggatagtgggctgctagccctcatgcctcagagcttatttaacccatcgttcagttcagtgatagttttggagacctggccctcaaaagcactgttaaaccttggccaccatttcagaggactgagcccacttcctcacaacttactgtgggcccttagagaactgtggcttgtgacagaaagagcctagtattcttgaaca

SEQ ID NO: 1665 - protein, 369 aa, Homo sapiens; identical to SEQ ID NO: 1659

SEQ ID NO: 1666 - DNA, 122060 bp, Mus musculus
  misc_feature (1)...(122060): n = A, C, G or T/U
agcatagtttgacttttaatatttacaaatttggggctggagagatggcccagcagttaagaacactggctatttccaaggacctgggttaaattcccgcacacacatggcagcttaaaattgtttgtaactccagttccaggggatctgacaacctcatacaaacatacactcaggcaaaccaccaatgcacataaaatgaaaataaacaaatcatttcaaaagcattttaaaaatatattcaagaatccatgctatgaattagtaactaagtttttgaaaatttactaagttattatctcaccataacttgataaagaagactaagttcatgttttaaaatttggcccttaggcaggataattatttcttcaatgaggtcctatactttccattcctagaattcctaaccccagcacagtcctccatgcagatcagcatctttcctcttttctttctttggtctctttctgatgctggccagaccaggtagactcttcctgtgggctatgggcttccttgctctttctctcaagtcccacttcttgccatatcatatggctgcctgctaccccgaggctttgtttcctgtctgttctccctgaccagctgcagagattacagcttgccgaggacagactagctttctcttaaactctaatgcaattgtccttaagtttaaaaacaacaacaaaaacaagtagccataactcctggcactgcaccttctaagtttctctttgcacagctccacttctttctgtaagtgatcctttgaaaatgtttatctaaatacttaaacaactgtttaactgttcatttgcttagtgtatgtacatgttttgcacgtgtgcaacagcatgtgtgtggaggccagaggacaagttggacgttgctactctcttaaaactcagactgtgcttggtggtaactgactttgcccattagccattctgcctaccccaagaattttagctatacattttacaaatgtcagtcacaaggttgccaggtattatagaatgatgtgtttgggaacttaatagactctaatatcaaatatctcatggtctttgttagggaggagagaataatacatcagtatacagaaaggaattagacagggacttaaaaaatcagactagtgtgaaacttagagatcagcctgcccctgcctcctaagacacctgatgtaccttctgcagtgttttgaaactaagcagcacacagggtaatactgttgtcccccacagcagcacacaggttaatgctattatcccccacagcagcacacagggtaatgctgttgtcccccacagcagcacacagggtaatactgttgtcccccacagcagcacacagggtaatactgttgtccccacagcagcacacagggtaatactgttgtcccccacagcagcacacagggtaatactgttgcccccacagcagcacacagggtaaagctgttgtcccccacagcagcacacagggtaatgctgttgtcccccacagtagcacacagggtaatgctgttgtccccacagcagcacacagggtaatgctgttgttccccacagcagcacacagggtaatgctgttgtcccccacagcagcacacagggtaatactgttgcccccacagcagcacacagggtaatgctgttgtccccacagcagcacacagggtaatgctgttgtcccccacagcagcacacagggtaatgctgttgtcctccccagcagaacacagggtaatactgttgctcccacagcagcacacagggtaatgctgttgtccccacagtagcacacagccacagcagcacacagggtaatgctgttgtcccccaagcagcacacagggtaatgctgttgtcccccaccttatataaaactgtggcaaagccagagtttacgtctctccagctccaagcctatgctttcctacactccagttgctctccactggagcagtcttgctttcaagtcccaggggatactgggcaaggtctagagatttttagttggtgtaggaaggtgctgctggtgtaaccgggagaggccaccgctgctgctgtatattctacaatgcacaggacagtgactcttgctagaatataagcagtgttcaagtgcaaaagtctacattacaaggtcttaggacaagttagtcttcatatggcctttaaaattattaatgaggacagattaatagtaagtcaggaccagtcctgaaaatatcacctggaaggaaaatcaagctgtgatcagtgttaaatattgtgttgaaatctgaatcttgtagttatcggattatacagtacacaggtgatttccagattaagcctaagccttactatctttaaatttatcctgttagccatttagaaacatactaaaattaaaccactcagccatgaaatacctaagtgttaggctctttgctcctctgcctcactgatgcagtgctctgaggcgcaccttgacagttgcagtctcagctacctgctccttagttcctcaggatgggccaatgagagctggggagatggctcagtgggcacagtgctcgtaagaatgaggatatgaattccagtccccagaacccatgtaaaaacggcatggcagtgggcatgtgcaatcctggtgttccttctgcaagatgcaggatctagggaaactcaaggaccagcctgctcagcatagacggcagtaaataacaaaaagatccagtcgtctctgatctctacacatgcgccatggcatgcctatgcccacactcacacacacaagcagggacatacacacatgcacatcatactcacaaaactttaaacgatgagatcctgggcctcttctctgcctcttgagaactcaaaatcttccctacccctaatgctttagttacctaactttgaagaacacttacaaatctgcatttgagtctatttctctctcttctccacgccccatctctctgtgtgtgtgtgtgtgtatgtttgcacagaatttaatagtagaggtactttccttgtgttggtcagaattttcttttcattttatctttatttatgcactttacatcctgctcactgcccctcctcttagtcaccccctccaacaacccttcctcccctccccctttctccttgtcctctgagaggatggagactccctagatatccacaccctccgccccatcctggcacatcaagtctctgtgaggctagatacatcctctcccactgagaccaaacaaggcagtgtagctagaagaccatatcccacagacaggggatagttccccccaaccactgcccccacagctcgttgttcaggacccatatgcccacatgaaggccaaactgcatatctgctacatctgtgtggagaagcctaggtccagcccgtgtatgccttttggttggtggttcagtctctgggacctcccaagggtccaggttagttgacattgttggtcttcctgtggagttcctatctccttcagggcccgaaatccttcccccaactcttccataagattccccaagctcatgcatgtatgcactcacttataagaagatattagtcataaaatacagaatctccattctacacattccacagacccaaagaagctaaacaagaaggaaggcccaagcgaatctcactcagaagggggaataaaatagtcataggaggcagagggagggagagaattgggtgggagaaaggatggggaggagaatgtgaggggaaggggtctggattaggggtgcggagggatgaggagagggccaaatcgccatgaaaatgaatggaagtctgcaactgaggtgggggcatctaggggatgtgacagagacctgggataggggaagccctcaagaatcaaggagggtgaccttagctgagactcacagcagtggggatatggagcctgaagaggccacctactgtggacaggcaggaaccccaggggagtgacagggacacccatccactcacaaaactttcaacctcaaatttatcttgtctacaagaaatgcagaaacgggcaatggagcagagactgagagaatggccaaccaataactggaccaacttgagatctattccatggacaagcaccgatccctgacactattaatgatactactctgttatgcttgcagacaggagtctggcatggctgtgctgagaggctccacccaacagctgactcaggtggatgcagagacccacagccaaatagtagtctcctatttctagttataaatcaaaatcttacttcccccttgcctgctatgtctgagacgaattctcaagtcaactcacttgccttccttttgcaagctttctctttaagttagttaggctgttttggtggagatcacaaactgtgttgcagatgcaaatgacaaaaacacatagaaaaacaaagaaaacaagcaaaagcaacagtcgtcctttatgactgtttgccttagcccccacaaccacccctcctaaattctacctcaactttcctgtaagtccaggggcacaggacagtcagtagatgctagcctagcatgcacaaagccctgggctgtccccagcaccatataaaccagatgtagtggcacacatctataacttcagctggtcctcaactacagagcaacttccaggccagcctggggtacaggacatcctgtctcgggtcctcaactacagagcaacttccaggccagcctggggtacaggacatcctgtctcaggtcctcaactacagagcaacttccaggccagcctggggtacaggacatcctgtctcaggtcctcaactacagagcaacttccaggccagcctggggtacaggacatcctgtctcaggtcctcaactacagagcaacttccaggccagcctggggtacaggacatcctgtctcaggtccaacacaggtcacgagcgccaagactttggattctggatgtcatacaaaagctgttgcgtcttccagtgattacctcttctctataaagtgagtggcttgttttatttgtttctcttgaaagaagagtcccttcatattgcccaggtggtcttgaacttctagtcctcccacctcagcctctcaagttgcttagagttgcaggtattacaaaatgaatttaatagcagcgcttatcttatgagatgttggagaggctaaataaagtaacataccagaaaagtgtctggcataaacttaaatattagtaattaattttagtattgatgcaacagtattgtcaaaagttatcctttgataatgcaactgggaaacattaagaaactttaaaaacacagagacaggcacgtccttagaatttgttggccacccagcctagatgaatgtgtgagttccaggttcaatgagggaccttgtttcaaaagatggggagtgattgaggacaatcaacatcaacccctggccttggcatgcacctgcatatacactcacaaaagcacgcctctccctcccttccctcctccacccgcacacacacaaacaacgaaaaacacatagtaagtttaagaactccaggacagcatgggctaagactctgcctcaaaaaccccacaaaactgactgtattggaggccataggagtatattatagttgatcttaacatcagctgggatcctaactgctttgattgttgtagcagtacaggtaggaagggcacgggagaaggaagactgcacctttgttccttggccttccctcctgcagtgtgtggttggttaatagcagtccagctggtgctgctgccgccacctccttccctgctatgagaaccagtttctaagctttcattgtgacctaggatcggcagctctacagccattttagatgtctgggttcaaacaggaccactgagacatccagccctgccccagtggggacagccattgtagactgggctgactgctgagacacccagcctcaaggaccaggtaatcactaggttgatggttctcaggagtgacctccatgacctcatcctctgaccctgaaagccccaatgaactgttccttctctaaggaaggctgagacatggtcatactcccgcactgcagcagtagaatagtaactaagaggatggataaatggttaacaacaacaatctattattcccttcccaaatggtattatcaatgtattatcccttcccaaataagtaataacaacaatgtattattccccttccaaatgagtaataacaacaatgtattatttccttctcaaagactgaagagtggacacagagcctgggcttaccttgttcttttcatcttgaataatctctagcagctggtttatataaccatcttcaatgcatctttgacctgctaactgaaagaggccaaaatcttcttctttaaaatcatgctcttctaggatttgctgtaaacaataaaaaattcacacagatgcaaatatagatttaatataaatgacttcctgattttatctctaggaaaaaaactgaaatcttaaattgtagcaaaaatgaacatgttacagagattgtactggctagttttgtgtcaacttgacacagctggagttatcacagagaaaggagcttccattaaggaaatgcccatgagatacaactgtaaggcattttctcaattagtgatcaagggggaaaggccccttgtgggtggtaccatctctgggctggtaggtagtcttggttctataagagagcaggctgagcaagccaggggaagcaagccagtaaagaacatccctccatggcctctgcatcagctcctgcttcctgacctgtttgagttccagtcctgacttccttagtgataaacagcagtatggaattgtaagctgaataaaccctttcctccccaacttgcttcttggtcatgatgtttgtgcaggaatagaaaccctgactaagacaaattggtaccaacatagtggggtattcctgtgacaacctgaccttgttttggggaggactgtggaaggactttggaactttgggcttgaagatccattcgttgttaagagctctgtcagatgttgtgtaggagcttggaagataatgttgagaacagtgcagaagatgtaggtctggcttgtgaaatttcagagggaaaattaaagcctcttttcagggccactgctgtttttgattgtgaagattctgtagttctggttagctggggctgaagaatcagctgtgattaacaagataccagaactactaaagcaaaaactttgcattactgggactattgatgctggttagctggagctaagaaattagcagtgattaaaaagagaccagcatctttgaggtgacatcttctgggaagtgttttctgaaagcacaaagatgctgtgttccagagatggccaaggttgtactcctgctgcagcgggacttggtaatatgtaagggtcacccaggtggtactggttttgaaggcatgaaggggtcacacagagcagctgaggcgtggcactgtgagaggccatggaaggccattggtgaaggtgcagcctcagttgcaattgacggcccaggactgaaggggtcatgcagtgttttggagatgccagtaccatgagatgaccaccaagagcagcagcagtggagtacaggcatctggagcctagaggatgacgcgtgtgcttcaaagggcatggctggagaagtgacccaagcccttggaggagcccagaagatcttgagttggatcccagacattggatggttggagattgatttttgtttttgactgtgactgtgccctgatattttccctcttaaaggaagaaactattttagtggagcccacagttaagagacttttaattgtaaaaagactttggattttaaaagagatggatatcttaaagagattgaaattttaagaatatgtaaagactttgagacgtttaaagttatttagaccttggggatgaataagaatgcaagggttgaggcttactagtgatgtgtttgtgtgtcaagttgacaaggggtcaattgtactggctcgttgtgtcaacttgacacagctggagttatcacagagaaaggaacttcagttgaggaaatgcctccatgagatccaactgtaaggcattttctcaattagtgatcaagggggaaaggccccttgtgagtgggaccatctctgggctggtagtcttggttctataagagagcaggctgagcaagccaggggaagccagtaaagaacatccctccatggcttctgcatcagctcctgctttctgacctgcttgacttccagtcctgacttccttggtgattaactgcagtatggaagtataagccgaataaaccctttcctccccaacttgtttcttggtcatgatgtttgtgcaggaatagaaaccctgactaagacacagataaaaattagaattatcctaatattttaatgattggctttattcattttggcttttgagacgggctctcatgaggaggcttaggctgacctggaaatttcaggtcctcttgtcacagctcctgactgctgtctataagcatgaatcagtatggcttaaggagtgatcttgaacctactgtaccagagaaacttatgaaaacaataagaaatttaaaattaaagactactgggactagagaaatggtttggtagataagagcaaatactatccttgcagaggacctgagttcaattcccagcacccagatcaggtggctcacaaccacctgtaactccagctctgagtggtcctaacgctacggcttccatgccaggcacttatactcatatataccccctaccaacacacataaacagacatgtacatgatttaatatgcttttaaatacaatttactaacgtttaccttcatacatatgcatgtgcctgatgcccattgtgggccagaacagggcctgggttttgagaaatgaacccaggtcctccgcaagaacaagtgctcttaaccactgaaccatctctctagccccttatgccccttgtgagcgagggtctctctctctctctccatagcccaagctgtcctggaaatttaccatgtaaaccaggccagcctcaaaatcagagacccctctgcctttgcctcccaaaagtactaggattgaaagtcaccaccaccatcatcattatcatctaatctactttcctgattttttgatatttacaagtcaaaaaagaagaagcagaatttagttaagataaataacatgagtgaccacaaagtaaagatactctatgcccttcccatatatttaaaggtgttttcggagaagtacttacacatctttttattatgctctgaagttcctccacagccattcctaattattttcctaattttgatgctgtaatgaactaatacaaaaaaacccagttaattgtgtgataccatgtaaattatgtttcataaaccgtttcattctgaattattagacaacaaacacaatgtaaagttttataggttaactgctattactgaacgttactgtgttagcctaatgaagcatttttaaaagcccctgatataatgcctaaagaaagtaatttttaaagaatgacgagtaaaaaaataaaaagagccctagaaagaactactagaaaagcctttgtttaaaaggaaaacaaaaatccaaattgtggacctggaatgaaaaatctaatcattaagtaatttttttaaatgtcccattgacaaaaactggaatccaacataattaagtcacccaaagaagttgaagattccgatgccgcccaccccattctccacaggatctccctcctcacataaacaatcgtcagtgagatcaccgagtatcacgaaaaggaggccagcagcgaaggtccttgccccgcaggcgcgaacaggaaaatcacaccctaccgcgcctggctgaggcgaagggaggccatttctccctgctcctgcagggcagggtgtccaggctccagcacctccagaggccgagcaggagagccgcgtgcggcgcaggtcctgttcggcgagcccgatccgcccgacccagcatgtctacctacccgccgatccacgcgcctgcctcttgccctcctcctccttctccacttcaggtagcgcaggccgcactcctggccccgcccccggaccggaccctccccctccgccgctcgccccgccccgccctgggcccgccccctccgccgctcgccccgccctccctgggcccgcccccagcccggttccgggcgaagcgtgaggaggtagatgtgctgtcccgaccccctcttctgaccgcatttccccatggctgactctgccgtaccttgctctctaggcccaagtacccgggcttccagcacccaccgagatgctaccggtacgaacaagagccaccgtcccaggctgggaccctgagaccttggtttgagtaccacgcacgcgcgggcctctttctgaggctgcgccggggagagcgagaactccgggtggatgaggcccagagcttcccaacgcaggctgtcctagtgccttcgggggaggaatcccacactcttacacaggggttttaggatctacccgtacgtgggaacaagtggccaaggcaggtggtggtcagttgccttgaaccttggattgctttgatatctggtctctgaggtctcagactcctctctttaggcaagggaacaaacatttgggagactgagcaatgtttattctaaaggaacccagtttagagagtgttttaaaagcacttgattaaagcgcatccggtatatgagaaagagtcctcgaagagactgccgtcatgaaaatgtaaaatgtaattaatttacagaaacaattgaatttgcttcctgtttagcccccccttttgtttttgtttttctggggggggggttgtttttctttttttgtacacatcgaagttggaaatgagatgtgtgagagaaaaggaaatggtgcctacagtgtgatatttggggactactctgctacatcaaatgcattggcacttgacttttctctcttcaattgtaggtactaaacagacccgagccctgaaacgaggagatgcatctaaaaggtagaaccacgtgggcatctgcatttcactttgcttttatctcattaattcaatctgatttggttttttttttcttttctttttttttttcttttcttttttttttttttttttttcttttttctttttggttttggtttttttgttttgatgttctgttttctgatcttgcaatctgggaattgaacttaaagactttgtacattctaatgaagctctttgtctaatttaccgagctatactccagcccaaatagtttaaaagcatagtgcatacctttcttgagaaaatactgaagactcaggaagcactgtcgattctcacgtaagactgctctgtccttcagctgtaggaaaaccaatgtggaggcttaggctgttggaaactatcatgaacacctgtagaaagttctggggacatagttcctgaattaaccaatctttcccatttcttcaggtacactattactgttgtatgtgccaagctcgctgaagcaggttctttctttatcacttcaaggcaccttttgtcttctgggttttttgttctgttgttgttttgtttttcttttcttttttctttcttttctttctttccttcttccttcctttctttctttcccctccccccccccttttggtttttcgagacagggtttctctgtatagccctggctgtcctggaactcactctgtagaccaggctggcctcaaactcagaaatccgcctgcctctgcctcccaagtgctgggattaaaaccgttctccaccactgcccgttttttttgttttcttttattttgtttttgtcttctttgtaacgttaaataggaacttaaaaacaaaccaaccaaaagcatcctttacagtttagagcttccaaaaagtcatggcctctcgtgtcacagaggagatagctagagcaaaactcatctgaagagactaacattcatcacttcaggactcaccgactcttcttgcaagataatttccaaatacaagatcgtctgtatttgagttaggcccttaggatgtgttgttgaacaagtcggttttgctcacaagaactgagcttccacttccgtatcactgctcatcacggaaggacagtcaggtcaggaactcacgcagggcaggaaccttggggcaggagccgatgcagataccatggaggagtgctccttacgggcttgttgagcatggcttgctcagcctgctttcatacagcataagccctaggataacatcatccacaaatgggctgggtccttcccatcaatcactaagaaaatgctctttaggcttgcctgtagctagaactcatagaggcattcttttttttttttttaattaaatattttctttatttacatttcaaatcctatcccgaaagttctctataccctccccccaccctgctcccctacccacccactcccacttcttggccctggcattcccctgtactggggaatataaagtttgcaagaccaaggggcctctttgcccaatgatggctgactaggacatcttctgctatatatgcagctaaagacatgagctctcatagaggcattcttaaggttccctcctctccagtgacattagtgtgtgtcagtttgatgtaaaactgccaggacaacattattgactgccatcatttgtgacagacagagaacatagtaaggtactgtagatatctgtcagtcaggagaatggttaaacagtcagtgtgcttgataattggagccagcaaattgtatataaatcttagtacatgacatcacctttattgatgggcataaagtgagaaaaattatttttcatgaagcttttcgtatttaatataaagacctgtaatgtaatctgtgttcatatctttttactttctttgatacaaaagtggtctttatggagttagtggttatagctcagtagtagagtgcttgcttagcatgtacgaggccctgggttctagccccggtatcttaaagtaacaataaaatgatcttgatgggataaaaataggtgtttggttgcaaacttctcactttcatgtattttgcaaaaaagaattgttggtgaatctgtaccagagtcccaagttatgggggttgggaggggacatattgctctaggcaaagaacgagagtctaaagtctcaaaagttaatgaaggttcctaccttcacgtgaacacatgaaagtttctaggttccagatgtgagagagaagggtaagacctggtgaccaacagaggtagttctggtaggtcccaacctagaagaagagcgagtaagtcaccacagcactgtatcctgagcgtgacagtgaatctcccttctgtgcttctgtcctattctggttgactgggcctgttgtgggacctggacatggtgtctgttcttggtgtgcagctcagtgaggctgtttcctgagatagcttcgatttttgccttccgtgtgtgtgtgtgtgttgggggagagggggggacagagcactgatgggacccgtggtggctatggcaagggttcctcgactgcatttcacatatcaggatagttatttagtaggactttataatgaaggtgagaaaatgctgctcttcttttcagacataactgttctagtaagctgagctaccacaactaggctgttgacaattttttgagtgaaagaaaagtagaaatcatctcttcacccttcattctgtttacttatgtgacagagaaaaaaaattttttttactatgtatggcaaaactacaaaaggaaaatttatatatataaattttgttataaaatttatatatatactcttttttaaaaatataacttcattttatgtagttcacacttgccttagactctgaatcttcccactgcctcctcccaagtgtgtaactgtggcatgtaccaccatgtcctgcccagccctcctctactggagtctataagtgtttccttgttctctgagcctagaagtaagtcctcgtggccagcttccatgtacacactgggaagaccaaaaagtattggatcagaggtggagagttaaaagctcatttattggcaaaatagtaggccactaggtggcttttaaagcacggagtgttgaaggtaggagaagtcttgaattgggttaactttctcattaaaatttcaggcaagcagaactggaagctgctatacaaaggaaggtggagtttgaaaggaaagctgtgcgcatcgtagagcagctcttagaggagaacatcacagaagaattcctgaaggagtgtgtacgtgttcaatggtcagactaccagatttaaaatagaatatctatatttaaagatttatttgtgtatatgagtattgtacttgctgattttgtttgttgacttgacagacaaaggaccagaggaaacagaacaggtaagtcaaagaagaaaaggaaaaagcctcagctgaggacacgcctccatgcagaggacctagcccacagtgggtggctccatccctgggctctagtcctgggttctacaaaaaaagcaggctgagcaagccaggggaagcaagccaggggaagcaagccagtaagcagcactcctccatggcctctgcatcagctcctgcctccaagttccagccctgcttgacttcctgtcatgacttcctttggtgatgatcaacaatgtggaagtacaagcagaataaaccattttcttcccagtttgctttttggccatggtgtttcatcacagaactgataaccctgactaacaaaaatagacaagctgatgccatagtggtgtatttgctatggcagacatggtttggggaggattgtggaaggactttggaactttgggcaagaaaaagccattgagagctgagagctcagtggatgatctttgggagcttggaagataagaatgttgaaaacagtgcagacagtgaggcctggcttgtgaagttttaagactctggccgtttgctattttggattaagattctgtggttccggttaggtggggctaaagaaccagctgtgatttaacaagagctcagaactactaaattgaagcctttgctttgctgggatacttgatgctggtcagctggagctgagaaattagcagtgatcaagaagagaccaacattattgagataaaaatcttctgggaagtgtttcctgagagcacagggaagctgtgttccataggtgaccatggttgtaccttgtactggcagccagagtcacccaggtggtactgcttttgaagacatgaagggatcatgaagaacagctgaggtttggcactgtgcgacgccaggaaaagccatcggtgaaggtgcaacccaagactgaaaggatcatgcaaagaagttgaggaagagagccatgagggactattggtgaaagtgcatctcagttgcagtagaagaccccagtgtttcagagatgccagtactgtgggaagactaccatgggacagcaacagcagtggagtggagccagcctgaaggcaagcagtatgtgctacagagtgcagagctggagaaatgacccaagccctttggaggagtacagaagactgtgagtggatcccagacattggacatgaccaaataggaaaaggcttattctgcctgcactttcatattgctgctcatcaccaaatgagtcaggacagaaactcaagcagggcaggaaccaagaggcagaagcctatacagaggtcatggaggagtgctgcttattggcttgctcagcctgctttcttgtagaaccaagaccacagcacagggatggctccacccatggtagttaccatatgtcagctcagccatcttttcaaagtgtttaaagtaacaatgttaccgtatgtatgtcagacccttcttgatgtcagttccttcctgtgctcccagagctctcacagtctgttgggaaatgccctcttgtttctccccagggcatgttcatcacaccagctcactacagcgacgttgtggatgagcggtccatcatcaaactctgtggctatcctttgtgtcagaagaagctaggggttgtaagtactttcctttaaagtatatttattaattcttacaaaacatcacagagtagtaagttaagcctgtggtcatgaactaataataacttggattgaccaaaagtattaattgtaaatgacttaattgtatataacataaagtttgtgttccttaactaaattcttttgtaaattgtactttatttttctttagatcccgaaacagaaatatcgaatttctactaaaaccaataaagtctatgatattactgaaaggaaggtaagttcagagctattgaaagtggcagttaatttttaaatgaaattgtacaaaactttaatttttttactttaaaatttgtctgttagaaaatagctatatttacaggttgtttctgttaaaagctaaggtactaagaaaatttcttgcttgagctttaataagacttgaagctgggtgtggcagagaccggagagtcaagggttagatttattctcggccctgcagcaagtttgaggcttctctgggctacctctctagctcaaaaatgatttgaacatttgaaaacatgaatacatgctagtataaatgcagacaagtaagccgtggtgacagggatgagccaggagcagactgatcacacatatgaaccctgcatgtcataggagggatgggtttgagcagctagaggcagcacagttagtcatcctgataaaaaaacgtgagaactgcttatcccagcaaaagcaggtttgagaaaggcagggcagacctctctcaaaacttgggcagaaaagtagaccatatatggaaagctggtaaactttcttatattaaatttagagattttgtccattataaatgaacaagagaaagatgtaaagttgtattttctaaaagttgatagctagaaagtgtagtctaagaggaaggcaacgtaatggaaacttttatatactaaatacaaatggttaatgaacattcaaaaacgcattcagtcttttcagtaattggagaaaaagccactctaaacacagtgagttcgttgtacaactcacaaagatgagaatgaaggctagtacatccacctttagagcctgttttggaatctgtttcacaccatgaagtggaagaaggctggggttcaaacccagagcctcttacatactagaagggctcactaatgctaagtacagttacaagcccaaaaatgtatcacattcttcatgaacaagccttcatattctttgttatatgccttgaaaaaattgctgagctatgtgtaccagggtaaatgtataaaaatattgataactataaaatataggcatagagtagaatgatattctgagtttaaaaagaaggtaagtgttataggaactttgaagacatcaagtgcagaaaactaacccaaaaggacaaagactgcataaccgactcacacaaggttcctaaagtaataatttttatagcagaatgaagcttatcaaagaaggtaggaataaaatgttactgtttcatgggtgttatttcagttttgtgctctgagaagaattccaaagatatatactgaagagttgtacaacaatgtgaacttatgtcattgaatgtacactaaaacatagtgatatggccgggcgtggtggcgcacgcctttaatcccagcactcgggaggcagaggcaggcggatttctgagttcaaggtcagcctggtctacagagtgagttccaggacagccagggctatacagagaaaccctgtctcaaaaaaccaaaaaaaaaaaaaaaaaaaaaaaaaccatagtgatgagtaacaggtgtgtggcattgcctctgtcccagctcccgagaggccagggcaaaagaacttagagtttgaagcccactgggctacacagcaaccctctgtctcaaaagaaaaaaaaaaaaaaggattaagagagcaaactttgtatgtattttaaaaggagatatctcaggagtttaatgccatgtgttcacaacctcagcactggaggttggagacaggcagaccctgatggctcactagccagtcaactgagccaaaagtggaagctcagaattcagtgagagagacccagtctaaaaaccatgaggagatgagtaattgaatagcacaccctgttaccctccagccgcagaggtgagtgctcacacagacacataggtactgcttgtgtacatgagtgcacacacagatacacatgccatgttgggcgccacctgttgtgggaaatattaaaaacgtcaacccaccatgtctcttgccctgctagtccgtattcctgctctagtaccagtactggtgggccacaacactatgtcctcatgaccacgtggaaaagatgtaccatatgcatgccgggcgtgtgtatacacatacatgcccttgtatacaaattagacaattaaaaaagtgaaagtattaaatgtagtctttaaaaaccattttttattaaggttattgttgtggctcacactgaaattccaatacttggttagctgaggcagtaggatgccacaaattcacaaattcaaagccaacctgagttacactgtgagttttgggccatcccagagtacaaagtgagatcccatctcaaaaaaaaaaaaaaaaaaaaaaaaagcttacagcatttacatggtagcaaaaacgtcaaactgttcagttgtacataagtaaagaataccgtataccaactgtgtggaacacatttgctttctgtggcagtggggtggaactcagggccttgcagatgccacacaagaggtctgcctcctgtgtcccagctccagaatgttgcacagtgaaagtaaatacatgagaacctgggagaattgtagaaacgagaacaaacaaccataccccacttgaatcaagctcaaaaatgtcaatgctgcctattttacagggatatgcatataggtgctatacagggataggtgtgtgagtgttctgcatagagatatgcaggtaggtgctatataggataagcagttaggtgctgtatatataacccggtaggtaattgccaaaaggagtggtgaagaggaacttctgatatgcttacctctggagaacagggaaggtgatgcagttggcagaggcacatgaacgccatcaaagctgcagtcctttactctccatctcgtgtggtagaagcccattcttcagggtttctcttattctttgatgtacacattcatgttcactgcgtgtaggttatatttcaaaataaaaagataatgaattaactttagatttttcttttcagtctttctgcagcaatttttgttacagagcatctaaattttttgaaacacagattcccaaaactccagtatgggttcgagaggaagagaggtaattaaatctatatcttgtttattctggttgtaagtgacctttctgcttttgacataggctgggagtgggagtagttgtctgtagactgttatcattttatacacgttagctgtgggtaaatagttatatcttaagcatagtagttaaggatttttaaatagaaagtcttacattcaaatatgttttctctaatgtacttttaatcacaaaatcattctggctcttgctttgccaagagtgtcggtgaatcctgctaatgttacaatcttgaattaaaatattaactttcttcagaatactagctcttcgaatctggccgaactcactttgctgctatgataacacacttacagtaactgcagtatcctgagtttaaagaaagccaataaaaaaagtacctttttgctaaaatgtttgtggtcatcatagggcttttgcctcaggaaataattaaacacttgcagtattgtactgatgcagaatttgaagaaatgtattaatatcgtgagtgagtatgggagtgtagtagcaaaaacaacagttgttgtcattattaaagtaaattgtgggctggcgagatggctcagcgggtaagagcaccaactgctcttccaaaggtcctgagttcaaatcccagaaaccacatggtggctcacaaccacctgtaatgagatgtgataccctcttctggtgtgtctgaagacagctacagtgtgcttatgtataataataaataaatctttgggctggagcgagcagggactgagcaagccgagttggccggagcgagcagaggtcctaaaaattcccaacaaccacatgaaggctcacaaccatctgtacagctacagtgtactcacatacataaataaatctttaaaaataaataaataaataaataaataaataaagtaaattgtatagaaactcagacaaaggcataatgaggttagtgtcttcctgaaggatataaagagatggcacaagccctgttatttgtggtcagacagtgaagatgggtgctaagtccagtgacttaggtgtgaagagatgcagttgtctcagaacaggcaaaacatgcaagactgtattttaaggtcaccgctctaaattctaccagctcattgactgtgatgacagaactgttgatagcatattcctttgttatccttcctattcgaaacctatccaccaatctttggccttaaactgaatgtaataaagactaaattgatcattttaccactatctgtaagatttcttttttagaagaataaaaaacagcattgttctaggtgaatgggggctcacactttttttttcattaatttgtttattcattttacatcttgatcatagctccccctttcagctcctccaactcccaccctcacacatctctgcccccattatccattccccttcttctcagagatggggaagcccccttgggtactctcctgccctaacatcaagttgaagcaagactaggcacatcctctcccactgaggcccaaccaggcagtccaggtaggggaaggggatccagtggcaggcaacagtgtcagagacagccctgctccaattgttaggggacccacaggaagaccaagctgtatatctgcttcaaatgtatagggggcctaggtccaggcccatcatgctctttggttagtgtttctgttgtagcttgtcaaaagacctcactcacacaaagaccacagagacttccatcattgcaaaatgcatgaggattttacttatctaacatgttggggaaccctctctcagcacgcaggccggaggagagacccagaacaaagaaagaacacactttttatacctttgtaagggccagatataggcaccaaggtagtttgacttattttaattggtatagccaataacctttttggacattggttggtttgtatagggtgactcttattttgtctgtccttgtggttttttagagtgagatggggcagggggattgttaatcttatttttgacctttaaaactgtgtttctatatttgtttagtcagccagctttttatctagctctgtacttggcctgctagtacagtttagaaagttcttttgaagggggaaggtacggggcgggggggggggtagtcttgaattcatttttgatattagatttcagtctcttgccccatgcccaggttagttcacttgctagatcttgtgtccttgacctctctggcttgctcagtctttttccctactcttccacaagactctctgagctctgcttgatgtttggctgtgggtctctgcatctgctgctgaatgaagcttctcaggacacagttgtgctgggctcctgtctgaagtatcattaatagtgtcaggggctggctctctccaatagggtggggctcaagttgggccagtcattggttggccgttccctcagtctctggtccatctttatctttttgcatctaataggtaggacattctgggttgaagatttgtggggacattaatgggaacccacactttttgatcttgtcactgtcttgtgcttcgctgtttctctcagcagaactgctgccactgagatgatcccagcaatgccgcacgttacacttccactaagtaacaccagtgggcttgcgttatccttgtctttgatttacaaacacatcttctctacttagcatccttatatctacttcaaaaccatttacctaaccacacatgatcgtgcatgcctgcaatccccacactcatgtgaagaagcagggtttgaggaggcagagctcaaggtgatccttatctgtatagtcaactccagaccagcctggtggacatgaggcgctgtcctaacaaaagagagagagggagaagcgaaggctttaccaaacaagctatcctgccagctcttctcctcagacatagttactggcacttaactaatcttttcctaaatctcacccctctgtgctcagaatatctacttttcctaagatcttgaagccttgatctatgtcactttatgtttgtggtcattagcctttcttacatttttagtggaggcagaaagatgaaagaaaatagccctttattcctctaatctagacaaatgccattaatttacagagtatgcaatattcacttagtatctgggaagacgcatgcatgcacatgtttattcatgtcacggtatatgtacctgacaagactcatccatgcacatgtatattcgtgtcatggtatatgtacctggcaacacattcacacatatccatattcatgtcatcgtatatgtactggcaagacaatgcatacatatgtatactcatgtcactatatatgtgcctggcaggacacattcatatacatgcatattcatgtgtacatgtaaatctcaacctgtgaatttaactgtaattgagataacagaataaatacatgagtgaagcaatagttaataacctaagtgtgtgtaagataaatttcgtgacattacttaatgacaaactgtaaacgaaagaaaaactgagaggagtcggttggggtactgcgctcactcgctgcagtgaccctcgcctgccgttgtttcaccttctattttttcagttcccaacattcactgtaatctgaacatattagtagaagattccagaaataatttttaagttttaaattgtaaaccactctgaatagtacaagaaaagtctcagaccatgttgctcctccttgctcgtccagggcatgattcatttttccaaagtcatcacactgtgcacatgttcacctgccagtcacttagccacacaggaagagcatggtatagtgaggtttggtaccattcctgattttaggcatcagctttggagtcttaggggtgtctatcatgcattagagggcactactgtatgtcatgggaataccagatcataataggcaagaaatgccaggctgagtttggtgtaggaaggcgctctcagggatttgtcttgcagtgctgagggttgaacttgtggccttttgcatgctaatcaagggcccaacaaaggtgttttgggtttttttgggtttttttttttgttttgttttttggttttttttagcagaccctgatctgcattgttcttcatgatgaattgaaagagaatcacaaaagcttaaaggatccatagagtcagtctactccctttgttaagcaacctttcaaaaattgagcatattttataagctaatgatggcttctgagtgaggtcagaattcttctcattgtagtcagcgtgattaatggaaattgtgaaggctcagtctacaaatacattttcttgttgatatcatgtaaccagagcctctgctcttgctggttttaggacatctctggatgagacagtgctgcctttaatctgtagtgtggctgtgctgttacccagtaagtccactagagggcactggtgtcactgaaccggttttctaatgcatttcagaataaatagcagtccttagtatttattgtagagatttttattttaagtcaaaaacataaattgcatgacagtgatttaatagtcaatttaaaataaaaattttaaatccatttcaagtaaaaatacattattgcaatgaattataaacttttaaattaatacatcttataatctgacatatacatataactttaaaaacagtcattaaatgtctattttctgccatttttgtgtcatactgatcacgtgtcttgttgtcacccgctgtttgaagagcagttttatttactccagctcagggtttcagtaatgctattagaaaaccatttcttagccccagactatggttcctcatttgtaaaagtagaagtttgcatttgttttagtcacattctgtttaatgatcagcatgagcctggatagacttgagctgtcttgttataagcaagaatcaaattcttaattgtgatttaagaattaaaattaactagaatgcttttgtttataaagatgaaggttgatggaggactgggtcaaagttctaaatgagaagaaaagccaggggtatttttaaatgtgttttaaccctgacacatcatggtcttatatactaataggaaacagaatattaaatttgacccaatttgatctcaaatagattattgtgaatatgaggatacatttattagattttaaaatccccaagtttactatttctcttcctgatatattagagttgggaagagtcataattatagggaaaaaagtatctaaaattaaaatgcactcttaagtactgggggatggtgcttacaaaaatgtctcctgatagtctgccagaggcaaaaccccgagttaaagctgtgtggttcataatgtgtgatgtgtctcacactgggacttagaaactgctcacgaggctggtggccacaaacagaccacatacagttctggtgccgaaatactgtgctttgtagatagtctgtggttgcattataaatcctgtatggttttgtaaatgtagagtctgacagacctgggaagacaaaagtttctagaattatgtgctaaatctaaataaggaaggacacacgttgaaaagcaaattttgtttttaaaaaatcaatgctgacagagctaaaagcatcatgtggcctagagttggggatttttcagtagcagttgtaagcagtaaacatgcacaatctcagggtggaagccaaagcgtccgaggaacaggttttataacctcctcctcctcctcctgagcatacacccctgctgtcggagcagaggaaaaagagttcagtgtgttcaaatacacttgagtcttaccgcaaggagcactgttgtgttgatgcaagtgatacacaaatatacaaacatatctacatgaggtttggggcatagattagttctgttttagattcactttgctaaaatttaagttaagcttctagagccaggtacgattggcagcattgagaaggcaggaggataaggaattgaaaggtcattctccagtacattgtgagttcaaagctaaatcatgcctctaattccaaaatataaatacaattacattaatcaactaactttcactttagtgcaaatatgagaatgcctttatgaaccaccattttgaaagcattctttaagtaggacagttgctggtttgtgttttctaactgtgctttcagaattatcaccagagcaacataaacttggaagaagatactcagcatagagagaaatagccatcttaacacaaaagataactttagctttatccaagaaagaattgaaggatgatgtattctgtcttgttctctgcaagactgcacataacaatgtcagttgtagtgtaggtaccattcctcatttcacaggttagggaccaacaaaggtgttagtcactcagggtatcagctggtgtcaaggttgagaaggacagtaagatttgtaaagtacgttcagagcctgcaagcagaacataccaaaagtgatgtccttggggtttggtttctgatttttttgtttttgtttttgagggggttgtggttgttgttgtatttgtttttctcacaccagaggcaacatgagatggaaagagctcagaatgtgaaatgaggcctaagagccaagaggaaccaggagccagaccaggcactttctcctttaaggtgtgcatgtatcacagcacttaggacatggaagaaactagtacctgtctaacacacagttgctcatcactcctgccatcagaaacaatcagacacagcagtgtgagcctgtggtccccactgctaaaggctgaggcaaaaaggtcagttgagacctgaagttaaagaccaacttgaccaacataatgtgatcccctttcaaaaaaaatccgtacagtgaaagttggccagcttgacacaaaattttctatgaaatgtgtctgtaattgcatgtgtatgatatatgcacatgtgggtgttacatgcttgtgtgtgatacatatatgtgtgtaatgtgtgcatgtgtgtgatgtgtgtgtgacatgcatgtatgcaatatatgtatgtgtacagcatgcataggtggtatgtgtgtgtgtgatatatgcttgtgtgtggtatgtgatatatgcatatatgtgatatacacatgtatgtatattgggtattctgctctattattctgcaccttattcccttggaacagggtttgaacatggagccaggctgacagccagcaagctgtagcatagcacccctcctgtctctgacccacagtgggggttatgtctaagcacatagctatacccagcttttacatgggatttatgcttttatcttcatgctagtataagcccttttaccctttgagtcatgtctgcagcccccagtaggacaactttatcatggccactagcccattgtgggcagcaccaccctctggttgggatcctggactgtgtaagagtagagaagactcgctgagcactaactagagatgagcaagcagaggtccatgtgctcattctcctcctgctcgtgacgggggatgtgtccttaagtgtctgccttgacttccacagtgatggagtaatcacatcatagtaacctgtaattgtgagccaaatagtcatttctatcctaagttaacttttgtcagggtgtttatcaacggcaacaggaatgaaactagggcaccctacaagcctgctgacctgagttggattctcggagtccatgtgaaggtagaaggagaaaattgactccacagtgttgcctgtgccctccacacatgcactgtggcacgtggacacccacacaccacaccatatatatatatatgtatatatatatatatgctgtatatatatgtgtgtgtatatatatatatatatatatatatatatatatatatatatatactgtatgtatgtgtatgtgtatatatatgtgtgtgtgtgtgtgtgtgtgtatatatatatatatactgtatgtatgtgtatatatatgtgtgtgtatgtatgtatatgtgtgtatgtgtgtatatgtatatgtatgtatatatatatatatatataaattttagcatattagccagaaagcctgttgtgctagggttactactgttatgattaaacactataaccaaaagctactcatggagaaaatgctttgtttatttggcttacatcgcaccaatgttagttattccattgaggaaggcaaagcaggaattcaaacgtgagtcgagcaggggccctacagggtgctacttactggctcgatgctcatggcttgctagcctgttcttagaacccaggatcaccaactcaaggatggtcctacccacaatggcctgggcctctcctatcaaccactaattaagaaaacatacaggcttgttttcagccttatcttatggagacagtttctcaattgagactccctcctttcagaagactctaggttgtgccaggttgacataaaactagccaggatctgtgggatgaataaaggtatagatcagaagagtaaaaagtatggaaagtgtctacactgtaagtgtttcaagtaaccagtagaatggtggtggttatttgccatccaaggagcaccacttacagtcttgaacatcatcaaactaaagtgaggactctggattgatctcagtgaacagaggcagcaggggaaccaggacagctgagaagatggggaaggcctgtttctgtgggccaagggaaaatggggaaatcgcctttagagctgcagagatggctggaacagcggtcacggcttcattccttgtgctttgtgatggtaagaacttgtgaaggatgtagtaggaaagactgcctaagtcagccgtaattcccatcttcaaggacaggagggctgagagccatccctgcagtgcctcctgtgtctgcactaaaccaagtacaggcgttcctgggagttagctagtcagtgccgtgatcacagtagagggagacacttgggcctgacgttttaaattggcagtcttgaaacatcaaaattcaagtaagttctagtttcatctgtacattagcttcactttaatttaaaaagtttgggggttttgttcttggccttaaaattgttttgcagttttaaaaccccctagtacacccttgtttgggtcattaaataagatttacatttggtggcttgatgtctctgtattgtgcctctagacctttatatttctttttgtttcttctgtttatttggtgcttaaaggttcttcttaaattgtggaaggaacttaaatagtagaacatttaccgagtgtgcatgaggccctgggttcaaaatctagcaccataaaaactacatttttttttctgttctttttttcttatgcgcattggcgtgttggtgctcggcctgcatatatgtttgtgtgagggtatttgtgtaagatcttggcattataaacagttgtgaactgacatgtgagtcctgggaattaaatcttggtcttagaagaacagtcagtgctatcaaccacggagccacctctccagccccaacacaaaaattacttgtaaaagaaagcctctttgtagttccttcataggtactctgaatttttttctgtcctcatggactcactggctgtcatgtttgtccccctgtttgccccactttttcctttgaagcagccccagctggctttgaacttctgtcaccctgtgacaagacattctggggagacacaacacacatcctactgtacatcccagctagggaacccagaacagaccaaagtcaaacagtgacccagtgtgtcttattggtattattacagagatgtgggtgagggttactaacacgagcagaaatgatcaaaatcagctccattaccaaagctgactcctgcttgggtgacagctcacagaagccaggaacctggagaaggctcaacaagttggaaagtgtcctttccaggtgacccattctaaagctcttccaggcagctgggctggtctctgcttcttccaggcagctgttctggtctgccatagcatagcattcatttcagcttggtttgtttgagagtgactctcttccaggcttcattatttacctttaagcagggagagacctggtgaatctggtcagtttcagggacttctgttttgagctgttgatcatctagtttgagaagttcgctacaggatggaatgtttctctcagaggaaactgctacattgctactactgatcctcctgcctccatcgcccactacctggttaatgtggtgctggcaatggagtatgctagggaagctgtgccaacggaactacatctccagccctgtatttgccttttcagtgttcatggtggtcaaacaatgtatacccacattgttcagggctaagttaatcagtgcaggggctgaagaggtggttcagtggttaggagcacattgctgctcttgcagaggatcctggtttacatcctaatgactacatgtaactcccagctgtctgtagatgtctgacctcctcttctgacttctccaggcacacactcaggacacagatatttatgtaaccaaaacacctttttaaaaagccaggcgtggtgacacctttcctcccagcactgggcctttatgagttcaaggccttcaaaaccaaaacgaacacagtttaacatcatggctgtctcagaagttagggtgaccagatgagaattacaatatagtctctgtctgaagagctggtggatcagttaagaacccagcttaagcatgtgtaaagtaaaacacgtagataacagttctgacaataaagaaaacctgacaaccatgttgactggagctcacagtgactacaatttagggagcagagtgattttacctttgtcaagggaagcggtactgtgtgcatggaatttgaacttagttttgaaaatgagtaaattttaagtaaaaaacaaaaccaccaaatccagatttttgtgcatgtattttacagtactttgtcccctttttcgtttgtttccttaaggaagaaaaaagaaatcttcatctgaaatactcctttaattatatttgttatgcagtacagctgtagtaaactcaagcaagctgggtcagttgccttcagtttcttctctctgtgtttttgttccaggcctcctgactttcagctgctgaagaaaggacaaaggttcgttccagtcagtttcactgacctgagtgggccaggtggtgtgatcgcctggacttcctgtgcttgtgtgctacaaagaaacgtgtgacacgttcaccattttcctttgtgagggaaagatgatttgtttgatctgtctgatttatcgtgcagctgtcccactggggaagtctaattgaagctgttgaaatagacacaaacatagcctctctctcagacaccactcctttgttggtgaggtcgtgccaattgtatttggagaaagggttttatggtcttgttttatatgattttaagatattaatgtgttgatcatttgaaagaatatcttacatatcaatatgaagcgcagactatagatttttggtttttggttttgccagtcccacctcacagctcttcatggtggtgtttgctcagctccagccgtctctcaggacaggtcctttcactctcagatcacatgtccctggttgctaatcactgccttagtcacagggtattgagtacaaataagagatccttgtttattgatggacacctttctggctttaacctagtataaaacgtcattgctttaaacctcaagagacagaatgggatataaagactatgaaagtttctttcagcttttcatttatttttttatatgtgttgcctgcatgtatgtcgatttgctatatgcttgtccagcgggcacagggaggtcagaagatggtgttgaatccctggaagtgaagttaagggcagttgtgaaccacctgggtgctgggaattgaatccaggtcctctgggagggcaagtgatcttaactgcggagctgtctttctagcctgtaatctagtttcttaaagttaaactttcttttcttcttatccaaaagttacttgcctgatgatgtaggttagagtctggttaaaaaaaatatatgtgatcctggaattttggaaattttgatgagtttctgtgtcccactaggacttgttttcagctctttgctgtctagcttggccttcactccttcccaccatgtgcttctagactaggcctcaaactctgagtgctcatgggtgcttgtttgtctcaacatgagctggaggaacttctgctttgcctttgctccttcagaattcttaatgtgattgaaactgaatctgaaaatcaaaatgtgcaaccatgggacagctgttatcttattgtttgcattcatgagcgctcagatttaaatatctctcattgaactatgttgatgtgccaacttcatttttcgttatgacttttgtattttttcattacatgaaaatttctgtataatggtcagccagaacaagaaaatattaactattttttcaagcaaaactcaaaattgttgagtaggatagagtctttagagggttatggtgtttgctatactgctttaagaattgtaaaatgttaggaaaaggcaaaggaaagctggaaaagaattctgtcaaatgtgtattaaatatggagaaatgaaagccttctgaaatgtcagtgtgagagtataaaatgtaaggctgtttctgagggacagaaattcttaccgtgggaattcccagcgtccctgtgggaagctttgtctccattgacatggttttggtggtctctccttgtacagcggcagttctggagaagtagtacagttcttccgagatgccgtgacagcagcagatgttgacggttccggcgccttggacgcgcagtgtgaccctgcttcttccagctcttggagtgagcgagccagtgatgaggaggagcaaggctttgtttcttctcttctaccaggaaacagaccaaaggcagtggatacaagaccgcagccgcacacaaaaagcagcatcatgagaaagaaggctgctcagaacgtggactccaaggagggagagcagaccgtgtcagaggttaccgagcagctggataattgcagattagatagtcaggagaaagtggccacttgtaaacgtcctttaaagaaagaaagtactcagatttcttcacctggccctttgtgtgacagatttaacacttcagccatttctgaacataaacacggtgtatcacaagttacgcttgtaggcataagcaagaagagtgctgagcatttcaggagcaaatttgccaagtcaaatccaggttctgggtcagcctctggtttggtacacgtgcgtcctgaggttgcgaaggcaaatttactccgagttctgtcggacactctgactgaatggaagacagaagaaacactgaagtttttatatggccagaaccacgattctgtgtgtctgaaaccctcttcagcctctgagcctgatgaagaacttgatgaagatgacataagttgtgacccaggtagttgtggtcctgccctgagtcaagctcagaacaccctagatgcaacactgccctttagaggctcagacacagccattaagccactgccaagttatgagagcttgaaaaaggaaacggagatgctgaacctgagggtcagggagttctacagagggcgctgtgttttaaatgaagacactaccaagtctcaggactctaaagaggtatgtcttcatgatgggtgtcttcatgatgtcttcatgatgggtgtttcaggctgctcagactgagagaactctgcagagcagacctgggagcctctcgctctgcagtggggtaggtcggtcacttagatagtcagatgtttctctaggtgactgcagtggagtaggtcggttacttagacagatgtttctctaggttaattgcagtgtccatttgaaatgttacagatatggctgggggtggcttactggaagcttgaggacctgggttcagattcctagcactaataaaagctaagcacagcttacccactggatgtatctgttaggcactgccagaaggtggattccaggggctccccgatcagccagtctaaggggacatctccaagttcagtaaaagactatatctaaaagctgaagtagagaagcgatagaggaagactgctagcagcattgatgtctggcccccacatgcccatgaatgcacgcatacacgagtataaacacctcacaagctcacacgcctgtgaattcacacacacacatgtcaaaacacctcacaagcttacaagatgaaatgttacagatgaaaattcagtaaaggaacttactgggaagaaatggatatagatattgaatatctgctctgtcatctgctagcttcttaaagttaattctttgatgctacttatctgtaaatagaacttgcattgttcacttgttcagagtgtgtcacataactgataacttggctcacagtcatacataaaggctgagtgcatgctgagaggaaggaaggaaggactgtgtaacattgcagttcgtatctttggttcatatgtactatctgcgaatcatatggcataacgaaaagagtgggtaacagtcttatttttaccatataattgttactaagttgtaagtgatgttgccctaagattaaaaatgcacttagagatttggagaggtaacatggagctagaaaaaaaaatagagaaatttattgcatctttacagaatttttgcctagctttggacccatatttgaaatctcaaattaatctctattaatattagacggcatccaaaacttagattaaactaaaagaaacactagtctctccctgtgagctgtataacccaccattactcactgggttttgcactaagaagccttaaaaaatagaaatgagtgtctgaagtctatgactttgttgtagaacactctacagctttgtgttggcatttaatatcaagtgtacggattattgaatatttacactaaacaccccatgacatcactgtccagaccaggaggtgctccttccttataaggaaacttgagcatcagtgtctgcccctgacccctttgcagttttactgtcagacatagtagtggagattacttggccagtttttgaacagcctgtatttgtccagtttgtttcataataccatgtggttttgtttggtttgattctaggcatccgtgctgttgtgtatccctgtagtccttgctgcatatacactgcacaagtgtagtagccccgagtcacctgtgccccatgagccccaagcctgccttttgtgtaactttcctgatggaaaagaaatgtctttttaccttgaataaggatccacaatccaagggaagtttccatctaggtccactttgtaagactgagtatgctaggattaccgatgggctgggtagccgcagctgcatcactgaaaagtcccccagcattgagtgatggttactgaggctgctcccaacagcagccagccttccacctcttacatactctgccaccaaagccacatgcagtaagagggaagtgtggccaggatctggtataggccttctatgatgaagtggtcaccgctcccatagacccagctgccatgactgcagtgacaggtactgtacttcatgatggacactagtcacagtgtcaccagggagaatgtggcccttgctgcacccctgcttgatgagtgcttagaaatgctctgttgctcggttctgcatctggtggctctttcatatatatagttccagttgtctgctaaaagttttaactgtcatttcattgaaaatgttaaatgtctttatatagcatcatacagtataccacttaacagtaataaaaatttgctattgtcttattttattagacatcaaacattgtatattaacatgttacaagctgaatctagtggtgtgttcctataatcccagtgtttggaatgctaaagcaggatcgtgagttcgaaacctgagatgcaggatattgttagcatcctctaggatgatctgtttacctctagagatttccagtcacccacgtcaccatacctgagcaggacttgaggggactcagtggtggcagcagtcctcaagagtcagttttccttcagcgcgtgctccttccaagtctgtccttccactggggagcattacccataaccctcctcctttggcatgcctgacctgtgactccattagaaactctgctgaggttctcaggatctgagttgtttcttccaggcttagcccagcgctctcctgagttaccctctccagggtctcagcccagatttcttactaccttgctagcttgtttgtgggttggtttgtttcccttccagttctctcatccctagttcactggaatgaccttccccctttctgcaaacactttcccacaagtcgtaattcttacgttaatccttaaatatacttttatattttatagcaagtttagtagtttgcagaggagaccactaccctccaaggagggcagatggccggcatgaagctcaggtttaaatgttcagttctcaagtctttttctgtactagaagagtacacatttctagttaatgttactgctctactcatttaaaaaaaaaaaaaaaagtttctctgtttgctttaagagtgtgcttcagcgtgaccccagcttcccgctgatagattcaagttcccagaaccagattagaagacggattgttcttgaaaaactgagcaaagtgtgagtatggacgtgtcgttctggcattttaagagatttaaattaactcagtaattttatgaatttgcaatttataaatattaaccttgaattctgaacattttttaatgatttgaaaagcttgcatgagctggtacaaccactctggaaatcagtttggcgattcctcagaatattagacatagtactacctgaggacccagctatacaactcctgggcatatacccagaagatgctccaacatataacaaggacacatgctccactatgttcatagcagccttatttataatagccacaagctggaaagaacccagatgcccctcaacagaggaatggatacagaaaatgtggtacatttacataatggagtactactcagctattaaaaatgatgaattcataaaattcttaggtaaatgggtggaactagaaaatatcctgagtgaggtaacccaatcacaaaagaacacagatggagtgcactcactgataggtgggtattagtcctaaaactccaaataaccacgatacaattcacagaccacaggaagctcaataaggaggaagaccacagtgtgggggcttcagtccttcttagaaggagaacaaaatactcacaggcacaaatatggagataaagtgtagagcagagactgaaggaaagaccgtccagagactgtcccacctggggattcatcccatatacagttaccaaacccagacactattgtggatgccaagaagtgcatgctgacaggagcctgatataactgtctcctgagaggccctgccagagcctgacaaatgcttgcacccagccattggactgagcatggggttcccaatagaggagttagagaaatgactgatggagctgaaggggtttgcagccccatatgaagaacaatatcaaccaaccagagctcccagggactaagccatcaaccagagagtacacatggctccagctgcatacgtagcagaagatggccttgtcatgcatcagtgggaggataggtccttggtcctatgaaggctcaatagatgcctcagtgtaggggaatcgggggcagggaagtgggtgtggctaggtgaatggaggaacaccctcatagaagcagggggaaggagaatggcatggggggtttccaggagtgggggaaactgggaaagaagataacatttgaaatgtaaataaagaaaatatccaagaaaaagaaaaaggaaaaggaaaaaagaaaattataaaggtgggggaagagaaaggcttgcatgaatttcctcacttgaaaattttccatcttatgatttattttttcagatatgttttagtaattatttttgtaggtgacataggagtgtcataaaggagaaaagtgagattgtaggctggaaaaacaaactatctcacaccttcctaagccagcaaagagagagctgttaaaacaagggcagggagcctccacccttgtgaacagccatgccactggacattccacagctggtgggctcgatcagcatgtctgcatggccataggcccatttcacacccaagaacataagtttctttcggttcaacgttgctttggcttgaagtgccctgtaatgggaaggattgttcttaaaatcagcccattcacaagtaacacttacaaaactgcccgtttctatttaaaacaaaaacaaaacaaagtttacaaatctttttttccagaggtaagagatctaccgtgaactttccaacctgcaattttatttatttatttattttaagcaaggaaacaagaagtgtgttaatcactagttggagatttggagataaaatcgtcttgataagattagtccaagggcagtgctttcatctgaagctatggaattaaatgccatcagccagagtggttttgtattccaggccttactctctgtagcacagactaaagcagcagggctaactgtgaatggtgcttgacttctcactagtcctgaggcaccttaacctttgagacttcctcagtgtcactgttggcgaggaaaacccagagggaggcacaacatgtcattgtttgtttgtttgttcttttctcctcagattgcctggacttttgggtcctcttcagattacaatgggagatatttacactgaacttaaaaacctcattcagactttcaggttagtgttaatggtataatttttccgtctctgttactgactgtattgattgtcttgtgaagtgacaggtggatgggaacatgagcagaggaagggattgacctctgtggactcatcttagactcagtgctgtttcttcttcttgattctgttgaatacatctccattttgtctcgagttctgacacattttactttggatagcttgcttgtaaagtaacttcatttaggaggaaaattttaggatgaagaaagatgactctgtcagtaggaagccagccttgtgagcgtaatacctgcattcagccccagatgctaactttaaaaaatgaaaaagctggcatgattgtgtgcggataatcttagtgctgaggaggtagaggcaggcctgttggctggccagcctaggctacttaacaagttctaggccacagggaggagaccctaactgaaaaatggtagacaacagctgaagaactaaacctaaggttatcctctgacctccctatacacacatacacaccttcccacatgcacacacaaacctcctcatatacacacagagacctccctttatacatatatgcacacaaacctcacatatatccatatataagaaattagtaataggcatgtatgtgtgtgcacatacttacacgtgtgtacatgtgcatgtttgttcacgtttgtgggggaatgggagtgagactcaagacctgacacatgagcatataccctgccaccgccaagtcctgtcctctagagaatcttcgaggagaacttgcagcgtcttctgcagcactcctgtgtcaggtcaccttgtgttctactgtatcataaggtgctccgactcagcaaaccttagcaaagcagaggaaaaggcagctcagcaaacagcaccgtgagcttggagaggaatgcagagacctgacactgcatcagatttcattcaccagtcggggctccactgtgagctccctaacaggacttaggagtaagggcaagtgtgttctcaggcccgtgtttccctccacttcacgtgtcctgcctttcttctttagtcacctcttcctacaacttaagttttccacaggcaaatattttactagacagtatttatctacttcctgtgtttaggccctgaacacacattcagatatagtcttttcctgaagcatcttattaactacagtgggaaacatgtattgctttcatgtgttgcatactaggctgagaatttgctaaaagaatagctcttgttagtgctacacacacacaaaggaaactacataaggtgagaggtgtgctgatcagcccatttttttctggtgaatatagatatatagtcacatataaatttacccactatccctcagtaaagctggaaaatgatgacaggcataataaacctcaggggaggaccatagcagtggttctgaagcttatggtaggaggttgccttgcagattaggaagatgctacttatggaatactgtcataaagaattggtgtgggagctgaaatataagccaggtggtagagcacacctttcatcccagcacgtgggaattagaggcaggtggtatctgtgagtttgaagccagtctagtctatagagtgacttccaggatagctaagggtacacagagaaaccctgtctcagagagacagagacagacagagagagaagctgaaatatgaagagtagtaagtctgccatgtggtctggggatgtggttctgtggtagaatatgcagttagcatgcctgagggtcaggttaggacagaccccagaacccctctaacttattagcactgcattacagcttccattccctaagctggcagctttcctaatgtatagtccaagcacctgtgtggttttctcatgcacatatcaaagggacattctttgacatgggagtattcttgagtatacttgaggacttccaagtgtattacgttgaaaaccagtaattttaccagaccaaaacttgaaaaacccaaagagcctaatgggattattgtgaaagcttgtgtaaggaatctactgtgcaacttatgttactgatgaagctcctctgacacatgcgctagccaggacaagaggctcttcagtggttcttcagtcctgacacacagactgcagataggccgaaagtcactttcaaatgccccgcacttttaaagatttctttatttaatttatatgagtatgtgagtacactgtagctgtcttcagacacaccagaagagggcgtcagacccccttacacattgtgagctaggggttggactctggacctctggaagagcagtcactgctctaaactgctgagccatctctccagccccctcaaatgtcccctttaatgtataaacttattttatcactttttctgtcattcctattttgcaaccagaccccttccaattacttttttcattagtcacaataattaaatgattaaatgatctattggctttaaaattatccaagttagtagtgtggtagttaagtatggagctgtggagatgaaacatggatggtcagatgattgttgtctgaataataaggagtatacagatcttattttgtgttttttctactgttacatatgattgaaatttaataaagtcatctgtgagaaacaaaccaaaaagtaagcattaccttggtagggggcactatagaattatgctctaattttggggtctatagctccaataaagattaatctccctgactaccttcagggagatgtcaggtgctccagggaataaggaaccctgtgcttctgacaggacaatgtgatctataacctgtttcctctgaaaaaattaagtcacttggtagtgactactatggagatctccttctaatcaatactgaccaatggggaaaagttgatataaataacaatatttttctttttgaaatggtcatcaatacgaagagcttgtagaacagccattcttgagccatttaacaactacaagtgtgtggcttgatccctggagaccaggtgtcttttgattagttagggttgtgctcagacagcagtatagcttaaaagccccctaggtgatttcagcatacagagttgagaggctatttagggctctctgaagaacttttcatgcttgagtagagaactgcccactcctatctacccactccctagtggactttgtctgttaccactcacctggcatagcacagagcaggctctgcccagcaggttaagactcttatctgagcagaggtggattaaaatcctctttaaattacctgtgtggtgaatcaagactactgttctaaacatgtatacattttaaataatgtgcctaatacccagggaagcgagagagggaattggatgccctggaactggagttacagatggctgtgagcacgtggcatgtgaattgaacctggttctctggaagagcagcccttgttttctaccccttagccatccctccagccccttttgttttttaattattagttatacaaagtaaacatacttatttagcatatatagtagaaattctatggatcagtaatatgaaaacgagtgaaactttgctatccagataatgtaacagaaatgctgtgagataaaaacacagtatctgtggcttgaatgagaaggcccccatgggtgcatgaatttgaatacttggtctctgattgatagaactgtttaggaaggattaggagatgtggccttgatggaagacatgtgtcactggagtggaggcttgaggttgcaaaagcccaagccattcctggtaagctgtctgtctcctgctaaggatcagatgtaagatctaagctactgctctagggacatgccatgcctgctgctgccaagctccgagtcatggtggtcatggtctctccttctgaagctgtaagtcccgatagacttttctgtaagttgccttggtcgtgacactttgtcagggcaatagaaaggtaactatcacaacccttccttgtgtttccccagttcctggaatagtggtagatattacacatgtgctacattgtttttcctgcatgacaaaatggactcatgaaatattaaatgtgtgttacctgaaggtttacaaacaacaaaaaacaaaaattcaaaacagaattctaggcctgatggtgcacacctttaatctcagtactcagaggcaggggtgagccagcccaaggctacataatgagatcctctctcacacatgcacagatatacacacaaccacccaagaggttgttttgtcatttttattcctgctattcaactctttgtggttatatactggattccattttgtttgctacaatacagtgaacaaacagcccttatctcgtggtgcctcatccggccaaagggctgtccgcacgttttagtattgttatgtgactcttctcttgtccagtggtctccatttcttccaagaagctgaaaagcagaatgagaagctttggtgttagataacctggtggggaaagacagcaaggggagatgcatttaaagaaagggctaatgggagatcaggagcaaactggtcctatctgagatcatccaacagaagagcttgatcagaggggcaagatggctcagcagttcaaaaggcacttgctgttgatatgagtctgatctctagactcttacagaaagatgaagtaggacccagctctacagaattgtactctgaccttcatacatgtgtcgtagcacacagactcaacatataccataggcacataaaaaaaaaaagaaaaatttaagaaacctgaaaatgggactggaggtaggatcaatggtaaagagcacttactgctcctccaggaggcctgagttcactgtgtgtgtgtgtgtgtgtgtgtgtgtgtgtgtgtgtgtgtgtgtgtgtgtgtgtgttgtgtgttgtgtgtgtgtgtgagattttatgtgtcttatatagatgtgaatgttttttatttggaatttattggaacgacttaaccatggttgcagtagttgttgtttttgttgttgttgtttcaagacagggtttctctgtgtgtagccctggctgtcctggaactcactctatagaccaggttggcctcaaactcacagagatccacctgcctctgtcacctgagtgctgggattaaaggtgtgtgccaccacccctgaattgaattcttaatactcacatggtggctcactactatctataactccagttccactagatctgacaccctcttctggcctgcactggatgcaaatggagtacagacgcacatgcaggaaaaacacccatacatataaagttaaaaacgaagcctgagaacaggagtgagcctgatgtagtcattgagcatttagggtgctgataaacctaggaaagtaatggaagtcaggaggagagatccgcccgcggtcagagccgtggaactgtgtggggcacagagcagcctagccctaccagacacaaggggcatgtgtgctcatgctgcatgtgtcatgtgtctgatacagaaactggaattcaggaaggaggtccagactggagctggaaggtttgagagtgtcagcccatagtgctcttggtgtcataagactgtctgcagagaccacgagagacttgggtcagaagccctggttgctcggagttaagaggttggcaagtgataccacagagagagggagaaaccaggtggagatgtccaaagagggacggctctgctcacctgtgtcggagctggcaagtcgtgacagaaagctgatctgccaatgtgtgccttttatacacctgatcttcacagaagcctgtgaagaaaagtggggctgctgacccttctcaaagattggttagtttagacttttaaaagctttatagttctcgatcttacagcacaagccattgctgttttattcaggaatttttcccctgtgcccatatcttcgaggcttttccccactttctcctccataagtttcagtgtctctggttttatgtgaagttccttgatccacttagatttgaccttagtacaagagacaaagtttggagctgagacaaaaggatggaccatctagagactgccatatccagggatccatcccataattagcctccaaacgatgacaccattgcatacactagcaagcgttggctgaaaggaccctgatatagctgtctcttgtgagactatgccggggcctagcaaacacataagtggatgctcacagtcagctattggatggagcacagggcccccaatggaggagctagagaaagtaaccaaggagctaaagagatctgcaaccctgtaggtgcaacaacattatgaactaaccagtaccccggagctcttgactctagctgcatatgtatcaaaagatggcctagtcggccatcactggaaagagaggcccattggacactttatatgccccagtacgggggaatgccagggccaaaaaaaatgggaataggtgggtagggaagtggggggggaggttataggggacttttgggatagcattctaaatgtaattgaggaaaatacataataaaaaaacaaaaaacaaaaaaacaaaaaaaaaaaagctttatagacctggctagcctcagactcacagatattcccctgcctctgcctctccagtgttgggattaaagttgtgtactaccagtcctggcttaaagttttaatgttagtacatatcagagtccataacagaagtgagtgacagagctgcactaatgtcctcattagctgactattatattgtacttccattttatagcgagaccttttttgattttgaaaaaaacattctttctaaactatagagaaaatctggattgataaattagtagatgttaaattttctaaagtttcattcagatgttaagtaaagacagctatgagataataaattcaaaaatactgatttgaatgcccattggttacaagtattgctctgggaacttggaataaatagatagagaatgctgcttctttgacacattaaattataattcttatcacaaacttaaactcaaaggtaaatcttgatgtctttcagattatcaaatagaaacattatacacaaacctgtggagtggactttaattgctgtggtcttgctgttactgtaagtactcattcagattctgtctctaaaggaacagtttggtgagggaaaacagtcactgttttggagaatgccttcttcatattctgggccttattctctgacttttgtgcagtaaggtagtttccatgtatgctgtattttgagaagctgtaatgttaccttgtgtctctaccatcttaagagaatcagttctcataagtatttctcttttgttggaaatttatacagtagtcttacagttccttgttattaactgttctatcaagactgaatgaacttcattgtctgacatctgtttttatatatatttcatttttggacatagtttgtgtttagtagtaatagataagtcttactttctaaatgtacattttaaaattaacaggtttaaaggagctaagtaaattatatgagcatacataaaacatttaaaactcacttacctcttaagaaaccactggtggtttctaaggctatttttcaaaagggttaaaaccatttagtaggtgtagtgtttttcagcttgaattggggaaatcttttgaggctcactcattgcttttgctgctgttgctggtggtgttggttaggccattgaagcccacaggcaactggaaacttacagatgctcacgctcagtcacgctcatgatgtctccagcactgctctctctttctttgatattactttagactgacatgtgccttccctgtcctaagaaaagctgtgtgagaaggattagcttaggcttcagtgagccggaatctgtgtcacccgaacagatacaactcacatgattcattaaatcagaacacagaaaataactttacttgaatgctctgatataaatttttaatcaatcctaagaacaaatcttttgttatttctactattcagtgttccagttgaattggcagttcatgaaaaatatattattaatttttaaaaggttttctactgtatgaaatgtgtaaatattttggtcactgacagaaaaaatatcaataactgtgcttacccacagtatcatatacctgataataaatgctcgtagacaactctctaactgtccttttgtagtttattacactaagagggaagcagggtttaggttgacatgttagaggcatgagcagtgatctcagaatcttgcttctgtcactgaagacatacgaggcctttactttttgtattaaactactgccacatctccagcatgtctagcaattagaagagtgagccaggcagtggtggctcacactaatccgagcactcaggatgcaaagacaggtagatatctgagttcaaggcccgctggtctacagaatgagttccaagaaagccagggccacacagagaaagcctgtctttggggggaagggggaatgttgaaaaacacaatagtaaaatgtagtattaaaatttagttgtatgctttttatctgaaactattcccatgttcaatcttaaaatcgtagctgtgagaaccgctgtgtcctatgtcagtcttatgccctgaccctacagggagatccagccttcccagccactgagccttttgattcgtagacagctcagtcatttctggagtaggtcctttggctttgaaaatcttgtgtcactgtagatcccatgttccaaggtacttgttcttgaaatcttgtgtctttgccatgggtcttcttagcagttcccaatcagccaatttgcacactgtgtagcctcagatttcaggtgtccctctttgtcttttatcattacctcctaagacttctatctcagtacacattatttcatttatttcttttttcacaaagccccctttagccgttcacgttaccctaaggaacctgtcacttagctgttggcccctttcaccctcagcccatccctctaaagtattaagcatgttaggaatagaacttaaacatttttcatttagaattttaaataaaaatttaaatatttaaagcgaatcccactcatgtctatagggtataattgtatttggtataccatcccccttcttcctatatttaacaaaaaaagcattgccccttaatatgagggtcagtgcgagacagagagtctcccatggaaagtgtagagaactcagatgcccagagatactcttagccagagccaaagggagtcaggcacagatttgtgtaaatggccttccttttccgctattaagttattgccaccaaactgcgtagaggcatgaaagcccgtcctgggcactcttcagagaccttcacaggaatctgcttgcagattttcatggagggttactcacaaactaggcattctgaaatgcatattcaaaccaaacataaatgtgtagagcaaccgttctgactgagaaaggaggtatagactgcaggaggctcagcactcaggcctgactctggtctccaggtcccgcaagttgtcagaacagatacctgagagttgtcctctggtccccacacacatgctgtggatgtggacaacagtactcacacacacgataaataagtattttaaaagatatcttatatagtaagatatttatgattttgtgtaataaatggtatagcagtagatacaactctttgaatattaaagttttattactaatgttcattaaatacagaggaatcaccaggaaagacacttttctatggaagtgtcttacactcttgaatattgatataaaaacttaaggcctggcattttctgtcactgtggatgagcttgcttgtcaaagaaccctctccagccctggtaagagcaccatagaagtacagaannnnnnnnnnnnnnnnnnnnnnnnnnnnnnnnnnnnnnnnnnnnnnnnnnnnnnnnnnnnnnnnnnnnnnnnnnnnnnnnnnnnnntgccaggccttaagttttcacactagtactgaagactgtaagacacctgtatagaaaatcatctttcctgtgattccctggtgccttcacaggccactgccatggaggaaactgtagagcttagcatgcaacacttcagtgtaaatgtccctttcttataacaatacagtctcaggcatatagtcactgatgggattggcacagtagatgagatgcgtgtgcacaagaaatgtatcatggatcactctcacttagaattttactaattttatgagacatgaatgactattgtgactgcaacatttattgattttatatattcagaacttgagcacatagaaaccttcaggcagggtttaaacagtgtgtgttcatttcacatgaaggaatgagacatagattaacaaatagtaataactaattgaccttctttaataagaactgattgaaaatgcagtaaaatagctgagtagttactgatattatttacctaatccctaagtaataattttttctggttgaacatagctatactttattctctggatagggctggacatttgaataatacaacctgaattggattttcccaaataaatatgctcaaataagatactggagtcttttttttttaagagtttatttatttaatgtatatgagtacattgtcatatggttacagatggttatgagccaccatgtggttgctgggaattgaactcaggccctctagaagagcagtcagtgctcttaactgctgagccatctctccagcccagtactgggttcttaatacattttttaatatattactcttaacaaaaatatgtataaatttctacattttagaacctatatatcataacagataaaacctattaatatatgtacttctgtttctacatcagatcaggaagcactgtgtgcatcaaagggcatcttctggcacgtagctcccttacgcgcctttttctttctttgtaattcccatcttatggcctgacatctcttctgcagtacagagtctgaggagatgtcataggtcagccctcagccgacccagactcctttcctcttcctttgtcttttgttttcttggtctggaccactgtcattaaagccattctagactgtaactagactataactgtcattctagtttgtaacacaaaataggactgtgctatgctggagagaaatctagggaaaggtcctgaccaaaactggcagccaagaaaaaggcagtcttaaaaggctgagtcccttgtgtgcagcccatgtgccaggaaaggggatcaagtttcctcaactgaaaatgtgctgtgttccttggtactttggctgtccagtggaggagatgagtattcagagaagatagagagggtgacttctgcagtcgtaacatgctgtcaacacatgctgttcctacttggatgcccttagtgttctctaatggaaagctttcaaggccatctccaaaagtgtctgctttcattttacttatctgaactggctgtttccagtgaactgtggcctgtttgtagtcagggaccattcaatagtttattccctctaaaagctttgagtattcccatcgttcagggattagcatgtaagtcctgggaaatggtattttaaacaagctcaacttgaccatggtctcaacaaaagccatcaggacgcagacagtcactttaaggagtcatcaaagacaggtactctggagagtcccttccctggggctcctgggcatgaatggagctccgagcctgaagcttttaccctctgccaactgtgctttagagcctacccatcacttcatctcctcataaagatcttaaagcactccttaaagaacaaatggatggttcttaccatcaagtacctctctcttaccactccaaatcaagtttggtttttgacctatattaaaagacttttggaagtattttttgtattttataattatggaatatttataactgattttttgagataaaattcccatttaatgtataggcagttctgattttagtatatttgctatattatacagtggtccatactatcaaagaacagaacaattttgtcaccccaaaaagaaacctcatctgtgttcagccttgatatctcctctgacaaccacttacaaccctgtggtataaccatttatctgtttgcctgttgtaaatatttaaatcagtgaaatcgtgtgggatatatctgtttatgtttggcttctttcattttcatcatgtttttagagtttttgtccatgtcacagcatataatagtactttttttatgaccatataatattctgtgatgcggatatacatacatttacccagttctcagttgtcaggtgagagttatttctgctctgaggctagtttgtacaacggtgtcatcaacatccatgtgcatgctcttgtgtggcatgtcttcagtttagctgtatacactgatgttgaattgctgggttatgattaaccttttgagaaacagccaagctgtttcctgcagcagctgcaccgtttcacacagtcactggcggcatgtaggcactccacagacagagctcatacccagttgtcatcgtaggtgctcacatgtgcagtgttccacagcctgatctatcacatgctcgtgcccagcgagtgacgctgtttggggaggttataaagaagctttaggggttgtagctaactgaaagtaggttggcaggcagaaagatcctgtggggctgtccttcccatcgcacttctgtctcctgcttcccagccaccaggctgtgaattgtactgctctggcatgtcctctgaaccatattggaattagctctctaaaactgtgagacaaagatataatccctccatttaattgttgtcagatatttttgtaaccattgtgtagaagtaaataacacaaaatactgatcacaagaagtgggattgtcgctgtaactaagccaggtgatgtggtgcttacactggttgcagaagcagtttggaaaagactggagaagctgtcacaggagctgtcacagtgatgcaagcaaagcttaatagacaattatgaggtcattcagaagaccacagcaccaccccgagtgtggacagcagaggccaggctcatgaggtttcagaagggaactgaacaaagactatgcttcttatgtcctggcaaagaatttatctacatttgcattgagcctgtgtcctgtgctgaattgaaaaaatgatggactagtgaagtaggaaattttaagacagcgtgataatgtcatatagttattggtggttgtttctagccaagcttagtagtaaggatcaggaacaagaggctcagaaacagcaggaattaaaaaaacaaaaaaacaaaaaacaaaacagtgcagtatagccaggaaaagagtgaggtggaaggttctcaggagattaacaccatggaaagagtgttaagagtgccaggcactctcaagacagagagaaaagatgcctttagggcaccgcaggaattgagcaaaccctacctacccatgggcaggctccagagccgccaggtgctgtgattgtacagtctggtgtttttccaggttgacccacgcagcccctgaacctgcagcatccgtgatttagagggacgtggctcctgcttgagctcatgagagaccttcctgctggtgtcactttttgaggctttagacattcaaaggaaggcataagagaccaagcaagccttcccagattctctacaagaagccgtaatagggcagtacttgaaactgtgatgctgagacctcagacacagtggagaccccaggatgtcctgtgtccctaaggcatgccatcagatggcaatatatattaggtaataacatgatacacagtcaagggtcagagtggacatcgaccagaaggcctcagtgtaccggattgtatacaactgtccattatgcccattgtatatgtgtttgagtagacttgttactatttcctgccatctctggagaggcagcttcccaggggccttttcctgtgtagatggttgacaggtttgcttgggttaacttgtgcctttgttctttaccagaagtcgccctgaagtaataatcttaggctttttgggggtgcctagggccagagatacaactcagatgccattattttgagcaaaaactagtatcagaccagattaaaagtactttaacaaatctataaactaactttattttgccaggagaaaatagtctttctctaatgtctcccttcattctgtctttgtctaatctgtagctgtcctttcagttggtgtcttcagttttaagaaaggccaattgtgatacattcccctttctgtgctattgttccccttccacggaattagtgtgttcccgagaaacaggaggtgggacttgaaacactgtaagagaaaggtccagtctcggtgacttttgatactgctatcccttaacagagtatctggccagggaaactttggcagctgttgtgggtgacacccaacattggggtgggccaagcctggtgtagttcacagaaccctaccacatacccagatgctagacatgaagctataggacttcatgtttatcctgctgggttttagtcttgctttgactcagttcctcctctctgcataccatttctcttgtggaatgagaagtctgccctgtgctgttggatgttggatgtacatgaccttttttgttctagaggagttaacaactaagcttgtgctagctttttggcatctctggggcaggctttgggtcctcctgtctgctccccctcttgagcagcacaacttacccggggctccaggacctgactctggtcatcagactttcacagagaccacttttacctgctcagccatttccttaacccagaacccagataatttctaaaggaataacactttaaattttctaatcaaagcctactttctacaaagatttcttttccttagaattccctacatctccattaaatttataatttagtcttttttcacccataaatggcagagggtccccaaacctgctaccttaatccatgttaaaaattaccagtgtgtgaggccctgtgttccctccctggcagcgccgcacatgcgcatgtgcatgtacacacacacacacacacacacacacacacacacacacacaagattccccaagtctcctgattcccaggctccatcagcttcgaggatgatgggtgttaacagcagttggcacttagaaccatagctctagcttaggtagccagtccctagttttcctatgtatctgcctgtctgaacaagctccctgagtttactggtagtgttgccccagccttgggatctccatgagaggagaatagtgatttctgtgtggggcttgatcccactttgtcacacactgagaaggagaaagctggagcattggccaggagcaggaattgggaagaaaagccgtgctcgtctgcagctgctttatagacctgctgcaaacaggatttagatataaagttctgaagttactccaccccagccccttacacaaacaacatgtaatatatcactccacagtgatttacaaaggacttgtttcttttgaattagaaatatcagtgggaagcatcccggcttccttattaataggtaatcctaaaccctcaaatgcaaacatcatcagggcatgagccatctgttagaggagaaacattttattttatttggctgcaatggtcttctctaatcaaagtttttatctccattttctagataaagctctgaagtgaaggcccatgatgcaatgcccccctcgcatgttctcttatctgtcctctccgactacttcgaacaccatcacatcactggccttacgtgcctattagtttcttattttggtgactttgtctttttccctaaggtaaattttgttttgtgatttaggatcctctgactctgtggcccaggatgccatgctgcccacagctcacagccgtcctgctgcctcaagtcttccaggtctaggattacaagagtgcaccactacagccagcttacctaagatagaattaatagaacctttatttgtgtaattaccttttaacaagccgtatttcattaaatgtaattccattgccctagatgcaacacttatatgagtcttgaagccctaaactcaacttcacaaattattcaacctcattgagtgttagtttcctcattggtagtgtgaggagttaggctggattcaggctttgttgaggcagcgcttgtttctaatgagactcagcagctgcaggtgccagctctgacatcatccagccctgacatccagccgaagcaggagagcaaagcaggggagcgaggggtgctgaaggagatggtgagagcgctgtggggttgctggaggtgtccactagagtgaagccatactctgaaaaggtggctcttttcccctccatccccttagcctagcactttcccactctctcccctacacttctctctttgacttgaagtcagggttacttggtaaagtttacacagaatcttaatttcacaaatgaagaagtagggctaatggcattgaatgttggtcttgagtgtacaaagctgggtttgcgtttagtgtacacacgcacaaaattaaattaaaaatcagataaactctatttctgcttccaaaactgtttgatttttacttgtgcagcggctccgcttcttcttctcctgctccatcagtgatctgcccgggggagactaaggcacagtctgaaacagcagcctgtgcaaccgcgtctaaccctgcggctcttctcatatttctcatctttacctcccatgcccttctgtttcccatggtgtactagtccatctgtgagacataaacatgtacttcacccttgcaaaaaatgtgtgtgtgtgtgtgtgtacacaagtctctgtaaaaataagagactttctgtttatccacatactatgtttggacaatatgtaaatagtactaaatcaggaaaaattgtctacagtcagtggagtgatttgaaacagtgttcttaaaaaaacaaaaaaaaatctctgctcaaaggagttgctgtgtaggttgctactgtgtcatatcctgatgccacctgacatatatgcccacccctaacaataaatgcaccaataaattataatttaaaaactaaaaacacatacatcctcatctctctagggttttaaacatgtatcacctgtgccatacattcctgagtggtgggtggggcatgtctgtgctcaggctggcttgtgaaggtcaggcaagaccttgcaggagtcaggtctctccctccactctgtgggtcccagggattgaacttgggttgacaggtttagcagctgcaagcacttttataacaccaagccatctccccagccctgttttttaaggcctatgattacaaaataaatgaacatacttctagagaaaaaactgtttgttcttatacagcccaggctgtcctcggtcttagagtccactgccttgctctcccaattacagatgtgcacccaccacacctagcctttaataaagtctttaaagtcagtagcagacgctaatagctaagacattgagagaactgtccagatcagtggtggtgacacatgcctacaatcagcagcacttagaaggcaggtgcaggatgagtggcacagggtatttatcagattcatagagcctgatagaaatgctctctttagcacaaaagttccctttagtttgtgtaagctctgcttattcagtagtcttgcaaatttaaatgaagctatgagaggaaaaaatattattcccaaatgtatggagagtttggcaaattttttcctttattaactacatgtttattttgtgtattatagagacaacacttttcttacttcatcctgatcattgtagttagcagtaaaatcttgctattcttggagctgaaattcaaatacttccattctgttcctttttatatatgttcacagaattctagagcatataagagtgaaagggagaaaacaaagcttagaattcttcacttttctctcttctgttaggtcatctcagtgtctgtcctaaatgcaagtttgggagttggctgctaccatttgggaatggctcatgtattcttctgtgccataaaagatcaagttcagattatttagtactagaaatgcagcagaggcgcgcacgcacgcgcgcgcgcgcgcacacacacacacacacacacacacacacacacacacacacacacacacacaatacatttatcctaaaaggcaacgtaggagagatttaacagtgacagttttagaaagaagttagttttgttgactcaggtaagggcatgggtgaggaatcattaacagttcaaatcaagggcaggatattagggcagcatagtttgaaaaggcagacaaagcatggcacactcaacaaagagcttgagtggggaacagtatagctgttctcgtcaggcagacagcagcgatggacagttacgtagatttctaaacagacaccttggattctcagcaaagtggaattagagatggttctcttaggggatagaggttgggtctggatgaaaaataataacagtggtcctcaatgcagccaaggagctgaccaagagccacagtagactaacttactattctgatgaggcccaagatcatggctttgaagtactatcagccagagacactttctccctccctccctcccaaccctgccctaggagtttgtagtcaccctgtggtgtgaaaagagcagtgctgattatggactgcagtctggctgggtatagctaagataaggagacaaaaagtcagaaagtaatagcaagacgttggttcagaaggagaccaggaagctggggagatggctctgtgggtacaagcatttgtatgcaagtattcggacctgagtgtgaatctccagcacctatgtgaacagctggatttaagggtaagtgtctgtaatgccagtgttgctacaaggatatgagaaatgggacaagatggtccccggaggctcacaggccagcatcctcagtgagcaaagacaccgcctcagaacaagatgcaaagtgaggaccaacacctgggattggtctctacatgagcactgcattcatacactcactgtccatgcacacatgcacaaagaagttacagcaaatgtatttcgtaaaggatggtggagttacttcaggaacaatatgtgtctcctcagccaagtatttcatgtgacctcatcccaaaatccagaaaatggatgagattctttttgttgatcatctatttgaatatccctcaggtacttcaaggctcaaaattgagatcaaacatatcttccctttcagatgacccctatttcttttgtttcttcctgatgacccaacattgaaaactgagttgtcagctaggcacagtagggaattagagagtctgggacaggagaattactaagagttcaaaaccagcctagaccacagtgaggccttatttaaaaagtgttgttgggggagggagctctttttctcttggtggctattctcggtcatcaactttactacatctggaattaactacaacccaagtggctaggtgcacctgtgaaggatttttcttaaatcatttgaaataggaatacccaccctaaatctggatcttttgtggtggaaagagtcacttttaatcagggctacaccttctggtggtagcctatatgaaggacatggaagaaggaagtgctgccttattctcactgggaagttcatgcctccactggcattagagtctacgtctagattccagagtctactggaaaccgggtgagaaatccagccttgtgaactgaataattggtggattcttggaccttgatggatagacagctgttattgtactaactggaccaaagactataagccattctaataagttccctttatttatttatttatggatggatggacagatggacggattcattctttaagttctgttcctctgaagagccctagctaacacatttgccctttacttcccccatctgattattctgactttcagttttgttttatttcgttttgttttgaatcagcatctcactgtgtaaccctggttggtatggaacttgctggcctcaaactcagaaagccacttgtctctgcctcccaagtgctgggattaaaggtgtgctctaccacacccagctacagtctgttttgtgtgattcctactgtgactaaagtgcatcagcctagactgccttcctgaatagagctgcttaccatcctcctccaccctcccagctcttatattctcctcactgaagtttaaccctgattgggatagaggatggtttttgttctttattattttttattttatttatccatgtgtatatgtatgtctgtatgcatgggcacacgtgcgtttgagtgcccattggggccagaagaaagcactagctcccctagagctgaaactacaggcagctgacaggtgcccaatgtgggtgctgggcccagagctcagggccactggaagaacaagcagtacatgctcttaactactgaactatgtcctgtatggagggattaaagcaaacagaaaacaaccaccacctagacagagactgcactgcctccatgtagagaccaagcagagactgtgggcccaggcctcaacaggacacctgtgccgtcccctttaaggctcagggaatagtgcagaggaggtgcaggaaggatgccgctctccggacacaccctttacagtcattagtacacaacaactgtagttacctgcagtgggtccacacaaggaccagccctgtccatagtcagacatggaggtaggaacggttcacagggctcactattttattctgaaccactgagtactcacaggctcctggagccgagagagctctgtcttaagttgtgtaccttgtactgagcccaggaggctccaacagataactccacacctaccatcacacagatggcccaagttaatcaaactcggagaaccacaaaacagaatgaatagacatgaacatgaaaggggttatgggaaggatggaggtgggggtaagagtggtcagcacacatacactgtacatgcatgtactggctagttttgtgtcaacttgacacagctggagttatcacagagaaaggagcatcagttgaggaaatgcctccatgagatccaactgtaaggcattttctcaattagtgatcaagagggaaaggccccttgtgggtggtgccatctctgggctggtagtcctgggttctataaaaaagcaggctgagcaagccaggggaagcaagccagtaaagaacatccctccatggcctctacatcagctcctgcttcctgacctgcttgagttctagtcctgacttcctttggtgatgaacagcagtatggaagtgtaagctgaataaaccctttcctccccaacttgcttcttggtcatggtgtttgtgcaggaatagaaaccctgactaagacaatgcacaaaatttcataagaacaaattaatgtttttagatatctagtgactttcctgccagatatccttgatgtggcctcatcgtctctcctaacatttctctttatcatgtcactgactgtgtctccctcaagcatctggtagctctatggatgacactttaatttacatgtctgacatgcactgaaagctcttgttcagggtcacagcctcacctcccgtgtctagtcgcctgtgactacgacttgtaaaaagattccctttatttttcagtttctctcagcaacttgtgagcagctaggatgtggtagcacttaacccacagcttcaacacagttatatttaaccactaattcaattcagaatgcaggataagtgtatttgactagatttccagctactcaggctaagatcagagaactacaaaagacagtagagagttcaaagacagcccaggccacaccacagatccagttaaaatcagagttccaggggaactctgaattattgtttctttatcctggctgcccattagaatcacatcaggaactttaaaaaatatatttactattgattgttacaccaattttgatttcctgatctttgcctaaatagaaattttgttttttcatttcctaaggggctaattgtacacaaagaaccaagaatcattgtcttacctcaggtttactgggtgctgagtacaaatgttgtgccaggtagcgtttgtgaacccctaaagtccataaaggagtcaattccgatgcaatcgaattagagtctattcaagcactagtttaggccacaccactgtctctaacggaggagaactggggggacatccttaaattttagtttcaggcaagcatttatagagacaagaagggggtatctagcctggtacacatctgattggggggccattgtggcctttaacataattggcttaacctatgtttttttcctgattagtggtggttaggaagtgaagtgtcagaggcaggcttttaacctgggggtgtagatttgttgaggaatgatctggaaactggtgctagacgcaggtcttgttggggtcccccaacctgggaaatggtgctaggtactggcctgttaattaacttgagttcaatcttaggtcaggttatctaagatggagtttgaacccaaaagatttggtctcagtaaggttgactgagctgtgtgtgacaggctggcttaggctgtggcacacagtagaagggtgtgttagcatcacttcattagcacatttactttgtaatggcagaccccatgctttatttgaagagcatacacaaatggcctttgaaaatcatgagacctgctcggttcttaaaatgaatcagatgtgtgagctgctgtggtctcgtggttagaagtgcagactgtggggatgcttctggggttatctgctcgtctgttccccacttacatgaccttaagagagtcgcttgggcctcatcttggagttgacacctgctgcaacttcacagaaagaccaacaagttagtctcattttaaaaagaatctttttagaaagtcgtaaatcactgacttgtgtttgggaccggctggggtctgcaagagaatggtacatttctacagcccactgtgaagtggctgaatgacactcggctctaacctctctgtgtttgtttccttgtcgggtcagcaaaagtagcgtgcagcagttgccacagcacatggcctaacctgtgttatcttatagaaaggaggaggctctgcagcatggtgactttctggacttttagcccagctgattgttgttttcttgtggggaggaagtctgatccacaggctagacaaatgtttgtgggctccctccctgttagcattagactttctgtctctgttcaagaagcaacacagtaaagggagttgaaggtgcaggccagtggcacacttgtaaccccagtactcaggaggcagaggcaggcagatctctgagttccagaccagcctgggctacatagagactgaccctgtctcaagaaggaaaaagaaaagaaaaaaaaagtaagtttatgttaaatatgaaacctaaaatttgaaattccaactatttatattctgaagagccctaaatatacaggcaggattccttctgaaaaacatatacctgatttctttttcatttctgaggaagatgttttgcataacatctggggtttctgtgagccctcggctttctgaagacatggcatcttgagcttctgtgttctgggtcacagggagccagtgttttgtttctttgagtgtgagtatagggtgataaggacagatattccggttagtcctctgtcatttagttctggagagaagggtagatcctggctcagtttttagaacaagatagtctggtgctgagtcacatttgagaactctaacttctttagagtgccacagttaaacttgctttagatttttaccagcaccattcttagtgaagcacttcagccaagcatcatgcctgtaacccagcattcacgaggccaaggcaggagactgagctttgtagtgagaccctatctcattttaaatgtaggtaaacctatgaaacctaagactttctttgctttcatttgagtctgttcccatagactgtcaggtattgtacttgttatttaggacttaaaaatagggtcttatcctgaacccaggctagcttagaacttgtggtagtcctcataccccagcctcaaaaatgctgggatcacagatgtgagcctccacttcaggcttcatgtatctatttacattgctggcatgataagcacagaatatataaacatagtctgtctttattttaggcagaaaattccctcataccccctccttcctagctctaagagaagataggaggggcaagggatatagtcactgtatcttcatggcctttgtgcctggtgagcaacagagtggattcccaccctgcagcagaactctgtatgaacccagtaatttctcaaatctgataggttaaagtgtggctttttgtttcctgtccttcctccacccataaccatactgtgctttctggtgacatttactctcacagaccttgtcacagctctttcttcacttagatcacttgtacgtgagggagatggttgtccagtaccatttgcaacagcccacctgctctcagaaaactccctaggagacagtgctcctgcttcagtgttgagggtggagttctgggatatcactgatgcaggtgccctagatgtttaagaagtgatcattcagaccaccgtgatctacagtgttctaggagtttccaagtggaggccctggtgctttaatgtggtgccatgactgccgcggtaggaatcggaaaggaggagagcactgaaaatcctagcctgctactgactttcactgccgtacagatggataacacagcattgaatctgctatttaattctaattgttcaataaaccaaaacttggactctttatgtggctctctgtctggggacaggatgcaaacccagaccgctgggtcttctgagtctcagtgagccattttcacagctccgagtccttgactctaatgttctatcaaagatccctcagtagtcatgcccatactttgaagctcttcctagcactgcacatagttcctgttaagcaggtgttagaacaacaaatggcctgtcctaacctgacgtgttctctccgtttgatgtgtaacatatgtggagcagtgggctaaagggcgtgtcagggggatgctgtctgacacttggctttgctttgttgtttgccacacagtaaagaaccagcttcagatgtccctgtgttttccctggagtctccctgagaagtctcttcctgcttttgattttataggttaatgagtttgcagtacctgttttcttcgaagtgtcacctgcagtcctgctactgtcccctctgccctcacagactttatgtattaacttttaaaacattcactgctatccacattctctaccagtgactttaaagatagaaaacacattgtcaaatatcaactctgatgtgttgctatatcttaagaagtttttcagttcattgttttctttggtatccactattagaagtttgaaggttaaaatagttacttcagttctttcaatgcgtgatgggttttttttttaattttttattaggtattttcttcatttacatttcaaatgctatcccaaaagtcccccatacccttcccccccaccactcccctacccactcactcccacttcttggccctgggcgttcccctgtactggggcatataaagtttgcaagaccaaggggcctcttcccaatgatggccgactaggccatcttctgatacatatgcagctagagacacaagctttgggggtactggttagttcatattgttgttctacctatagggttgcagaccatgatgggttatttttaatgaaaaagattgaacaggataatttaaactgagggtagagcacatacctgtattcttgggaagctgaggcagaaagatcacttgagtcctggaatcagaattagtctgggcaacgtagcctatgtcaaaaaggagagaaaatatatacatgggcctagaaagtcggtttaacaaaagtggggtaagcacttgataagatcctgcaggtgtacttcacagataacttagaagtgcttcctctttgttcattccctagttcagtctttgggtttgttgtagttttgaagtagtgactttagacagtctctgtattctgaggcgctctgtttcactgtgtccagaagctcaatggcagcacaaacgaagcaggggttgaaataggagtagatccatggcaccagatggatgaccatgaaaggaaggtaaagccaggccatggtggcatacaacaggaatcactgcaaaggcaggtagatctctgagttcaaggccagctaggtctacagagtgagttctgggacagccagggctacacagagaaaccatgtcttgaaaatcaaaaaagaatgagatggggtggaggagaggaaaagaaggataaagaaacaagaaaaggaaaactcttaaagagattcagttatatatgaggaatggtgtttataaagtataagatttgtttacccttacagtatgccacacatggaaatgccatgtgtctatcccaggagtcaaaaaggtatcttgtggggaaaaaaaaagacaaaatcactacattaaaacagagtctaagagctgggcatagtggtgcatgcctttaatcccagaaacagatgcaagagaatcacttaagcctgggagtttgggtctagcctgagtaacatagttggttcatggttattattctttttggagccagttggttgctctgttggctggttttaggacaggaagtaagttaaaaattacagacacttagctctgattcctcttgacagaatcttcacttcccatgaggcagtcccggcaggaacaaaggtgttctagagacacttgtcccctccctttgctgtactgctgaaacaacaccccaccaccaccaccaccaccccccacaagaagtaagctaattgtcatcaaaggtccatgttataggtctgtagtcacttaacatttctcttagacactaggatggggaagaaatattttcaaaggaaaatattaaggttcctccatctacactcccttctgcctatcaaccacttacaactttatttgtagttctctgaagaaggtatgcaccaccacaccctccatagccactgacttccatgtgcctacgtcctcctgcttcagctctgtcttagtagtctttgcaggctttctcgggagtcattgtctacacacaggtgtaatttgatttcaaccattccatttgtatgccttttgtttttttttttttctctaattgctctcagtatttcttgtggaagtacactgaataggcacccttgtcccattgttcttagaggaaaggacttcagattttagcttttattatgttaaagtagctatttagtatttttattatgaagggatatggcatttcttcccatgctatttctttgactgaaatcatagtttttatccttcattctgttgatgtgatgtcttatttactaactggggtgttggatcatctttgcatccataagataaaactaaatcatgatgaatgattttgatattctatttaatttgttaaatactcttgcatgtttatgatactctaccccaaccctatgcagtttgctttaaagatgaggaggatctcagaataaacttgcatcccttcactttccattctgtgcaatcattggttctcattccttaagatacataaaattcaactgtgaagccatctactcctaggcttttctgttaggaagcttattagtaattcacatttattatgggacttgctattggtttatttgtcctcagagttgagtgttgttagatcacatgtgtccatttgtaatataccttccagtttaacagacttttcagtgtctctgagactttgtatttctgtggcattagtggtaatatgtccctttgtatctctggttttatttggagcttctatttttctttgccaagtctaagtaaaagtttattcatatcttttcaaagaaccaaccatgtgtcatgatctgttgtataattttttcagcacccccccacacacacacacacatttttatctgccctgatatgtcttttttctccttccacaaatactggggtttgctggtgttgaagacctgtgtcatgtgggcactagttgctagataaacatccttcttggtattgcctttgctgaatcccacaagttttagcatgtagtttccattttcatattaaagaagaagttgaattcctgagctggatgggggcggtgctggagtggctgggaataggacgggtgggggactgcagtggagatgtaatatatgagagaagaagaaaagcaaaaaatcttagcactgggagtggaacttgtctagcatgtacaaagctttgagttcagttcacataagcacattaaaggttttctaatacaataagaatcttacttactgattacatttcgatgagaattaaattttccattacatttagtcagtctttagagaaatgtatcagaagtgttttgaggaaaacatgcaattggtgttaaatactttatgatatatgatttatttaaatttaaaattaaaaagttacatcccaaatggtaaacttgctttttgtcttttcccccctcgggtggtataatccaaacattctatatagatgtaaaaaaaaaaaaaaagaccacacacacacttgcatttacttttctcctaagagtttttgctggcataacaagtatgttactaggcacagatgtgtagacgtttttttctcagtgacagtgtttgttggtccctcaggctgagacttctgtcttagtaaagcctttctctataggaatgttatctgcaaggtgaagatgagtgtcctgcggtccatcttatttcttcatacacattactattattggtttcagattgacaccgattcttggcattcagaagcattctccgaaaaatgtggtttttacacagtttatagccaccctgctgacagaattgcatttaaaattcgaagatcttgaaaaattaaccatgatatttagaaccagctgctagctaacaagaatggtaagttgcattgtatctctgtttggttacctgtgagagcttctgattcatgctcaagtgttctccccctgaactgtgtccagccataagtttaaaatttcaaaagccaagtgcaaacctcaagttaacttgctctgcagctctgactctggttcttgcattctgggacatcccccttgtcccacctgggaagtgtttctccaggaaatagcagctcactgcaatagacagcattgcatgcacctcttcctagcagcgtccctgttagctcagtacaggcaagtggcaaatctgcatagctggctttcttgacttttatcactgcttccagagacactccagtcttttgcctcttgcaagctggccatcagaatgtccctggactgtacttcttcctgttttttcatttcacatgcccccttcttgtgctcagataaattcaaaattaaaagaatttatcctaatttttttaattaactcaaaattttctttattgtaaaaaaaaaaaaaccaaacaacacagaaatacacatatgtaataagaatagaaagtcttccttacctctgcttccagtccccaaaacatgcttgttctgatcagtttttttccctcatcaatttttttttcaatttgccaagctgtgactgtttattaactaaccagattacagaagtaccacagatgaacgaaggtgttgcccataattatttattcatttactttacatctcagtaactacaccacctcccagtcccttgcctcaaatagtccctcctccctcctcttgtcctctgagagagtggaggaagccttgggtatccctccatcctggctaggtgcatcctctcccactgaggccaaacagggcagctcaattaggggaagaggatccacaggcaggcaactgatttagggacatctcctgctccagtgttaggggacccacatgaagaccaagcgatacatttgctacatatgtgccaggaggtgtaggtccatgctctttgtttggtagtttagtctgtgagagtccccaagggtccaggtaaattaaattaactcttactgtggtgtttatatcatttttatatttgattatattacattactgtgtggagatcagaggacacctttttggagtaggttttctcctcctaccatgtgattcccagagattgaactcaggttgttcaatcttaatggtgatttgcctgagtagccatctcaaaagcaattacatgacttcctcctctcaaattcatgacctctttttttattgttgtataatcactcacatacatacatacatacaacctgctggattcatttagggttgcttgtatgtatatgctttcagggctgactacttgatattggataaccagttgagaggctcatccttggagaggactagttccttcgttctctccctccctctctgggatccctctcaacagtgtctttccccttctgtgttagcatgtctattgctgctgcctttattctggtcttctttaggcagccatattgttgaagaatcatggttgaagctgcaccgttatttctagtagatacaatccctcctggtcttccagcttctatcacctccccatgccttcttccaagatgttccctgagccttgctcaggagttgtattggtggtatatctgggctaggcaccccatagtgcattgcttgttgaactttgagtacttggggttttctttactggtttccatctactgcaaagaaaagtttctttggtgaggaatgagacactatacttatgtatgagtagaagtatttaggatgtatttagggaccatgttggtttagtaaagtagcagtaatatgttctcctgtaagatcatggcctcactaaccctgggtagttggctaggtttcagctaacagacacttagattgcttgagttttgtagctattgtgaatacagtgacagtgagcatggctgaacaagtaagtatctgtggagcaggatgtagaattctttgagcatatgcaaggagtggtacatttatttttaccttttttcagaaatctccacactgatttctgctcactttgcaatcccaccaacagtgaataaaggttcccctttccctacatcccttccagaacttgttttgttgatctttgcaattctgactggggtaagatgaaatctcaaagttgttttatttgcatttctgtaattgcaaagaagaggtttttcttagccatttttatttcttctgtgagaagaactctattcagatccatagcccatcctttgaatgggcctttgttgtttggtggtggcggtggttgtggttttagtcctttatactatcagatgtgtagctggcatgaattctcccccattctgtgggatttctcttcacctatgccttcgtttcctaggcaaatagaatcctattgttttactgacatgtatcgaaagatagccctgtaatttcttctaccagtttcaggtttcacggttaggtctttgatccatttggggttaatttttgtgtgagatgataggtatgggcctaaacatgtgaaccttatcttggaaatgctttttgtcatctttgtcaaatattaagtggctgagttacatgtccttatgtttgagtctctgattttgtcccactgaactatgtcttcttgtgtgccaggaccactttatttgattaccatggctctgaaatacaccttggagtctggaacggtaatctgtgcaccactggtctttatgatcaggattgttttggctaactggggtattgtgtggaccctatcactgtgattgagattacattgaatctgtagatagcttttgatagaatggtaattttcacaatgttaattctaacaatccatgaacataggatatctttccattatctaatggtcttttatctctttcttcagaaatttaaagtattcatttcatttaaattcactgaaatttttatttattcctagatattttctttaaggctattgtgaactggtatgtggtatctttctctgtttgttggtgtatttttaaaagctattgatttgtgcaagttgattctgtattccgctactttgctgaaattgttgattattttgtagggaatgtatagtggtcatggcatctcttagcataagatcatgtcttctgcaaacagggatgcttttgacttctttccttgtttatatccctttaatttctttatcttgctgtaagtccatcagtgtaattaattcattgacttgtatatgttgaaccagctctgcatctcccagataaagctaatttggttatggtgggtaatctgtttaggttgtctgtatttggttcgcaagttattttgttgaggatttttgaatcagtatcatctgaaatattgacctataattttctactatttccatatctggtcatggttttattattagggtaatactagcttccttgatggaattttgtatgtgtttccctgttcatttctaattctattcatttacttaattaagggtctatggcgcttgtttatctactcagagaactagcttttagattcatactattgttttctttgtttctattttcttgccatccatgggatttaggtttggtttgtccttgctccaaattcttgagttgcatcaagtcatttatgtgtgttctttctgatactcttttaaactcagaactataaattttcttcataggactactttcaatgtatccagaggttctgttgttttttgttttgttttgttgtttcatttagcttcagtcattttcttttatttcttctctgaaccactcatcatttagtaatgagttgtttaatcttagtgtttgctgttgattttaagttttacagcataatggccagaaaggatacaacctttctgaatttggtaagacttacttgtatcccaggatggggtctgttttaggtacacttctataggctgctgagaggaatgattagtttccagtgtttgagtagaatattctatagatacctgctgagaagtccatttgacgcatgacattaattaatctgatgtttctctgattattttttgttcaagtgtggtattgaaatcactattaatggattgatgttaatgggtggttttgtgtgtttgttttgccagatgtcaggattgcagtacttcttgcttcctggtcccattagattgaagtactgttttccattcttttactctaatgtggggcctcaaaaacaacagaaagatggattttgtttcttattctttcagccagcctgtgttgtgtgtgttgtttacagacatgtcgttttctctcacactcctcatgcttcactcactctctttctgcagtatcttggctgtgcttcttcagtctgaagtattacatccagtatcctttgtgggcttggtctattggatatgaattccttcagactgtttggatcatggaaagtttttttttcttcaactacagcagataattttgtttagtttatgttacttgtggctttttcaactttcaatatttttctttgttctgcattatttggtggtttaaccatgattatactgtaaagagtttatttggtgttctgtgtgcttcttgtatctttatagacgtgtgtgttggcttaggatgctccttcctaatctatacctataatttgaaggtttagttttgtcaaggtatcccaaagttcttccatattcctttcatgtgcttttaaaaataaaataatcttttccctgtcaaaaaaaaaaaaaaaaaaggtttttccttagggaggtaagctcagattggcttgtataagcatcactttcaaaaatctttaaaaatacagtttgcagcaggaactccggcagaatgatagggacactaacccacccacaaaactttcgaccgaaaatgtatcctgtctacaagaaaagcagggatggagcagagactgagggaatggccaaccaataactggcccaacttgagacccatcacatggacaagcaccaatccctgacactgtgggtctcagaggagataggaacacaacagaaagaccagcagagtcaactaacctggaccctggggatctcagagactgaaccaccaaccaaagagcaaacagagctggaccctcagcataagtcgggaaggagtaactgtccacttcctaatatttggtttttctaacagatttgataatgcattgcctgaagtcactccctcttttccccatggtgtagagcccagggcttcacacactaacctagtacctcaccaccgagctccatccacttctagactgttcttgctttcctgccaaggtacctaggcaccccgcacagatgtagcagtgtgcatgtgaatcctgcacaactagagcaggggctatcccatgtgtgtgggatatgttcttctagctctggccttagtgggagaggatgcacctagccctgcagagacttgatgaaccaggattggggggaaaggattgtaggagggggtgactgggaggagggacagtaaacaggatgtaaagtgaataaataaaaattaaatggtcagtttggaaatttaaatccatttgtcagtttgtcttagccatgttgattggtaggaattcttatcagacatacttgaaaacgcataatgcctaattagaagtcattctggacctcctttaatggataccagttaaaaggcacttaattagcatattttaaatgtgtatagacagatggtattcaagtggcttacagactttcaaggatagatgtttcatgtagactttatgcacattgctcatatgccccatactttgtcaaattacaaaggattatgaatgaccaaaaaccatattacttttcttatatagatttttttttctgcttgcatggttggtttttattaaccatgggatattgagtgtaaaaattttaacaggaaggcataagaagagagaaactgatcttagcactagaagatcacttaagacttgctctgggatggactatgaacaaggtctcttccaagcaaacaactataggacatgataatgatccagaagagatggaaccttataatgactgtgtagatattaaaatattttaggtgttttatccgaagtttgtttgtttcccagatgtaactgaggaagacagaagaggaatgctcctcaccaggcctggtgttttcgccagtgagagtccatgggtgactgatgactaagtgtgtaacttcctcagacacagacaagccattaccccagcaagaaggaagctcttacatccagaacctcagaacacaggatttgaggggaaaatgaagtcttaaactgaaatttgaatggatattggggaaaatgtaattacctttattctttttgattggttaccaccaacacaaccaaaacttaagaaaatggtaattgtggcctattgtaaactctgtcatacaaataacagcaaagttaggtcaataaatgtgatcgtcagtgaagccactttttcagaagctgacattgctgactgccgagctctaaggtcttaccagaaccctcctgtgaggcaactactaccccacttggtaccaagacatccctgtcttcctccatggttagcctggtgactacccctaagctcctctttcacaccttctctccaacctgtcaaatctggccagggtctcccagcctagtctgactaaccccaactattcccatctacacagtagtgaatctcttggtttccacagtatcccacatcttgcctaactgaccacttccacctaacgacatagccagggcttctgataggacctattctatctgcaaccacccacagataactccgacacaactttgaaccatcctacttgatagcctgatgccccacatatccaaggactattgtgggtcctacagccaatctctagacttacaccaggacctgctccaaccacccacaagacctttctgagaagcttcaccttggtacccagactttccacatcctcctcccaggttctaaccaagtaagttaccctgacctccctcccatccatgcctttctacaactggtcaaatctagcctgggtccataaccagtgtaccagcatagtctggcctaccttacctgcactgcaaaggagctctaggtttggggcactggggtaagatcttccttaccagtccttcaaactataggactctcccaggccacagtcaaccttttcacacagctaaatctactcctagcctacacgctttgaaaaggaaacactgtgtatgccagcctagtctcctctgtctacttgacttcaatccacctgttttcaaactaaagacccaatccttctaaactccttttctgctccatcctgctctgcccataacaaaatcaaaactaagaaaagaaatccacatgcccacatctcatcccaagaatacaaacatgagaaatcaagtcattctcttctctccaaatcctatcagtcctgtaagaatatttgcctgtaagaattacttaggtaaaactccaggacagacacagaagttagaagaagttaataataaacttcatcaaagaattcaaggagtttaaatatgatacaaagaaacagctcagtgaatcaaggagaaagagccaaggagaataaatactgagtgatgcccaaggaaacaaacataagctgatggaaatgacaaagagagtctgagatttgaggatgaaatttaattgggagacataaatgctgaagagaactcatttaaccaaatgagttaacttcctttaaccaaatgaagatggaattttaaaaaatatctcaattaggaaacacaaagccttacacaatcaatcaatcagatcaaatatcaagtctcaaagtagagaatctagaccagattagtacagaatatgaaaaaaattttacaaggtaggaaaggaacacataggttatgtggacaccaaacaaaaacctttgaaatctaagctgagggaaataaccccaagtcagtgacatgtccagatcttacacaataccatagaagaaaatgtccccaaactaaggaaggaaagacacactcaaacagatacgaaaacacagaacaccaaataaacaagaccaggaaagaaagccctatgaaaagcgtattgaaagctggaggagaaaagccgcaagtcacatataaaggaaaatctatcagaataactgctgatttctcagtggaaactctgaaagccagaggaccctgaagcaatacagactcctaaaggacgatgatggccaaatgggactaaaatatgcccagcaaaactgccctgttatgattgaaggagaatgaaaacctttccatgatggtaaacaacctaaaattcctgtacaacaaaacaaacctaaggcaaatacaggaagcacactgaaaaggaatgagcataacagagactacaggaagaaacactacagaaagagccatgattattaagccttattaccactgagaacacaacactacagttaactcactcatgtcagtaagaactttaagtactaagagcttcagttctccaatcaaaagacacagactgaatagatcaagagaacatcatcctatctgctgcctacaagaaacacatctagttttaaagatggtcactgccttagagataaaaggatgagcaaaagtgctccaatcgaatggggtcaggaagcaatcaggcattgctaacctagtatctgatgaaacaagacttcaaactaatttgaagagataaagagctactctttataatcaagggagtgttaaccaacaagacattactatcctaagcatgaatgaaccaaactctagaacctccaattttgtattttaaaaaaaggaaaacctactagtgtatttaaagacacagattaacttcaatccatttgtaaaaggtgatcttaataccttactttttccaaaagacaggtcatctgaacaaaaaaattaaaggaacatcagaatttaatagatatcgtacaccaaattgacttaacatatatctacagaataatccacccaatcaccaaagaatacacattatactcagcagcacaaggaagcatttctaaaatgaaccacatccttgaacacaaaacaaatctacaaattcaaataagattgagagcactcctggaatcctatctaaccacaatccaataaaaaaatttaaacatttttttaaaatctagtaaatatacaggctcatggagatcactgctgcatgatgactggaacaaagaaaacaaaaaacaaaaaaggaggaaaagctttctggaactaaataaaaataaaacctctggaacacgctgtcctatgatgaaaactcatagcactaaagcagaaaagccacaaataatggcctagtgttacgagtcaagaattcagataaaacaagaataaactaaatccaagcccagtcaagacaagaaataacaattttttaaaaagcagggtagagactaaagaaataaaaacaagacaatacaaagactcaataaacctaaaagatgctctttgagaagacaatactgacaggcctttagactaactataaaaaagcaaggacccaaattaacagaataagaaatgaacttggaaacattacaacagacacaaaaggaattcagcatagtattggggagatgaaaaaggaaaacttgtactccattaaactggaaagcctaaaagaaatggatgaatttctagattcacccaagccaaaatcaaatccaaaagaagtgaagaactgagggaagcaggaggctccctgcaggtcttcttcaccttgtcctcctctcccccaaacccaatcccacagtcccatcccagctctagagcagaacacttgctgtgcacccccccccctttctctctgccctcacctccagggcctcacacagatctccaaactttcttctacctacttatcccattattcaaatctcaactccagcaggcattccatgagaatctgtgggcaattccctagtcagggaagcaggcagcctgtagatcatcttcacctctccttcctctcctccaaatccaagcacctagtgtcacctcccaaatctatggcagaacacctgctgtggcctcgccctctcctttgtccccatctccagtggatcacacagattttctccaaccttcaaacccacccgtcccactatcccagccaccaactacagcaggcattccctggaaaccctccagccaagcctgccagagtttcaagcaagcaggccagtgaagcaggtaggtgagcttcagatcttcactcctcccctcctccatatcaaatccctagtctcattcccaactctgtagcagacaactgttcctggcctctccttattctctgcctccattcctaagggactatgcagatccttgtgcctgctttcctccctcctatggacccctaaacaccttctcctagctcatccccatccctaaatgtccactcccaataactaaaaccaaatttatacaatacccccaggaacctcacttagtaggaccccacaagaatttcctaccaagcaacacacaatcactacaccctcctaagaaccagaaaaggcaataaaacaaaaacccaccaacgaccaggtatcgtcacttagaattacaaacttcctaaatccagattcctagacactagtataaaaacacaatcaattacatccacgacactatgtctccactatcattcagcaaccccgagaactgcaacagagcagaaacaaagaccttaaaatagtcttttaaatatgatagatctggtactttactcaatgcataacatttactaaagttaaatcaaaatcagataaacaatttaaacagacctatgctcccccacgtgaaatagaagcagtcattaaaagtctaccaataaaaaaaaaaaaagtgccagacaggtttagtgcggaattctaccagatttaaaaaaaaaaaaaaaaagagttaatcttgatattctttaaattgttccacaaaatagaaacaaaagaaacattgcccaatttgatttatgaggccagagttaccctaatacctaaactacataaagattcaacaaagaattacaaaccaatctaccttataaacagatacaaaaattctcaataaaatacaaactgaatctaagatcccatcaaaaacttaatccaccatgaatatgtaggcttcaccccagagatgcaaggatgattcaacacatataaatcaataaatgtaatccaccctataaacagactgaaagaaaaactacatgatcatctcattagatgaagaaaaagcctttaacaaaacccaacacctcttcataacaaaagtcctagagagattagggatgcaagggacatacctcaaaataataatggcaatttacagcaagctcattgccaatgtcaacttaaattgaagagaaattcatggtaattccctaaaatcaggaacaagacaaatttgtccattcgttccatagttattcaatataatacttgaagtcttagctactacagtaataagataattgaaggagatcaaggggatacaaattggaaaagccaaaggatgtttatgtacagattataaaatggtatacataagtgaccctaaaaatttcaccaggaaaattcctacaacaaagtagctggatacaaaattaacttttaaaatcagtagctttcctatatacaaaggacaaatggactgagcaagcaatcagggaaacaactcctttcacagaagcctcaaatgaagtaaactatcttgagatgaataagctgtagccaagtgagggaaagacttgtattataaagactttaagacattgaagaaagtaaataagatatccaaaaacggaaagatctcctgttgcggaaccttgctattaaggtagcaatcagccatgacagaatggctttctgagcttgaccaaaagtggggggctccttttctcagtggggcttccctgtctctttgtctggagaatgtccctgaatgcaggtggctggcctcgtctgaaaagtaaccttgtgcagagatctctgcaaggctgtgtgacacaccacacatgttccccctctggattcctacctgcatgataattaggaactgtactatagccaatcagccattcttgctcacttgatgctatggccaattagctctacctctacccctaaaaaagtccttctataccctatccctgaaacaataaagtatactatactcgtctctctgtaactgtctccataggtcattctgtccacacacaagtctggccagccaaacactactctcagcctctgcctcctgttgaagaaatcccctcaggctggtggccaacaggctacagggagaaagggggggaccacaatctcccacactcatggattggtaggactaatttagtaaaaataactatcccagattcaatgtaatccccatcaaaattccaacacaattctttataaatcttgaaagaacaattttcagcttcatagggaaacacacacacactaaaacaatcctaaataataaaagaactgctagaggtatcaccatccctaacctcaaattttactatggagctatagtaataaaaactgcacagaactagcacaaaaacagacatgttaatctgtgagattgaactgaaaacccagacataaattcacacacctatgaacatctaatatttgataaagaagccagaaacccaaaaaatggggggtaaaatattatcttcaacaaatgctgattaaactggttggctgcatgtagaaaaaaatccaaatagatccatacttttcaccctgtacaaaactcaattccaaatggatcaaagatctaaacataagtccagatacactgaactggacagataagaaagtagagaatagcaaactcaagggcacaggacaagactttctggacagatcaaggttagccactaagatctacaaagacaccatcatttggacaaagccacagcctacagaatggaaaaagacttttaccaactacatatctgataaagggctaatatccaaaatatatgaagaattcaaaaaactaggtatcaagaaaacaaatccaaaaaaggacaaactgactacataaactaatgaggaaaatttttaaaaatggttagggcaaaaacaatcacaagagctcctttgggggagggggggggacttggtaagtgatgataacatttagagaaaatgtaacagcctaaaatagacaaaaagttagaaataaccatttttcttcatgtttgagatgggttcttatatggcccaaactaacttcaaactcctgacaggctcaaaggaaccaaaggcagcttaaaagagatggctgcacacttgtgtttatcacagtgagattcactccagcaagtaagtgtctgtcatcaacgtatggacttaaaagggtgaggtagagtaaatggttgatggatgatagataggaagatatggagtattatttagtcagtaagaaaaaatggattggtattccaggtctctcagagaccagtcctcgcaggagagtgctcagatctcagaagcaacatagcttcttcaatagggtcgcttagggccttcatcttcagccaggagacagagctgagtctagacctcccctgcaagaggagaccttgcctgcagagaatgctctgaccactgagactcgggagagttggactcccaggagtgctgacagaggctaaaagaatcacaggaggaacaagctccagccagagacagctagaacatctaacaccagagatttccagatggcaaaaggcaaacgtaagaatcttactaacagaaaccaagaacactcagcgttatcagaacccagtactcccaccacagcaagtcctggttaccccaacacacctgaaaagcaagactcggatttaaaatcatatctcatgatgctggtagaggattttaagaagggcattaataactcacttaaagaaatagaggagaacacggctaaacaggtagaagtccttaaagaggaagcacaaaagtcctcaaagaattacaggaaaacactgctaaagaggtagaaatctttaaagaagaaacacaaaattcccttaaagaattacaggaaaacactgctaaagaggtagaaatctttaaagaagaaacacaaaattcccttaaagaattataggaaaacacaaccaaacaggtgatggaattgaacaaaaccatccaagttctaaaaatggaagtagaaacaataaagaaaacccaaagggagactaatctggagatagaaaccctaggaaagaaatcaggaactttagatgcaagcatcagcaacagaatacaagagatggaagagagaatctcaggtgcaaaagattccatagagaacatgggcaaaacaatcaaagaaaatgcaaaatgcaaaatacaaaaagatcctaactcaaaacatccaggaaatccaggacacaatgagaagaccaaacctacggataataggtataggtgagaatgaagatttttcaacttaaaagggccagtaaatatcttcaacaaaattatagaagaaaacttccctaacctaaagaaagagatgcctatgaacatacaagaagcctacagaattccaaacagactggaccagaaaagaaattcctcccaacacataataatcagaacaacaaatgcactaaataaagatagaatattaaaagcagtaaggaaaaaaggtcaagtaacatataaaggcagacttattagaattacaccagacttctcaccagagactatgaaagccagaagatcctggacaaatgttatacagaccctaagacaacacaaatgctagcccaggctactatacccagcaaaactctcaattaccatagatggagaaaccaaagtattccatgacaaaaccaaattaccacagtatctttccatgaatccagcccttcaaaggataataaagggaaaacaccaactcaaggagggaatttacgccgtagagaaagcaagaaagtaatccttcaacaaacctaaaagatagccacaagaacagaatctcaactctaacaacaaaaataacaggaagcaacaattagttttccttaatatctcttattatcagtggactcaattctccaataaaaagacatagactaacagactggctacataagcaggacccaacattttgctgcttacataaaacacacctcagggacaaagacagacactacctcagagtaaaaggctgtaaaacaattttccaagcaaatggtctgaataaacaaggtggagtagccattctaatatcaaataaaatcgacttccaacccaaagttatcaaaaaaagacaaggtggggcacttcatactcatcaaaggtaaaatcttccaagatgaactctcaattctgaatatgctccaaatgcaagggcagccacattcattaaagaaactataataaagctcaaagcacacattgcacctcacacaataacagtgggagattcaacaccccactcgcaacaatggacagatcctggaaacagaaactaaacacagacatattgaaactaaaagttatgaaagaaatggatctaacaaatatctacagaacattttatcctaaaacaaaaggatatatcttcttctcagcacctcattgtaccttctccaaaactgaccatataatcggtaacaaaacaggcctcaacagatacaaaaatattgaaattgtcccatgcatcctatcagatcaccacgaagtaaggctgatcttcaataacagcataaataatagaaagccaacattcacatggaagctgaacaatactctactccatgataccttggtcaaggaagaaataaataaagaaattaaagactttttagagtttaatgaaaatgaagccacaacatacccaaacttatgggacacaatgaaggcagtcctaagaggaaaactcatagccctgaggtgcctccaaaaagaaaccagagagagcatacactagcagcctgacagcacacctggaagctctagaactaaaggaaccaaattcacccaagaggaatagacggcaggaaataatcaaactcaggactgaaatcaaccaagtggaaacaaaaagaactacaattcaaagaatcaaccaaatcaggagctgcttctttgagaaagtcaacaagatagataaacccttagccagactcacagggcacagggacagcatcctaattaacaaaatcagaaatgaaaagagagacataacaacagaacctgaggaaatccaaaacatcatcagatcctactacaaaaggctatactcaacaaaactggaaaacgtggatgaaatggacaacttcctagacagataccaggtaccaaagctaaatcaggatcagattaacgatctaaacagtcccatttcctctaatagtagtagttatcaatagtctcccaaccaaaaaaagcccaggaccagatgggtttagtgcagagttctatcagaccttcaaagaagacctaattccaactctcctcaaactattccacaaaatagaaacagaaggtactctacccaattcattctatgaagccacaattactctgatacctaaaccacagaaagacccaacaaagaaagagaacttcagaccaatttcccttatgaatatcgatgcaaaaatactcaataaaattctcgctaactgaatccaagaacatattaaaatgatcatccatcatgatcaagtaggattcatgccagggatgcagggatggtttaatacacggaaatccatcaatgtgatagactatataaacaaactcaaaggaaaaaaaccacatgatcattgcattaaatgctgagaaagcatttgacaaaatccaacacccattcatgataaaagtcttggaaagatcaggaattcaaggcctagacataataaaagcaatatacagcaaaccagtagccaacatcaaagtaaatggagagacgcttgaagcaactaaaatcagggattagacaaggctgcccactttctccctacctattcaatatagtactcgatgtcctagccagaacaatcagacaacaagaggaaatcaagcagatacaaattggaaagggagaagtcaaaatatcactatttgcagatgatatgatagtatatataagggaccctaaaaattccaccagagaactcctaaacctaataaacagcttcagtgaagtagctggatataaaattaactcaaacaaatcagtggcctttctctacacaaaggataaacaggctgagaaagaaattagggaaacaacacctttcacaataatcacaatataaaataccttggtgtgactctaactaaggaagtgaaagatccatatgataagagcttcaagtctctcaagaaagaaatcaaagatctcagaagatagaaagatctcccatgctcatggattagcagaattaatatagtaaatatggctatcttgcagaaagcaatctacagattcaatgcaatccctatcaaaattccaactcaattcttcacagagttagaaagggcaatttgcaaattcatctggaataacaaaaaacctaggacagcaaaaactattctcaacaataaaagaacctctggttgaatcactatgcctgacctaaagctgtactacagagcaattgtgataaaaactgcatggtactggtacaccgacagacaggtagatcaatggaatagaattgaagacccagaaatgaacccacacacctatggtcacttgatctttgacaagggagttaaaaccatccagtggaaaaaagacagcattttcaacaaatggtgctggcacaactggcagttatcatgtagaagaatgcaaattgatccattcttatctccctgtacaaagctcaagtctaagtgaatcaaggaactccacataaaaccagagacactgaaacttatagaggagaaagtgggggaaagcctcgaagatatgggcacagagaaaaaattcctgaacagaacagcaatggcttgtgctgtaagattgagaatcaacaaatggaacctcataaaatcgcaaagcttctgtaagacaaaagacactgtcaataagacaaaaagaccaccaaaagattgggaaaggacctttaccaatcctaaatcagataggggactaatatccaatatatacaaagaattcaagaagctggactccagaaaatcaaataaccctatttaagaaatggggtacagagcaaaacaaagaattctcaactgaggaataccgaatggctgagaagcacctgaaaaaatgttcaacatccttaatcatcagggaaatgcaaatcgaacaaccctgagattccacctcataccagtcagaatggctaagatcaaatattcaggtgacagcagatgctggcgagaatgtggagaaagaggaacactcctccatgctggtgggattgcaagctgatacaaccactctggaaatcagtctgacggttcctcagaaaattgaacataggtactaccaaaagatccagcaatacctttcctgggcatatacccagaagatgttccaacttgtaataaggacacgtgctccactatgttcatagcagccttacttataatagccagaagctggaaaggacccagatgtccctcaacagaggaatggatacagaaaatgtggtacatttacacaatggtgtactactcgggtattaaaatcatgaatttatgaatttatgagattcctaggcaaatggatggatctggaggatatcatcctgagtgaggtaacccaatcacaaaagaacacacataatatgcactcactgataagcagatattagcccggaaacttagaatacccaagacacaatttgaaaaacacatgaaactcaagaagaaggaagactaaagtgtgatacttcattccttcttagaatggggaacaaaacacccatggaaggagttacagcaacaaactttggagctgagatggaaggatggaccatctagagactgccccacccagggatctatcccataaacaaccaccaaacccagacactattgcatatgccagcaagattttgctgacaggaccctgatatagctgtctcttgtgagcctaggccggggcctagcaaacacagaagtgtatgctcacagtcatctattggatggatcacagggcccccaatggaggagctagacaaagtacccaaggagctaaaggggtctgcaaccctataggaggaacaacaatatgaactaaccagtaccccctagagcttgtgtctctagttgcatatgtagcagaggatggcctagtcggccatcaatgggaggagaggcccttggtattgagaagattatatgccccagtacagaggaacgtcagggccaggaagcaggaatgggtgggttgagaagcagggcaaggggagggtataggggactttcgggatagcatttgaaacgtaaatgaagaaagtatctaatttttaaaaaaaattgaaaaaaaagaaagaaaatggaccatatctttactggaaagtgtgtggaactggaatcctcacagtgaagtgcagtaagtgagacccagaaagacaaatgctacattttctctgccatgcagtctagatttagatagagaggaaagtggaggttgaaaagagatgatttgagggcaagggagaaagcttgcagaacaagaaagttatagggtaaatatatcaaagcatgaatcatgtagaaaatgtcataattaaagccatattatatagtctaaatcactgttaaaattactatactgttacagtatttgtgttaccgcaattataatagtatagactgatagaagttagtagaataggagaatccagaaataaaaccacattttagtcaattgattttcaacaaagatgccaagaaagttctacgaggggaagatgaccttttcaacatacaacacaaggctattttcttatcagctacaagacagttgtaagccctcactaccaaacacaaaagtaaacacaaaatgggtcagagacatatatgctgaaattgcaaagcttttatggaagaagagaaagcataaactgtcttgggaaagagttcaaaaggtctctcaagtgaaacccacagatacatggccacaagagaccgtaccaaaacaagaaacttctgcaccaatgttttttaaaactcaccattgtgggattgagggtatggctcagttagcaagtgcttgcccagaaaacacagaaccctgagtgtgatcctcagcaccatataaaacaggcatagtggtgcacacctgcagtcctagcactctgaacacggaggcaggagaatcacaagttcaaggccatccttctctacacaggagttgaggctacatgagcccctcccagcgcgagcacacacacacacacacacacacacacacacacacccagaaaacctaccaacttctcctaggctaggtgcggatgtagctcagcagtagaatgcctgtctagcatattaaccaaacggaataatgtagaccgcttatgcttggtacagaaagaagaagttagtggacagaaacaatgaaactccaagtttgtcttcagcaagcctgagctagagctggagaaatggagattaagagcacttggtgcttgcagaagacccaagtttggttcctagctcctacatggtagctcatggccatctgtaactccagttccagggaatctgatgctgtcttctggcctcggtgggcaccaagcacgcacagacatacacaggcaaaacattcatacgcataagtcttttaaataaaagtaaatgcagatagttctgacagatatgactgtaaagaaatgctaaagatggaaacatgtgagggttatgaagactttgtcccagttttacaactttctgcagatagcaaacaagttttttgttttttgctttttaaaaaagatttatttattttatacatgagtacactgtagctgtcctcagacacaccagaagagggcatcagatcccattacaggtggttgtgagccaccatgtggctgctgggaattgaactcaggacctctggaagagcagtcagtgctcttaaccactgagccaagactctagcccagcaaacaaattcttaaacaacaaaaaggaccagacattagatgtaaaaccagtccctgctctgagaacttggatgccctgctgagggcacattccctgctccagccctaatttatacttattatctcagaaatatttttaattaaaagcactgccccttgtcccctcccccaaaagcgttttgctttggatacttgcttgtacagtcatgccacctaaaaggcacagattaaaaggtcccactctggtgaccagagatgacaagggatttctaaggcaagagagggtaggtcaagggtcatgatatgggagtcaaaaaatgaggatggagaggggtcagcccaggcatgagtattctcaggaggagagttggcagggtctgttagggccaattagtgtaggagctgactacaaggactagaactctctggacacaaggtattttcatttcaggcagatgagatggggtgtgtgaaaaaaaactacaaacttgggaaattaattttcttggtcccccccagacccaccctgccccttacattctcttcctgaggtttcctaaactttgatacacaccaaggtccagttcagccaacctaactcccaaaggaatcatgagatcccattagacaccaatctgcccctggtgagctctcaacctaggcaaggtccccgtgttagacccagcatcattcggccatgtggacttggagcctgactcgtctcttctccacaccttcacaccctgtcccctgtgtggcgtcattcttcactgttaaaaaaccgtgtggtcttcaacaatcatcacctccaggttttcttgtgaattcaagattgcagagaatagggagagagtttcaggaaccccccacttctctttcaggggaaaaaggcttttgttctgggtggttttgacagtgattttcactttccatctaaatacaatgacacaccagggacaatgcatgctgctcatatccagaccatgaggtgtttttaaaaaaaatttttttgaatattcccattcctgtgatattttcaaatttaaaaatcctgctagaagccaagtgtagtggcttatgcctgtagtccctgcactccagcaagcaaggtaggagagcatagctgtactgccagcctgggcaaatgtagagcaactagggctggagactggcccagcacaagagctcttccctacatataaaggacctgggcgaaggaaaggaatccaacactaaactcacatgaggccctttcttgggaagaacaaatgctctcaggcctcacctacttgctggagtctccacagttttagcatcttgtggcaactctgcccaacggtagttgctcttctgtcagggacaggatcacttttctaaggattcatggcagaaatagaggagtacaggtatctagaagcccacatctgctaggctggggacacctggaagaaaagaggggactttactctaaagtgtgcctagaagctgaagtctgaggtcagcattgtaactgccatccagactgggaaacacacactggtgtgtgcactcatcagaacccatagcagagcatccttgccattatcctctagcataacctggcggcagagactgattaaatgtcctggaaagacagcatgtgcaataaagttctttttccaaaggaagctagcaaagcggggacttctgaaaaccctcctgtctgtcctttcccccaggaaaaaatcttgtcttggaaaaccgattaccaatcgacctgtggatgaaagcaatgctggagacttcccatcagtgagccagccgcatccctggggtccaggaaggaaattccagttcaaggagggactagtttttagtttgtttcctagcaccttcgcagtcataaccaagcagagaatactgcatggtttcaaaagtcagccagccaccttacaacatcttcaggaaattctgcactcccttggggctttcgaaacccccccaatcttgcagaacagaagcaagttctcagtcgcccacctctggtttccatcagtaaagaaagtggaagccagctgttttctgcctgacccctgagtcaaccaacttcacaaggcttttgcacgaatgagataacaatgaaatgcacagaaatgagagtggcagctcttatttagagcaccaggcaaagctacatattaaaaatgtcctcgagtcagcacacaaataagctcacaaaatttcatgtcatgacatgtaaggatcttcagcccaaaccatctgctcatgttgtcagtaatgcccttaatttccatttttaacatggaaaacggtggccccatactcttgtgctgccctattaacacattatctatcttcagatgagggagatgaacgcacagcatttacacaaagccttcttcactatggttccatgtcatccagaatcccaaactcccttccatcttcagcatctagataacatcgtcgttatccaaagtctttctgctaggaaacatagtggaagtcatgaaactactcttgaaatctttcactggaaaagggcagaaggctaagacccagagaggtttgtctgacacaagatctgccagttctatggcagcaattgctagaacccagttcttacactgcctctctctctctggctcaccctaagtgataggaaacacacacacaaacacacacagatacacacacaactacaaaagaggagaaaatatctacaaactacatgcctgaaaaatccaataaatgaatacccagcacacagaaggaactctaaaagctcaatagtgatttcttttctaatccaattaaaaaatggtaaacagttctaagaaagaagacacacatatggctaacgggtacaggaaaaaccaagtcaacatcattaatcattaggaaaatgtaaataaaaaccacagtgagatactaccttattccagaaacaacagatttaaaaaaaaaaaaatcaggcatgtgactgtactcccagaactcaggatcatgaattcaaggacagcttgggctacagtgaaaaaccatctctagatagatagatagatagatagatagatagatagatagatagatagatagatatttgataagttctactacaagatctctatccaaaggaaattagatgaatttgccaaggagacatatataccctgcattcccatattaacaaattaactattcacaaataaaacaaggagtatccaaagtgccatcaactgaggaatggacaaagaaaatgaagtagtcagtcatttaaagtgaaagaaagtgacactgttcagccacttcaagaaagaactcctagctaaggatgtagtgccattggtagaattgtccgcctagcatgcacaaaactaaagctaatcctgggcagcacataaggcaggtgtgatgccacattcctgtaatcccagcgcctgggaggtgtcaggaggaggagccaaagctcagggtcaactttgactacatatcacactccaggaaagcctaagctacctgacactcttgtcagagagacacataaatgaggacaggggtagaaagaggaggaggagcaggcagaagagaacagtagatgccagagtctagggagactgaggtgggggagaaaaggaaaaatgcagatcaggaagtgtgataatgagacaggaataagtataaccaagtcaggctctgtctatgtatacctcaaaggactagaagaaaagatggcctgttttcactttcatcaagaaaactatttgaaaagaggtatatttgacctaactgaagcattctgaactaaaacatcatatgaccctccattagtgtgtgcagatgttggcttctcatgtgtaagtttataaatcaaaacccaatgaaccttgaaaaagacataagcatctcaagcaggactctctccatcaaaacccacctgggaaagcgcagccagcctggggggtgagctagactgaggcggccttcccaacctctgctccccacacaaggaggctgtgagatgggtctccagcgacagtctttctctcagaggaaagcctttcaccatcaaactgtctgcagtgggtttccagtggcagtctttcatcctgccaagtgtggtgccacatacctttaatcccagcatgtaggaggcagggggttctctgtgagttccaggccagccagggcaacatggagagaacttgtctcagaagaaaatagaaaaaaagaaaggaaggaaggttggtgagttggtcaaacagacagacagacaagaacggacttatcaaggtgaaagcattcctggtgtttcccagtttcctgaagggatttcctctttaaatcatagaagactattgaattttaccaaaggttatccatgcatctgtaatcttttttccttgtttctgttaatgttgaaaactattctttatgcattatttcatgtaatcttacatcctggagtagcctactggacacaatgtgtttccctctttgtataaggctgtgttcacgcactgttaatttattaaaaattttttcttgtgtttactagcgattccagtgtttaaattttctcctattgtctgactccaaaatgagttagaaagtgaactattcaattctgtcttctgaagattctgcatatactggtattatttaatatttcgtaggatgaaagaaactctctgggcccatttttgtaaaaaaaaagaaaaaaaaggttctaagtaggagttcagttactttcactagcacatgaatattcagatatatttactttcacatagtattgaaagttctgtacccatagccatcaggctgaccagccaacccaaaaagctgtggctatggctataacagctgttcctcttcctctttttcttccctttcttctacgtggctgccacctctccccttcccctacacagcccccgccactttccaatgcccaggaatgctccaccacatacatgagtccctgctaggcaagaggaggaaatatggattcctaagcaccagaccccactgaagtggccaggcttctactccctccgctacgtggtcccacttcagcgaagcattacaaaagtgaacaatctgtctcatgcatgctatgcccagcagtagatacagtgaatatttaccatgtgtttactgaatagtgcttgatattaggatagcttccctggaggtgtggccacacccctacagaaacactgcctttaactcggttgtgtgtactggtgctcaacacagttcctacgggacctcatcttactttctgagacagtgttcttacctacattttaatggtgaagaaaataaaatccagacaacttaaggtcacactgctagtaaaaagccaagcctggactcccacccaaggatgacatagctcatcctaaagtgtctctgtgtgcagtcactagagtgtcccacatgccactctccaggacaataaagcaacagtgacagtcaccaccccactacacacacatgcacagtagcagggaggtgtttatcagatgaacaacctgcttgttcctacagcagagagtgacagaactaggcttttctgagccttctgtggaggccgaggacacaggggtgtcccaggtttgcaggagaaaacatcttgtgtaccaaggggaagccatgtgtctactctttgatatcaatgtcattaccaaataatgggagcatcaagactaggaacctgacagacatgggtctgagccctgacaggtctgtactggggactgggcactcagcagtgctctaaagagctctactttttgtcaccttgatatggcagccattactagccacacctgctagatgagtgtccagggcctgatgtgtccctgtgttttacactccaccgttccccttgatcatcaaaagcaagcgagtctgtgatcttcaatattgttggtttggctttggtgcagagatgctgggtctcattcctcttttccttgctcccttttcccaaattccaacttgcctgtctctctgcacacaaatcacactgaatgtcgtaaagagggaagctcatagccaaaataggagacaaatcaaatgggtggattcagctctctccataagcaagacaagctggtatagaatcatgacgcacccacacttttataagggacagatgtgaagcacacatgaattgctttagattgctacttcttcagtggctagtggcagggaggagaaaaaccaacatctatatacatttatacattcaccaggaaatgggtttatactgtactccaatcaggatttaccacaaacccggagcaccacacctaatgagcaggcaaaacccagcccattgtcaacagagaaaagtccatctcaaacacgaaagattttaaatcaaaatggatgttagaagagcaggattctcgccagtgctgtgtagtgtaactaaagctatctccagcagtggacagtgagtgttggttgtttaggggccagagttttggggcgcttttaggaggaaggcaatgaaggcttgtggtgtacaaaaatgagaatttttttattacagcctacaccctgtttcccaggtacttctctggaaattcctagtatagcctctgaccagcagggcccatccataggctggcacacaggacagccgacttagcacatgtgtttcccaggcttctaacaaatctgaccccagagatctgtgggatccttgtagccagctgatgcattcctagcttttagtcactattcacaatgtcttattggttctccgtgtggtcagctgtcactgtaacaaacgcctgtgacaaaggcttataaaggggaaaggtttgctttccgctcacaggtccagaagtgtcagagcgagacacttaccctatagctctgagcctgtaatcactgctactggacctttaggtccatagacatgccgccaaggttcccagtattaaaaaaaaaaaatggaaacaaatctgtccaaagggtcaggggaaaatatgaacatatgaacatacctatgaacatcttacaaaaccaagagacaaaggctagaacctgtaagctgtaactgtgagacagcaggaaggggacctgttcactatctgtaccactgcaccagacttatttttttttcttttatgatttattttagagctggacatgggtgcacacctttaatcccagcattggggaagcagaggcaggagaacctctgtgaattcaaggctatcctggtctacaaagatacaaagagaattccaggacagccagagctatttcacagacaaccagtctcaaaataaaaacaaacaaacaaacaaaaacaagcaaacaaataaaaacattatttttaactgggcatagtagcacacactgttaatcacaatacttaggagacaagaggtaggtctgtgaattaagtctacataatgatttctaggacagccagagctacatagtaagaccctgtggaagggggaggggacacaagatctattttaattatcagaatacaggtgtgtgtaacacctaggtagcagtagagtcctacagctgaggcccagcctgccctgtgatttggcttcaaggtacttccaactatggagaagcaggcaaggctcacccatccaagtgcagacactacagactccttgtttaaaggcatcactgtgctctggctgccaggtcctaaagtgcacctcaaccaggattgacaccagcaggggaaggaccaggaggggacaaagatgggtaactgccactaagggatttgtataagccttgtagaaagcccccaatggtggctgttgttggcttccctccagaagtacgggagcctagcataaatgttagggtcttagaactccttcggggcatttggaaggttccctgtttgaagatttaggatgactgtctgtcactgtcttcatgtcaagaggctgaaggccactaggtgtctctgttcagaaactgctggacatttagaccctagacagtatccagatgagttgcctaaacactaatatgcacaagacactgtgtgaactctgttgtgtggattcacacagtactgtgtacttgaaccctactctagtactcaatatgtgactgagtgaggtagtgaatcctcaaccctctcacctgcaaaacaggcacagaaatggacgacaacatgatgaacgtgcacactcttcatcaatgttggcgcctccttcatttcatgccaccagctccttctcctacccttaggaccctttcatccaccaaataacctctctcctgctgctgtgtactgaactgtcagaagctgcagtcctgtcttctaaaaccagacatttacacttcagagacggagaatcagtcagtagtcagagccctgaccactcacagccccgtaatgagtattgcctgtcaggtcttacactaagtgcaaagaacaaaggagatgaagcctccttcatgcagcaacactctattgagggacacaggacaagcaactcaaaacaaagctaagagatggttcagctgatctccagaatccacccagaaaagtaagtgttggtgcacacctgtaatcccagggcttggaagggaaaaacaagtggatccctgggactcactggtcagcccaattaaccgtaatcaacaagcccaggtcttagtgaaagacccctaagaaatgacagagaaggtgtcccctgagcttcacacaagagaagtaaagtctaagtcgtgaaacaaaggctgttgatattagtcgcaagttcaggaagtgtaattctgtctataaaacatgtgtttacacttctctgatgtgtgtatgtgtgtgttgtgtctgcaatgtgtacattgctttgttcacccatagggcacttgtggaggaagctacaagctgtctttctcaattgctcctcctcctgcttttgtagacaggtctctctctctctcaacttggagcttcttgtttcaactgggttggctagtgtcttagctaggttttactgctgtgaacagacaccatgaccaaggcaactctttttttaaattaggtattttcctcatttacatttccaatgctatcccaaaagtcccccatacccttccccccactcccctacccacccattcccactttttggccctggcgttcccctgtactgaggcatataaagtttgcaagtccaatgggcctctctctgcagtgatggccgactaagccatcttttgatacatatgcagctagagtcaagagctctggggtactggttagttcataatgttgttccacctatagggttgcagatccctttagctccttgggtactttctctagctcctccattgggggccctgtgatccatccaatagctgactgtgagcatccacttctgtgtttgctaggccccggcatagtctcacaagagacagctatatctgggtcctttcagcaaaatcttgctagtatatgcaatggtgtcagcgtttggaggctgattatgggatggatccctggatatggcagtctctagatggtccatcaaccaaggcaactcttataaggacaacatttaattggggctggcttacaggttcagaggttctgtccacaatcatcaaggcgggaacatggcagcatccaggcaggcatggtgcaggaggaactgagagttctacatcttcatctgaaggctgcaaggagaagactggcttccaggcagctaggatgagggtcttaaagcccacgcccacagtgacacattccaacaaggctacacctacttcaacagggccacacctccttaatagtgccactccctgggccaagaatattcaaaccatgacagctagacaccaagcccccaggatctgcttgtctttgcccccagaactgggattacagaactatgacactacacctggtctttaatatgggtactggcaaactaaactccaggatccatgtttatacggcaagttctcttctaactgagccatctccctaagctcccccaagtttcttactaaaaatattcatgactcttacataaaaaacaaaacaaacaaacaaacaaaaaacttaaaagaggttgatgatgagattgggagaaattattagccttgaggaaaatatggccagagcgctgaggaagaattcagcttagggagggaaaggacaccctgaaaatataaagaagtggggggatctggagatgaaggtcccaggtgaggatggtggaaatgggaactggtcaccagcacaaaccacagcaggaagagctggaaaggtttccagcagctgctgtggggattcaggaagtcaattagcagtaagagaagacagcagagggggctccaagggaggacccagctaccacgaggagtaggatctgatcctgctgccagtaaatgttttagctgcagccaaaaaagatctatatggcctagctagatccatccactctgcacaggtttaaggcaaagcctggagtctggatgcctgggattcaatctgatttctaatttcaggagaacttgtaaaggttttatttattgacttttgctaacacttttcaagaatacccttccctaggtgggtgtagtaggcacatcgttaatattttacaggagccacgatgaacaaaatgtgagcatttaaaataaggatgcatctgactctacagctgtacaaccctaatatcatccatcacaccgtagtcccgccctccaactcagtgggggaggaaacaaattaaagcaacagattacaagcatatcactgcagggctgagtgtttaacatgctaccacatatttggtttctgttcttttaaatgctcacttgaactatatgtccaaagaattgtaggtctcgagtaggccaaaccaagggttggaggtttcccatcatggtctccacatgggctcctttgtttacacctaagctatcctgccacaataaagaaatgtatatctaatatatccttgacctaatccaccttttcctagcaccaaagcccactttgtaactcttcctaaaatgtgcccacgtgtgtaggaaaatcctgacacaatggaatctcttcccaggaggaagtctcagagggtacttcagacaaacctggcccctcaaaccaaacctgtcccaggttctccgaagcctccttacccttcctcctgactccacacgtgaccacgtgtacttgcctagcagaggttgggggggggggagaacagaaacaatatctgctaaaaataaaactgaaaataaacaaaagtgcaagcacgagctttacaggatggcaacggggcatcacgcgcgcctcacctcgaaaccagcctcgcggaagctgaagtccagccatgcgctgcacacacgaagctacgagcgggccgcgctggggctcatgggggaagtgggcggggcgtgggagaaggggcggggcgctgcagcagctgcgccggccttgagtggaagctggggacccgccccgctttcacgcccgcctactttgcagccatcgaccctgcaaatatttaccttgggatccgagagactgaaaatatctagccggagccagatgcgtcgcgtgtctgtccctgaaatattagccaaaggagtgatttaacaaaatcaaatggcgggtggggcgcctgcctggcggagctgttgactttgcgccagctctggtggagcagccggtgctgcgagtgattccggagaatgccaacagctgggaagcaggccagaccgcggaggcaaagggtctgttttggtttggggcggatcgttttacataaatcagagatgtggatatacaccttccttagaggctcttagaaatgctctcaaaacagccctggggcagtacacccggaggtggttttgtctttcttggctaaagaaagaacacttgcgaactgacaagtctgagaaatccaagtgggagcgatgctcaggtcccttctgaaagccagctgctgggctgtcctgccagcgcactggctagcagggttcactagctccgtttacagtggacaacctgcgagtgagggccatgagactcactaccttccagggctgctttgtgacagtgagtgagcttctcacggatcggttagtgccatggtagtgttgaaacaagctgtttgtgagggaagacttcaaatgcaactccacaaacctttagcgaagaatccaaaggggatcatttgatgacatcttcgaacataaagaaaatacaaggcatgagcaagaacaaataactcctccctgtaaaaataaataaataaaagatatatcaggggtgtggcctcagtggatggcgctaccctgacacaggcagaaacacactcacaggaggcaagctgagctccactccagagaattccccaatcctagttagtggtcttcagaaaatcgtaatctgtgtctagtcctctcctgtttaatggtaaaattgaaagctgacgattttattcgttagtgttagggataaaaccaggttctagtgcatatcaaataaccataaactctgacactgaactacaaattcctcagctcctggttggtttattgggtttttcgttgatgctttttagtttttaaaaacacttagttattgtgtatgtatgcatatcagaagacaacttttaggagtccgttttctccttccacattgtggttctgggaatcaaactcaggtccttaggatgaggagcaagcaaatgctgaaccatctggctgacccctgttcgtctcctcccgacccttgcttctctgtgttaacataagccctgtaatatgaaaactagagttaccaaaatggtaactccagcttctaagtcacttgctataaaaatcgcctattagctcctgcctcgccttttcagcacacagcctgtgcaagacggcctctattctgaggccactggcaacctctcacctggaattccaggctcctgttagctgatcagctttccagaagcccaagcaagaggcaaaggagtttgaggtctatgcccatctccactcctaggaagctgggaaggcttcctttccctgggtctgtagaatgaggttcttggtatgatggggtctttatagctggatattctttttttttcaagatttatttattattaaatgtaagtacactatagctgtcttcagacactccagaagagggtgtcagatctcattacggatgattgtgagccaccatgtggttgctgggatttgaactcaagaccttcagaagagcagtcagtgctcttaaccactgagccatttctcaagtcccatagctggttattcttaatatctaactgtaccctttctcttcttgtaacacaagaataccaatgcctaccacctcaccaccccgaggcctctgcacatttccacctctatcttctgctctttgcagagttctctaaagtctcagatataatgccagttcttggaggtactttcctagttttcctagttctgtcatttattgagctaaggaactgcacagcccaagtctgatccccttttatgaaataggcaatattttcattatatataccatcaatatattctgacgaaaaactaagtatgtataggaggttttaatgttttgctgcatagcccaggccagtgttttaatcctcctgtctcatcctcagtgctgggattacaggcatacaccacagtgcccagctggatgtgtttaaatgttaaagacgacatcacgggatcagtgaagttctgaatggcagtctacattgggttttcatttcatcactttgaaatcgtttgttctgcctgttgcaataaataatcccacagttgaattctctttttttaaaaaaaaaagtgataaaacctaaaatatcttaaaagttggattcatttatcaatttaaagtgatgtgttaataaattcaatgtcagtgatcaagtattaaattgatacagaataactacttatcgatttattaattctaggtgcgtatgtgtgtgcctgagtgtatgtctgtgcaccacttctgtgtaggtgccctcaggggccaaaaagggcaccagatctcctgtaactaaagtcataggtggttgtgagccggggactgaacccaggtcctctgcaggagcaacagtgcttttaaccactaagcaatttccagcccaagaaggaatgttctgcagctgcccttcattctcccttcctgtctgatccagaagtaatacagaatcatacggaatccaaaggctgtaaaaattcacaatacgtacagcaaaactcccccagttctgttgtgctttaccctatcctcggtcataaacacttactctccttcacacgtgttcctaacttttccttgtgtacactagcattgatttttatcagaacagatagaggggcccagtgacctcgaggttgtctttagggtactgagatgacccttaggtttaaacagaagaactgggacaggagacaaacagccttggtcaagtcatgatcctgcttatcactgtacaacctctaattctgaaaggttgtcaagaataaattgctcttcagccagttgatgtatatctctcccataaatgactgctctcttcttggcaggggggtggtgggggggggggcacaaggggaggtagcctaacctacctgtaatgctttgctgctctgtaatccaaggtgactataggtttaatgcaatgactcttggggccttcggtctaaaagtgtaaagaggtaggctggagatcagtggggttttagacagacactccattttgtcatgcctatgcacatctaagcaggagtctgacccacagcaatagaaacaggcacaaaatgcaggcatagggtcaggcttccttctaatttttagtgtgtgtgtgtgtgtgtgtgtgtgtgtgtgtgtgtgtggtgtgtgtgtgtgtgtatgtgnnnnnnnnnnnnnnnnnnnnnnnnnnnnnnnnnnnnnnnnnnnnnnnnnnnnnnnnnnnnnnnnnnnnnnnnnnnnnnnnnnnnnnnnnnnnnnnnnnnnnnnnnnnnnnnnnnnnnnnnnnnnnnnnnnnnnnnnnnnnnnnnnnnnnnnnnnnnnnnnnnnnnnnnnnnnnnnnnnnnnnnnnnnnnnnnnnnnnnnnnnnnnnnnnnnnnnnnttttactgttatgcttcagtggctgggcttctgttgaccctcctgtgagctcttacctgtattgtgttgctctcaacaatcctcttaggactggggagacagctcagcagttgagaacttgccacaaggtgtaaaatgaacttataattctagcagctgacataaaaagacacacaatcagaccaatccactaccatgaagaccagaatttgaatccttagatgtccacataaatcccaggtgggcagcagatttgcctgcctgtaattccagccgcagaaagcagacataggggatcccccaaagcaagccggctagcaagactagccatatctgtgagttctgagtttgattgagagcctgtctcaatgaacaaggtgggagagtaatcaaaaaacttccaaccccaaccccaggcctctacacacatacacatacatgcacatgtgtacccacatgtgtgcccatagacatacaaaaacatatacacatgcacaccacacctcacatatttttttttaaattggaataacactgctctggtggcaaacctcaacacttcctagccctccaccctcaggtgtctctgccagcatacaagctcaccataacagggttgtttacaagttcccatcaataggatcaggggatcttgtccctcacatcagaacctgacaagctgggaggctgcccacgcaaaaacaaaacagaagcaaatcatgtcacagagagagagagagagagagagagagagagagagagagagagagagagagggagaggaagagagagagagagagagagagagagagagagagagggagagagagagagagagagaaagagagagagagagagattgagagcatgtgtgtgtgtcctgctcagggatcctgggagaggcactcttcctagccaggacagaaggtagaccaagggtcctcggagagtatggtggctcagaactctttgagaaaaaactggggggtggggtgccagacaggagtgactctatcaaagaaacactgtcctttctcttaatcacaggaagactttccaaacacagtctcccaggtgagagcctctggagggtaggacactttaaacctttgtggcttgcagaccgtaactccttggcacactgtgataaggcaatgctctccaggaagcttagaaaacaaatcgttcattaaccaaagatgatgctggcctgttgggtggcagtcagggaggagggcaggaacacctctcaggagggtcccttgagtttggtttcagtgagattccttctattctccatctagtctggcttctacaggctttcttctcactcattgtctttatccatctcctctgctgaccctcctcagcaccttctaaaggttgagggctaaggagtgtctgctgacgcttgccaccagagcagtgtctccacacacgcaccctttttctttccttttcttttcttgtttgtttgtttgtttgtttggagacagggtttctctgtatagctctggctgtcctggaactcactttgtagaccaggctggcctcgaactcagaaatccacctgcctctgcctcccaagtgctgggattaaaggcgtatgccaccactcctggctcctttttctaggatgtgaggtgtggtgtgcatatatatgtgtgtctgtatgtttttgcatgtgcatgggcacacaatcagactcagaactcacccccccctttgtcgagtgctccctcagatcctttccctctttcctttgtctaacaaggattttaagctgtagaacctctctcattctccagatgagaccaaagcatgatctgtctagttttgggttaaacaacaaatgtgtagaaatgaggctttgtttgtttgttatggattaagccagggccacatttggctgggtctctaccactgagaagtacccctgggtcttttttttttttcttaatgtatagtgtttggcttgcatgtatatatgtgcaccatgtgtgtgcctggtccacacagaagggagtgttcgatgccctgaaactggagttatagacgatggtgagcctgcatgtgggtgctgggaactgaaccatagccctctgcaagaacaaaaaatcctcctaaccactgagccatccttccagccctattgaagtagcaaatccatcacatcagttattgagcaagatagatacttctattgtttcatttacctgaaaatgtgtcttcatgtgaccgtttacttaatgcacagcttcactgtatgctgagtgctgagttcatggcaatggttgctgtgaagtaacctcttctgcgctgtgtttaagagtgtggtggcttccaacacttgggaggtcaaggcaggagggctgcctgtagtcggaggtcagcctgaactacaaagtgagatcacactgccccactgccccaaacaaaccagtttttaaaaatgtgaatggtcaggtttttaataaatacctatttggtgtctgtgtattggggggggatgcagtgtgtgtgtgtaaaggtgtgcatatgccacagcgtatgcataggggtcataggacagtgttccaaggacaattcttttgtccaccttgtttttcgggcatttctgttatttctgctgctgtgctacatgtgagtttctgcctgactcttctgcccgacctcccttctcaccataggaatgtgactcaccgaatctaggatttacacgtggattccagggaccacactcaggccattgctcttacccactgagccattctgccaccctgatagtttctgctttttaaattggccttctctctggttgctttgaaggttctctttcatataagtgtgagtattgtgcagtttcagtatgatgtgtctaggtgagaactctgtatacacacatatatatcctgcttgagatttgatgggtttcctgcacttaagaaatactgttctttctaattttcaatttgtcatctaaaatttgtttggatggcccttcataaagctttaatatgtatgaagcaaaaaactcataaagctgcaaagattaacatagaagctccaccacaattcagtactacattcttaatacatgatagaacaaacaggcataaggctgccaacaatctctaattaataaatacaaaacattccatccaacagtagtaaaacacatattggagttacgtacagaaggctgaggttgtaactgaggatatagcatttacatagtctgtatgaagccccgaaatttatcctcaatacacacacacacacacacacacacacacacacacacacacacacggtgggggggagatggaaggagggaaagaaaatatactatttttaaagatgaaatttagataggtattctgaaccatagaaaaatattactctatttgaagtgatctataaaaaggtgcacgaatcaccaatcatgagggaaatgcaaatcaaaaccacaacactagcacctcaccacagtggatgtagtgattatcaataaacaaaacataaatgttgccaaggatgtggagggaaggacctgctacatggtgctggttgcagtgcagccaaagtgggaagcgcacagaggttccccccaaaacaagaactagaactaccatgtacctagcaaccccatttctggaatgatatccaaagaactgaaaaaagatatctgcaacccaagttcactgcaacaatattcccaggatccaaaacagaaaccagggagggatgaccaggtgaagaaaacatggtctatacacgccacacagtagtattcaaccattaaaaaaaaggaaagcttaacatttgcagcaaagtgtttgaactgggaggacctaatgctaagatataaacaaggacaaatgctagtatatgagatttccatctctgtgacaaaaataatcaatctaaaaagaggaaagcttagccgggcatgatggcacacacctgtaatcaatcccagcacctcagaacctcagaggctaagtcagcggaggagcatgagtttgaggcaaggccagatggggctataaagtgagaccaactcaaaacaaaaagacagaaacaacaaagaaggtttattttggctcacagtttcaaaagttttcaagcaaagtcatctgtccctgttgctttggggttgtggtagtaaaagacaaagaaaacttgctcattttacagatgctggaatgcaaagggagacaggccaacatcgtgatcccaaaatccccttcaagggcacagctctgatgacctcacttcctcctactagggcacagcctgatgacctcacttcctcccactaagtcttacctctcacattcctactatacagagtagggattaagtcttccatctgggagccagacaatagcaacattgactctaaaagctgggttcccaaagccagcaacccaattggagaagtagggatgccttgctcttggtgcaaagttccattatgaagaatgaggatgtcctggagacctagcctgtgctgttgtgcactgtgaccagtgccatagcgcattaacgaagtattaagggtgcagtcaacctgtgacaagtcttatcccataggctctaaagaaggaggatggaatggaagaagggagaaattttgacagagacaagaatgtgaatggcagactatggtgatgttttcaagggtgaacactcatctctaaactcatacatttatacatatatacataaatgtatagctttttcatgtcaaccatacttcaataaagtgatcagaacatactggggattgtcattttcttgaggaattgtcccctatgtcctttttttataaattcatttttatttggggtgtgtgtgtgtgtgacatatgtagggtactcactgagcctagcagtggtggttcccctggaactgaagttatgggctgttggagctgcctggcatgaatgctgggaactcaggtccttctggaaggaaaatacatgctgtcagccactgggccctgtcccctgttatctccataaaatggccctctttatctctggcaaaacttggttctgcaatctatctcctcaaatattgataatatacaacttgattgttggtgttgttaccactgagttacatgtgtgtatgggagaatgtatgctggagcacacatatggaggttaaagaaaaatctggcatgtctgtccccaccaatgtttgagaaaagctctctctctctctctctctctctctctctctgtatgtatatgtatgatatatatttgcttgcatgtatgtctgtgcaccacatgtgcatacctagtgcccacaaagaccaaaagagagcatccagatttcctgaaactggagtgacagaagttcatgagatgccatgtagatgctgggaactgtactggggtcctcttccagaataagtgctcttgacagttgtaccatctcctcagccctgaataaattgcctcttatcattagttgctacagatgtcaggctgtctagccatgagcttcctgagatgctcctgtctctgcctctaagcttaccataggggtaacagctttacgtgggtctgaggaccaaacttggtttctcacacttgcacaacaagctatttaccagatgagccatgtcccccacccagtatcctctcatcctttcactttcaatctacccacatgttgaaagtggaattttttgtgaagtccagaaagatggttcaatgggtgaagatgactgcaattaagcatgatgagctgggatcaacccccagttaccacatgatggaaggagagaaccgactctcacaaatagtcctctgacttctactaatgtgtgcacacacacatgcacacaaaataaaatgtactttaaaaaatattaacaaagccagacagactacatagtgagaacctggtatcgtgtaccagtttcctccaagattgaaacattccatcctgcagaaaagcatcctaagcaggaaggtatacaactcaaatagcctcaggaagtccctgaaactgaccaaagctaaaatccctctcagaagggctaagctgcaaagaagactctgagaccagaacagctgcttagaagaagcaaaaaccagacaagctgcatagaagaggtttagaccaactgaggcaactagaaaggacactctccaacctattgagctgcctgcaggtggtgcagtgtgctccaggttcctggcttctgtgagttgacagtcatgctaggattcctttggtaaatgcagctgtctttgagttatttctgatcctgtaagtcacctctcacccatatccctgtaataatcccaataaaacacattgagtcaccaagttggatgatggtggaatccctactttggtctgtcatgggttccctagctggggtcagtagacatctctgttccacagaaaaagttttgtcacacaaaatctggccagccaagaatacacaagcaagaccttttctcaaaataatttttttattttaaaatgataaattttcattttaaaattttaaaaccagctcctcacactcttcatatttcaaatgtctaataaccatgtatgtgtaatacaaatatgcgcatgtatgtttgtgtgtataatacatatgtgtgcgtgtgtgtataatacatatatgttaatatatgttggtgtgtataatacatacatgtgcatgtatgcttatatgtataatacatatatgttcatatgtgtttgtgtatataatacatacatgtgcatgtatgcttgtgtgtatgaaggaggcagaagcagcaccaggcagcctgccgggagtacgggcaacccagggctgagtcactctgcccctagatcaagaccagcctaactgtcagaggtaaatctgcaatattctggcctgtgtcttaggggttttgaaaaatcctaaccatagacactgaggaaagaaactaggttctttctccccagttttttccagctgtaaataaatttactttttctttatcaagttctgtttcataatttctcttagaaaataggggagcggaagtggcaagtagcagtcctgactccctggaaacccaacggttgtgtgagaccagcggagaggtctcccaacccttccctgccattctcaaagctcccagtgatctttgcttaagacaggaaaccaattccttgcctgaggcctcctaaccattatagtgactctcctgcacctgaggcttagaaatgtcattttctacattttggtgggttggtggctttcgtccttagccgctacggccttacactttattatctgcattcacaatcaggaagctacggtacttcctgagacagtgctgggtacaatttacacaatacaagttcgctttcttcaccctggagtaggtcggagctcccgggagggagggctagctaacctccatccagttttctacaggttgagtccaacagttccctgtggcttctagatgcttctgcttcctgaacaatgtggttggggaatttggaaagaaggtgttgattgtgactggagtctagaaaaccgttgtgggggagggcatttatcaacttagtggaagtaactctccaaactgccctccaccactaacaggtacattgccagggccaatcagcaggccacaagggaactcaacccaacagaagtaagtaggaagagagaagtcacagaagagtcattatcttcagagatttccatcctttggccaaagagagtcaggaatgtaccgaggagagctacctacgatgcagggctttcttgctgtgattcactcccaagccgagagcatcaccatgcacttaaaaaaagataaataataaaagttatttctttgtgcaggatgttgattcatgctgcaatcttagcattcagaagtctaaggcaggaggattgctgtgacttccaggtcaacctggactaaacagcaaaactctgagtcaatttattaacacacacacacagacaacaacaacaactgggccttagaaagatggttcagtggataaaggaactgctgagcctgataacctgtgcttgactctcagaacccacatagtggaaggaaagaactgagttctataaattgtcctctgacctccacattttgtaatgtggcatatgcacacatgcacacacactcacatacacaggtacatgaagggggcacaaaatagataataaataaataagttaaaaactagaaacttagccgggcgtggtggtgcacgcctttaatcccagcacttgggaggcagaggcaggcggatttctgagtttgaggccagcctggtctacaaagtgagttccaggacatccagggctacagagaaaccctgtctcaaaaaaaccaaaccaaaaaaaaaaccaaaaaaactagaaactccttgctggccataggttgcaacttttctgataagttggatcccctaaagatattgtgtcatgacgctgtgactgagtttgtgtgctgggaatcttccaggccttcatttccagagtcatgtctttgtctccttattttattttattttattttattttattttattttaagaagatttgaaggtaggaaaggggcaaatacccaagtcagagtatgagaatgcttaagaacagagagagctatatgatcagagaataatgcaaatagagctggtgaggtaactccatagataagatgtttgccttgcaggcatgggacccaagctcagtccccagaatctaggtgcatatgtgaggcctagtgatgagcttctgtaatctagatgctcagaggcagagacggaggcccctggtactcactgggtgggtcaatgagacaccctgccttgaaggatgttagcacgatctttgaagatgacatcagccctctggattccacatgcacacacatgcaccctcacacacacacacactaacttatacatgtgtgtgcattttaaaaatacaaataacaagtctagtagttatagtaatgtcccctgaaatttaaagatgtctccctaagacccacaatggccctgtgaataggaattaccattccctcaggatcaggaggaagagggccagacatctagaactgactatctgacacaagcagagcactaccaagtagcagccctgcgttccagtgtcccatctacagtgcaaacataaggacactggcaactcctgtgcacatggtaggtgcacagaggtatatgttctttctttgtacagcctgattaagctttctcagaacagcccaaggacaacaggtgtcaacaatcaaaccgcactccactggagatacgctaacagggcgcttaaggtggtgactatgtggaggaatgataagagaggcatttttaggacaagcaaaacagaaaaacccacaaggacaccatgaaaactgaaaccacataatctctaaatagagaagtaacaatgtactgatatttcagttgtacaaaagcgagagcttgggaaggagggcgctgtcatggaggtcggcgctgcttttcatccccagcgcggggtgagagacaaaaccgattactctgttgttgctacaagacatttcaggtctttccagacatagcaaataagtagtagtaataacaataacaataatacaaataaagaaatcatgaggcttcaaggtcagggcagacatgtacagacagatagacagacagaaagaaagaaaaaaataaagaaagaaagaaagaaagaaagaaagaaagaaagaaagaaagaaagaaagggcagtgataaaattctagttgtcttgtttttaggttttaattatgtatctatgtgtgggtttgtgtgcctgagtgccagcactcagtagaccaagggcatcggatcccctggagctggacttacaggcttgagctttgagctgcccaacatggtaccgggaacataactcagacgccctggaatagcaggaagcactcagctgttgatccagctcttcagacctaataaaactccagtttttaagctcaagatgccagggttgctcaatgttattagcatactcacggcctatagcttcatgacacctattctttcacatatagcaagggctctgaaatcaaaagcacatctgctcggcacggtgacgcacacctgtgatcccagtaccggggagataaagacaggaggagccgtaattcaaaatcattcagctacagtggaaaattcaaggccagaccaagctacatgagaccttgtctccaaaagacgaaaaataaaattaaaaaaaaaatgtctatgtaagtctagaaacagatattaaagggagggagctacacacacacacacacacacacacacacacaaaatattttaaaaatcactctctgacagagactgctgtcaggagtgtgatgcataatcctactccccagtcagtaagaaaacacatttgcatttctggtttaagaatcagggattaggggctgaggtacgagagccagagtttggatccccagaactcacataaaatccagacagatgtagtggtccacaggcagatgtggtggaggtccataggcagatgtagtggtccacaggcagatgtggtggtggtccacaggcagatgtggtggtccacaggcagatgtggtggaggtccataggaagatgtagtagtccacaggcagatgtggtggtccacaggcagatgtggtggtggtccacaggcagatgtggtggaggtccacaggcagatgtggcagtccacttgccgtgctagatctcaggcgggaggagcagaggatcccagggacaagctggctatccagacttgccaaatccgtgggctctaggttcaagtgagagaccctgtttcactatataaggtcagagtgattaagaaagacacatgaaatcaacctctagccttcacatgtatgcacatacagacgcatatcaaccacatacatgcaaacacacacatacatattacatgtacaaacacagagaaaaaatcatcaaccatacacatgcaaacacacacatacaaacacagagagaaaagtcagtgaataaagagagtagagtttttgtctctggacagcagcacactgctggaccaggtgttggaggcagttgtatttctttaaggacacagagaatcctgtgcaccttacctccatcacacaggtaagaataatttaggtgataaacagatggttctgggattccatcagcagtgagcagctgatttctgaaatatccctctgaactgtttgacaggaagaatatactagaatagatttattgaaatgtgtgacatttattcctaagttgatcagtgttaaaatctatcgcaatgtaactgagaatatcagtgctcactcaccttaaagaatgagaccagtaatttgagttaggactcaaatccctgctgtgtcacttggtataaatttttactacgtgatagtagttactaaagtgaggcgatataaactgggtgtgaagttcaaggttgtatcctctgttacatgagtttgaggccagcctggactacacgaaagcctgtctcaaatttaaaaagataccagtagcaagcataatgatggtgacccatccactgcctgcctactcagcactcagccttccagcctttcatttccccaaggtttcctaaaactctacctcctcagcctcccaagtgctgggtgacagtgggagccatacttggtttgcagcagtgaagctcttgctgtgtatgatgtggtaatctctctttttttctttttcactgcagattcagcttctgagttgtgtttaatctttagagtaggattggtgagtagaggaaaccagatgtttcgaagagacaacgtcatagtgaaactgaaaacatcagctaaggaaagatctatcacaccttttgtttcagggacagtgagctttgggccatccgactcctttttatttgataatataaagttagtggcaggtacgggaacacaacagtagtccaggctggcctcaaactcatgtaacagaggatacaaccttgaacttcacacccagtaatcctgggacttggggtgagagaaagaggacagcctgggatacgtaagacccaaatcaaaacaaaggacaacaacaaaatgttaattcctgcacatcatgagaccagaacaagccagccacactcttcctgcttgattctgcagtaaactgctgttccttccagtgcaatctggcccattcctgccctggcaatgtgatacacacaggactcaaactcacagcacagacactgggatgtgagggaactgcagccaaactcttagttttaacctttctaacctttctgagaccctaagcccaggctagcccatgaagtatggctgctcttggcctcttcattcttctaaacttccctctgtctgctgtgtaggcttagattagattaaaaacattagtggagctgagaagacatctccaaagtgcagtgggtatgttagcatctgccagtgtagggggagagatggaggcttacagccagcctagccaccaatgagctcctgatttactgtgaaagatcttgtctcaggaagttcagtggacaacaacagaagatgtccacacagaactctgatgtctacatgcacaggcgcctacacacaaacatctgtgcacatgtatagcatatgtatacacactacacacaaaagaaaaccattaataagtagagaaatgtatgcatgtattcctaacatacccatgcccagaattccaactgctctgaacttttaaggtgaacttttaaggtaaattttagaggtagtggagactaaacccagggccttatacatgctacatacacatggtaccagagttacatgccatccccggtaatatttattcatgaagtatttactttctgacctgcactgataaagaccctggagatgtagtaataaacaagacagacatgatcttgagttataaaaaagtaaataaaagaaaatcatcaggaaaataaaggtgaagagagaatctctacgtaatgtatgagagcatcacctgtcaattaaaaaaaagcctatggccaatgagctgaggcaggaaataggaggtgggagttccggcagagagggtgagggattctgggaaatagtcagactcactagattcacctggaaactctgaggagacagataaataaaccagccatgtggcacacttaatagaacaaactagataattgaggtacaagctatttagggaacagggccaaggttattggcctaagcattcattaataaataattagtctcagagtcattatttctgggaacaaggtgatcaggagttacatgaagataacttgtaaatgcagttgctctgacacaagccagcctatcgtgatctccccaggtttgtctgggatcagggtgtctacaacacccttctctaaaacacatcttagaaagcaccccacaggatcaccactcttcacaacatgaaagggagaagaaaatagaagacgcgtcacagccatattattacacattcacacacgctgaaaagtggggagacgctatggccctgggtcaaagtgttgaaggacatcatcaggccagaaactacaatgcaaccccaaaagaatcctgtggggtgagacagtctctgttcaatgttctttctgcttaggctgggaaaagccaatctctgcactgggtgtttccagggcccagccagggtttggatagaatcacagaactagacggtcagatctggaaagtccccttgagagcaattggtctatcttcctcagtttacaaaaaaaaaaaaaggaaacgtacccagaaaggatgaaccttctaaaagtcacttagagctcggttagagaatacatgttctccagttcaattttctctttcttagcacaagaggaggatacattttgtttccccctttgcagtggggtcagagtgtcacattgcagcccaatcgactatgagcataactgacccaaggaccacccagtcttgacagagctcccatgttatctttacatgtttcctatcttcatttatcagctagccaaatgcaggaaatccagaaaagagagactcccagaattccctagaacaccacaagaaggaagaggtcaagatttctcaatgacaagcatgtgaacgcagctgtgtgcacacaacccaaatccaccatgatgtttgagaaataaactttattgtgtaagctctgagatttccaggcatgcactacagcaactagcgaactgtttgctctgacaagtactctggcagtttgaaggccatgatgatcaacttcatgccaacttgactacgtcacggggctcccagagagttggtcaaacattattctgggtgtgtctgttgagggcctctttaaatgagattaattctcaagttgctatagaaacaaaggtctaatgtcctctctaacacagatgggcctcgctctatcaactaaggatcagaatagagtcagttaggaggggggtcttagtcccaccaatataccatatctgaaacatcagtggtgagccctcacactggaactgccctgctggctaccctgggcctccagcttcctcactgcaggtgttggtccaccctccataatcatacaagtcaattcaatataatgttatttacaaaggtaactaaggcaacccttcctactttcgactcaatggggttcccactctttctttttggtactaggaactgaatccagcctgggccctctgaatgttaggcaagaactctgccattaagttacatcctcagacagacatttttactttttcatttgaaaccaggttttgcatgcatttatgctggccttgagctcattctgtagcccaggcacactctgaataatgattcccttacctcagaccccttagtacccaggatcacaggcctatacttccacacccaacacaatgcaatgtttcttaactcaacagttctatttctccaaactaatggaaaatttcttagaaaatttcaaatttacttccagacctgaaacctcccagtcttggaccaacaatgactagcagaagacagtcctccaagaaactattagggcattgctatggtgcgcagagcgcattggtgggtttcctggactagttagatgtttggccctaattttggggctcctacatatctcccagtccactgctgacttaccttccatctacccaatatgaaaataagtaccatccgaggcgtggtggtgcacgcctttaatcccagcacttgggaggcagaggcaggtggatttctgagttcgaggccagcctggtctacaaagtgagttccaggacagccagggctacacagagaaaccctgtctcgaaaaaccaaaaaaaaaaaaaaaagaaagaaagaaagaaaagaaaagaaatacctacaggtctgtcagccaaaacctcccctgaatggtgcttggcctacctgaaaatgaacgggggcttgaaaaaacactgggcggccacttccttctgggtgaaacatccccaaacagagaagacaaagggagaaaggttctgtgaactcacaagacagtnnnnnnnnnnnnnnnnnnnntgatccccccccccagcccccccccccagaggtcctataagcagtaagtgatttgggggaggaatgagggctctttcatggagccgcccgcccaccaactgtgcaggaaattccagggatacagctttaaagcatagtccacccatgctgggttgggcttttcagtgatgcagctgcccaagtcacccatgctcatgcaacgggctcattggttcgctaggctactagaattggtagacttcttttctgtggactgtcattggcgtccatctgggtgaacagatgcttgctcagagcttctcaggagaaatcactcgacagactgaactatgaatcttccaatactgagtacatgttcagtgctgtccgactttgctaacttttaaccctacttttgaaaattcagtaaggagtgtgcaaatgcatgcacaggacaaaatcctttcacaaaaatgtataaccatctactgactacagctgttctatgaaccacatggagagaaagaggatcaagcacaatggaggaataatgtaaatctctttttccacatcttctggagtgaaaggacttggctagttacatctcaagcaagctttgatagttgtcatgtttagatttttttttaaagaggaggatttacaaataaaggagttttgaacattatctagttctacctttattttaatttttatgcattcttttatatactgcatggcataaccaaaaaccaggcaaaagcaagtcacaaacgtgcagtacagaagcactatgctgtggccacaaacgcgcagtgcagaaacactatgctgtggccgttctccctcagcgaggggagggtgggattcttatcatccatgaatagtggtttcagtgcagggaaagaggaagttgagtttctgtgaaatctcagggaaggtaaagtcaagaggtgaaatatacaggagtctactaaatgttaaagaaagaatggctcccgactacccacaagtcacgtgggtgttctgctctgacccggctggtcctcatgactacacttgtctctacagaccttagaccagctcaatggacttctcagaaaggacaaccagggaatgtctgattcatgtgaaaaaaaaaatgtcaaaaaaaaaaaaacagaattgaaactaggcttcttaatttaacaaaatcagaaatttctcaatgaagtgtgtaaagctttaagaagtaaatctggcttcctgatttcacttcttccccacagttacaaatcaggctttaaagagccttgcaagttaggatcctccccaaaataccagaaaatggacggacatactaacacagtatgtcaatgtttggaacctggcagaataattcagtctcaatctttctctctttctccttctcatcccatgatgagatgtctttcatacacatgtaaattttattgataaatgcttattagaaatcagagaacagcaaacatataggcaatctaacaaagtaaaaatctaacacttagtgggccatagtagcccacccctaagtcccagcatttgggtggtcataatgaagtagggataatttaacacatcttttaaatgtaaatatttgccaaataaacaaattaaagaaaagagctggaaaactttccaagaaatttgaaaagcatacaataagaataaatacttaataactattagaaaaactcatgtatctgggtaattgtacacctgaactttcagcacttgagagacaaaggcagatgggctacacagtaagatcttatctgcaaaaatataaccagaggaggaaagcattcactacagggcccaggtgtagctcagcagtggatgctgcagatgaacggccccaggttctagtcgcatctaacaaagaagggagggaaatagaaatcttaccctaatacaagtagaatttttttttttttgaagcaggctttcaccagctcactctggctagactagaactggcagagatccaccagcttttcccatgctttttttgggatccaaattcaactccttatgcttacaaaa

SEQ ID NO: 1667 - DNA, 1814 bp, Mus musculus
ggcagggtgtccaggctccagcacctccagaggccgagcaggagagccgcgtgcggcgcaggtcctgttcggcgagcccgatccgcccgacccagcatgtctacctacccgccgatccacgcgcctgcctcttgccctcctcctccttctccacttcaggcccaagtacccgggcttccagcacccaccgagatgctaccggtactaaacagacccgagccctgaaacgaggagatgcatctaaaaggcaagcagaactggaagctgctatacaaaggaaggtggagtttgaaaggaaagctgtgcgcatcgtagagcagctcttagaggagaacatcacagaagaattcctgaaggagtgtggcatgttcatcacaccagctcactacagcgacgttgtggatgagcggtccatcatcaaactctgtggctatcctttgtgtcagaagaagctaggggttatcccgaaacagaaatatcgaatttctactaaaaccaataaagtctatgatattactgaaaggaagtctttctgcagcaatttttgttacagagcatctaaattttttgaaacacagattcccaaaactccagtatgggttcgagaggaagagaggcctcctgactttcagctgctgaagaaaggacaaagcggcagttctggagaagtagtacagttcttccgagatgccgtgacagcagcagatgttgacggttccggcgccttggacgcgcagtgtgaccctgcttcttccagctcttggagtgagcgagccagtgatgaggaggagcaaggctttgtttcttctcttctaccaggaaacagaccaaaggcagtggatacaagaccgcagccgcacacaaaaagcagcatcatgagaaagaaggctgctcagaacgtggactccaaggagggagagcagaccgtgtcagaggttaccgagcagctggataattgcagattagatagtcaggagaaagtggccacttgtaaacgtcctttaaagaaagaaagtactcagatttcttcacctggccctttgtgtgacagatttaacacttcagccatttctgaacataaacacggtgtatcacaagttacgcttgtaggcataagcaagaagagtgctgagcatttcaggagcaaatttgccaagtcaaatccaggttctgggtcagcctctggtttggtacacgtgcgtcctgaggttgcgaaggcaaatttactccgagttctgtcggacactctgactgaatggaagacagaagaaacactgaagtttttatatggccagaaccacgattctgtgtgtctgaaaccctcttcagcctctgagcctgatgaagaacttgatgaagatgacataagttgtgacccaggtagttgtggtcctgccctgagtcaagctcagaacaccctagatgcaacactgccctttagaggctcagacacagccattaagccactgccaagttatgagagcttgaaaaaggaaacggagatgctgaacctgagggtcagggagttctacagagggcgctgtgttttaaatgaagacactaccaagtctcaggactctaaagagagtgtgcttcagcgtgaccccagcttcccgctgatagattcaagttcccagaaccagattagaagacggattgttcttgaaaaactgagcaaagtattgcctggacttttgggtcctcttcagattacaatgggagatatttacactgaacttaaaaacctcattcagactttcaggtacattgccagggccaatcagcaggccacaagggaactcaacccaacagaa

SEQ ID NO: 1668 - protein, 596 aa, Mus musculus
QGVQAPAPPEAEQESRVRRRSCSDIRPTQHVYLPADPRACLLPSSSFSTSGPSTRASSTDATGTKQTRALKRGDASKRQAELEAAIQRKVEFERKAVRIVEQLLEENITEEFLKECGMFITPAHYSDVVDERSIIKLCGYPLCQKKLGVIPKQKYRISTKTNKVYDITERKSFCSNFCYRASKFFETQIPKTPVWVREEERPPDFQLLKKGQSGSSGEVVQFFRDAVTAADVDGSGALDAQCDPASSSSWSASDEEEQGFVSSLLPGNRPKAVDWQPHTKSSIMRKKAAQNVDSKEGEQTVSEVTEQLDNCRLDSQEKVATCKRPLKKESTQISSPGPLCDRFNTSAISEHKHGVSQVTLVGISKKSAEHFRSKFAKSNPGSGSASGLVHVRPEVAKANLLRVLSDTLTEWKTEETLKFLYGQNHDSVCLKPSSASEPDEELDEDDISCDPGSCGPALSQAQNTLDATLPFRGSDTAIKPLPSYESLKKETEMLNLRVREFYRGRCVLNEDTTKSQDSKESVLQRDPSFPLIDSSSQNQIRRRIVLEKLSKVLPGLLGPLQITMGDIYTELKNLIQTFRYIARANQQATRELNPTE

SEQ ID NO: 1669 - DNA, 115079 bp, Homo sapiens
  misc_feature (1)...(115079): n = A, C, G or T/U
ggccttgcaacactgacaaaggccatagtcatccatttgtatttgttcttttgagtatggaacaggaagaagagatagctgattccaaagggtagacaatgctaatccaattgaatatgccttgttatgaagtttctgaatcactaaaacagagatcaagttgtcgctcatcaagtatgctaaacatgggacaagaaattcggcaaatgtggaattataagacacttcctcctcccacattttaacaactcttgaatcaagatgacacatcacagtctaattggcagtgtttttttcttcttagttgtgcataaaataatacagcatcttgccatgaaatgctgtttaggttatgtttataacagactatgtgtaacaggctatgtacttaagacagaaacatgttctttccatgtttttgggttgttataagcacaaaatataagtgtattgtaaactataaagcactacacaaataggaggtggtattattagattttttttccctagaagactgaatattacaggtagtatgaagctggcaggcattcatatttaaaacaaatttaatttctgattctaggtccctctatcagattgtgagataaacgaatttcctaaaatgaaaaataacctcttcctatggatactgtctgccttggttgctaagacccattacctaccaatactgttactgcactcagccatggagccttatcatcccatatctcctcgtttcattcttcagtagtagctttgctatgcccaatccaacctcccaaagcagaggctgagcaatgccttgcctgatactcttccagactaccataatgctatcagatttagtactgcagacaccacagaggtaacccttgaaacatgtttagagagaaaattctagatttaagcagcagataggaaggttaggcaaaaaggtatagttttcaatatagcacatgaaaaatagtatgacattcaacagaatatttactgggtacccactctggccagatactataatctttctatgagcagcagtattcacattggcattgctattattggtttaagcagagtactcactaattagctgtaaactttactttggtgtagtattgacattttgaggtaaccatcaaggcatttagagatacaacaagaagtactctgatatcaaaattctcattacctgtttgtaatggctgaagcaaaagaagaatactttgggatatctgttttccagagggctcttcaatcagttcaagcaaacccaacaataattcctttggattgcataactataaaaatattcacaattgaacctgtttaatacaagttgtatttaaagccacattattactatttttaagaaggcatgtatcgacaaaatattatacaattatgtttttgcttaacattaaaattatttatacaattgttgaaaaaatatgcatgagcaaaacacagaatctgtgatggtcaagtaactataaaactaaaaagcaagaagtcaatggatctttaggctcaggtttcctttgagcttcacctgtccactctgaaattgccttaacagattctcaggggctccagcaggtgggacctttcaatcccatgctgcaagcctatttagactagtctggaatctcttttgtattttttgaacaggtaaaactttgcattgctttctgactggccatatcttatcatctcacttgactggttttttaaaagctcccagctcccatagtcaataactcatacagatggagctctccttccaatatatatttgggtatatttgcactgatcactaaacagtttcttataatatactttttctcagaatttatctttcttggccatcaaatattgactgtaaactctactagccttttacccagggtcgctttctaaggttgttagtcacaactgatctgtattctaccctattcctacttcaattttaatcacttgtattctaggccttccattttcttttagggaacataccacaaaggaaagaggactgagattttaatctagttccaatgttgccaaaagataaatgtgaccttgaactacctctctaaagcttgtattccacatctatacgataaggctacttgttaagatatagcttcccaggtctctccctggagatgctgaatcaatgggtccgatatgaggttaatatgaggttagacaattcttttatccagaaaatttgggaaatcctgaaatggaattgcctatccaatcaataagactgggtcttttctccaacgagttcctttctgcatgtactttcatgaaccaaaagctttcttaccaaacaataaacattaaagggaattataaaatactgctgtgtgttatgataaagagaaccttgttttgttaacttacctttaccaataaatcaaagatcaaaaaataaacttttcttttactatcctctttatctttacacaaaaggcatcgaacaacaggaccaacgagattccagcccatattcttgatgatgacctgtaaaaacattttcagagtaaagcaaacactgccatctataggactctcgcagtgtgctttcctatcttggaagagctcagaattgtttctgaaataggaagatgagacaagtgaagcctatgacatttcaccagagactttccagggttggctactaacagacatcaacatttttaaatagtttttaatatgttccctgaggaaaggcaaaagggtctttactttttatcaggcaagttggtgtttcccaagatttaaatagtgcctctatttccaacaaaagagttaatttgcttaatacaggtacttaacttccacagacaattttgctccccttattcataaagaaatccagccaatgctcatgtaccttttaaagttcttggagtctctaaatataatccttgtaatttataaaaaaaagaagggatacaacttcattaattttctctcctacatacaagtggcttctatgttcaaagatatttcagaatgcttaccatacaagtaaaagtttatctttataatgactaattcacattcattatcaaaaccactaattctcaaaggatcaacaatgtattccacttctctggcctgctttgtattttaactcatcagtatttaccaagcctacactataatattctagaggttagaaataaagtgaggaacacactggataagatcactaccctcctagagtccttctttaaaagcacggtggttggctgggtgcagtggctcatgtctctaatcccagcaccttaggaggctgaggcaggaggatcacttgagcccaggagtttgagaccagcctgggcaacctagtgagaccctgtctctgttttttaaagttaaatacattcttatttatttatttattttgaaactgagtctcgctctgtcgcccaggctggagtgcagtggcgctgtcccagctcactgcaagctctgcttcctgggttcatgtcattctcctgtctcagccccccaagtagctggggctacaggcacccgccaccatgcctggctaattttttgccttttttttttttttttttagtagagatggggtttcaccatgttagccaggatggtctcgatctcctgacctcgtgatccgcccacctcagcctcccaaagtgctgggattacaggcgtgagccaccgcaccccgtcttttcttttctttttttttttttttttaagcatggtggctcatgcctgtaatcccaacactttgggaggctgaggtgggtggatcacttgagctcaggagttcaagaccagcctgggcaacacggccaaaccctgtgtataaaatacaaaaattagctgggtctggtggcacacgcttgtagccccagctacttgggaggatgagtgggaggatggcttgagcctgggaggcgaggtagcagtgagttgtgatcacaccactgcaaaccagcctgggtgacagagacagaccctatctcaaaaaaatatataaataatgaaaaagcagatctaacccatctgacaagagattaataaccagaatagaaaagaagctcaaacaacactaaaggaaaaaatctaataatccgattaaaaaattggcaaaagatttgaatagacatttcccaaaaggcatacaaatggcaaacaagcatatgaaaaggtacgcatcattatcatcagagaaatgcaaatcaaaactacaatgggatatcatctcaccccagttaaaatggcttatatacaaaagacagtcaataacaaatgctggcaaggatgtggagaaaaggaaaccctcatatattgtcgcgacatgtattgtcgcgatctcagctcactgcaagctccacctcctgggttcacgtcattctcctgtctcagcctcccaagtagctggggctacaggtgcccgccaccactcccggctaattttttgtatttttttttttagatattgttggtaggaatgtaaattactacaaccattaatgagaacagtttggcagttcctcaaaaaatacaaaaatagagctaccatatgatccagcaatcccactgctgggtatatacccaaaagaaaggatatcactatattgaagagatatttgcactcccatgttcattgcagcactatttacaatatctcagatatggaagcaacctaagtgtccatcaacagatgaatggataaagaaaatgtggtacacatacacaatggagtactatttggccacaaaaatgaatgacatcctgtcatttgcaataacatggatgggactgtagaccattatgttaagtgaaagaagtcaggcacagaaaaacattgaacgttctcacttttttgtgggatctgaaaaccaaaacaactgaactcacggacgtagagagtaggaggatggttaccagaggctgaaaatggtagtgggaggcagggaagatggctaatgggtaccaaaaaaaaaaaaaaaagttataagtaatgaataagacctactatttgatagcacaacagggtgactatagtcaataactaattgtacattttaaagtaaatgagtataattggtttgtttgtaacacagaggataaatgcttgaggggatggataccccattctctatgatattcttattacacattgcatgtctatatcaaaacatctcatgtacccatcaatatatatgccttctatgtacccacaaaaattagaatttttttaaaaaaaatctgatctaggaagaagacaaaatgacacctataatacctcatcttgaccccagtcttgtaagataataaaaatagagtatacgatacagtagtctccccacttatctgcagggggtacattccaggacccccagtggatgcctgaaaccatgaatagtaccaaacactatatataaatactatacatgcatatctgtgacaaagtttaatttatgagattaacaataactacaacaattataatatactgtaataaatagtatgtgaatggtctctcacaaagcagtaaatagtaaatctttttatttttattttttttctttaattcagtcttatagttgaagataatagtaaatcttggtcaattttgatagtgtcacctggcaagaaaattaaattgtagtcagttttttgttgttgttgttgttgagatggggtctcactgtttcccaggctggagtgcagtggtacgatcttggctcactgcagcctccacctcctgggttcaagcaatccccccatctcagtctcccgagtagctgggattacaggggcgcaccatcacgcccagctaatttttgcatttttagtggagacagggtttcaccatgttggccaggctggtctcgaactcctgaccttaggtgatccacccgcctcggcctcccaaagtgctgggattataggcatgaaccactgtgcccagcctgtagtcagttttgaacattgtcttatcaatatctaaacctttgcatttagctgaccacatattgcaaaggtgattctcaaactattaagactaagcctcacatgtttaaatctatcccattagctattcagaagcatgctaaaaataaaacgctaaggcatgcaatgcctgaaaaatactttgtttatacttcccttttccttctgcctcactgatgtggtgctgatcctcatctccttggcaggcctcttctctctacctgtttcttaaattcttcaagatgggatcttgggcctcttctcttctgccccttttatgtgaactcaggtaaattcttgtttttttttttcactcctcaatgcttcaattacccaatctttaggtaattaaagtctcacagatatgtgtctcagagatctacatcttaattcctctatctctactgagctcaaaaccttattttccaattgactgctgtacttaaactcaaaatttctaaaagtcaactcacttgttccttcagaaaacttttccctctacttaggttgcctttttctgtttgatatcatatgttatccttttagaggctagaaacccagtcatttttgatgcctctccctctcaatcaagcaatcccctgtattctaccctaaaaccatacgccatacagcactaaccagaggtagagcagagtggttaggagctccaaaaccatgctacacaggtctgaatcttggatgttacataaaagctgacttacttttgggcaagtcatttaacttttcagttacaaaatgaacacctaccttctgagattttggagagactaattaagttaataaatgtaaaggactaaagacagcatctggtacatgtaaacatgcaataaatattagttgttattaatttttttattattagctgaaagctaagtactttagaaggttatcctgagaacgcaattagaaaaaaatcaagaagagtttaaaaaacataagatttattatattggaggttacaaagttatcataaacatgtatcaaaaactaaataaaatgtcctattttaataaaaaataagaagggtataagccatttgaactactgactaagagatgctataataatatatgattaaaaagttttaggaatcccccaaatccaatcaagatgccctggagagaaacacagatcaacatgattacactgtgatatcaagaaagaaaacttctaataaataagtagcactgcaaatgaagaaagagtgtgtacctagaaggaagatggtctttgtattagtctgttctcatgctgctatgaaaaaatacccaagcctgggtaatttagaaagaaaagaggtttaattgacatgcagttccacatggctagggaggcctcaggaaacttaacaatcatggcggaaggcacctcttcacagggcagcaggagagggactgagtgccaacaggggaaatgccagatggttataaaaccatcagacctggtgagaactcactccctatcatgagaagcatggggaaaccacccccatgattcaatcacctccacctggtcccatccttgacacacagggattattacaattcaaggtgagatctgggtggggacacagagccaaaccatagccgtcttccttataaggagtatccaaagacacaaaatttggcaggatgttgccaacacagtgtcccaggaaaaagttattcctgatccacaaataagatccttttccattgtggaggatgatttctcaaaccattgtaactggatgatactggctagtataatgacatatcgttttcctcctgttctgattctatgcacataaaatactgttttaattaaaatttggttttccatacacatttggctggaggagaatgggctgatcacccaaaatgaatatttagcctgcttgatatgtatatttctcattgtaaattaatgactcaaacaccatttttggactccctaaaccagaagtaattctgtttcttctaaaaactctttacttcaactatagcaattatttattttgcctcattattgttagttgtttacatgtttatgtttgaccagatggtaaaaaccttcaagtatatgactgtgtcttttcttttttttttttttttttctgagacagggtcttactctgttgcccaggctggtctcaaactcctgggctcaagtgatctgcctgccttggcctcccataacgctgtgattacgaacgtgagccactgcgcctggcctaaatatttctaattctttttttgttttcagttccctactgtgaaaatttaagtagattcttaaatgtttgatggataaatgactggatgaatagcatcatgtgattattctcttcccaagactgaaaagtaaacaccaagattgtacgcaccttattcttttcattttgaataatttctaatagctggtctgtgtgcccttcttctatgcatctttgcccagctaactgaaataggccaaaatcctcttctttaaagtcttgctcttctaggatttgctggcaaaaaaaaaaaaaacccaaaaaacaaacaaaaaaaagtatatgcaaataaaaattaaatacaataacttcttgatttatctatgaaaaaaggaaatctgtttaaattctagataaatgtaacgtaaataacacacgtatcaaaattaggattaccctaataaatactttaataagtgaccttgaaatctactgtaccagtgaaatctatgaaaaggatcaggattaaaatgtaaaaggttatttagataagtatgtcacctggagaaataatccaatctgcctcccccactcatgctctttacaggtcaaaaaaagcaaggattaaagaagataaacaatttgagtgaccacaaatataattaaaaacaatctgtgcccttcccatattttgaaaggtatttaattttacaaaaattaatacttacacatctctttattatagactgaagttcctctacagccattcttatttctcctagtttcgatgctaaaatctacaaatacaaaacacactgttaactatccgtgatattacacttaagtattcaaaagttatgtttcagtgtgataaattattagtaaatacaataaagaaaatggaaagtttttgttgttgtgttttttggtccaatagcatgctaggagaaaatgtaaagttttaaagttgaaatgttattactgaatcttagtatgtttgcctaagaaaataaagtgtttttttagaagcccttattgcatgttttaagttttctaggagcatagttttgaaagctactttgaaggaaaaaaaaacaaaaaaaacctctcgagcactcccaagaggcgaggcatatacgaactaaagggcttttaaaaagcaaagcacttcttttctgaaaaaaaatttccaaaaggtggacctgaaatcaaaattctaatcatcaggggatttttcatttttaatgtctcacctcacaaaaattggggtgcaacacaagcttatctatagggggtgaagattcagatgccctccattccatttctctctaggagttgcagtccccaaagtgatcaatccagctagtgaaatcactgtatcacacggagacaagacaacggcggccttcaggaggagaccatcgcttctcctggcggcaaggctcggccccaagccctcagtaggggcgcgagtcagcccggtcctcagggcagcgcgctggaaggcgagtgaacaccccagcgcgcgtgcgggctgcatcagaggaagccatgtcttccgattcctgctcgcctaggtgggcaggctccaccacctcgcgtggcctagtcggcccgcagcaccaagtccgccgcggctcacggccaaccgcgagccctggccaccctgaacctctccacaactccacttaccggccagaaccctcgcctctcccagccgccgccacctcctccggcgtcttagcccgctcttctggccccgccccgcgctacgcgtagggaggcggggcctcggggcgagacgccggagcgtgtccccgtccggcagactactctcccccatggcggacttcgctgggccgtcttctgccggccgcaaggccggggctccccgctgctctcgaaaagccgcaggtaggagcaaggatctcttcccacttttggaccctgaaagctgggccccgatctcgagttatagaccgcagcgcgcgggcgctcctgaaaggctgcttcaggggaggggttctcccaggtagagtaggccgaaagcttcccaccgccgtccgcacctcctgggaaagatttcctggccgcccctcacccctttacgccagtgttccaagatttccctcacgcggactgtggccccagcctctgagacaaaggacagtggaggccccgggaacccaggcctggggtccccgggtttcggggcaagtgactagggcagcgttggcagctggccttgaacctaggaccggtcctcctttccagattgcttgggtgcccagttctttaaggtgccggactcccctcttcccccagagaggacgtttggcagacggagagaggtttcccctaaaagtacccagatctcagattttcaggagtggttaattaagcaactatgatacagaagaaaattcaatccccaaagagatacattttaaccaagaaaaattagacagtaatcaatttgcaaaaacaaattgctctcccttcctatttcattttgatttacacacgattggacataaaatatgtggaaaagaagaaaaggtggtctacagtttgttatttgtgtaggaatctatcttgtacctaatgtgtttgtgtagacctgacctactgccaccatgtgtagcttaactgcggggatgcattttgagaaataagttgttagtcgatttcatccttgtgtgaccatcatcgagtgcacttacacaaacctagatggtacagcctacttacacactaggctatatggtacagcctattgctcccaggctacaaacctgcacagcatgttactgtactaagtactgtaggcaactgtatatctaaacatagaaaaggtacagtaaaaatacagtattttaatcttatgagaccgctgtctgtatgctgtccgtcgtttacggaaatgtcattatgtagcacatgactgtatttttattgtaggtactaaacagacaagtactttgaaacaagaagatgcttctaaaaggtatgacagctacatggacaactacattggcatatctacttatcttgtattacttgtaccaattttaaaacaataatggttacctttttttttttagagaaaattatcatgagagggaagggaaagatctgggaaggcctataaattctcacatagactgttacattcctctactccaggctttaagaaaaccaaactaagcactcagactgctagtgaaggaatgagtgtctgtagaaggtgtttgtttttcaccgcttcaggtacactctccttttattgctttatatgccagagactcactctccaagtttcgctgtcactccaagaaaccttttctgttctttgttacatcaagtccagattttcattaaaaagctgtcttgtactagttctggttctaaaaaggcaagatattaccacatatcacacagagtttctagaagaggagtagaatgtgaaggggattaaaagcatatgtagctatgatttttattttgtgaagactcactaatcttatattggctttggtcttaatttactcattctttcaaaaattatttattgagtataagatatgtcggacctgtgttaggctctgaagatatggtgaacagaatagacacagttcttgcctagtggaacagaggaataaataataataaattaattagttaattaacataaacaaatacataattacaaattgtgataagcactatgaaggaaaagactgtgatgttacgagaaggaataacgaagtctaatttagttggaggtgggtggcagggaggttggctgtgagttttcagcgaaagccttatgctgagacctgcgtgctaagtagacattaaccatacaaagagtatataaagacttatgtatgtgcagtgcaaaaagtagcttgtttcctttttgaaaagtattggatcaaaagtaacagcattagaaaacagaaatttggccggatgtggtggcttatgccggtgatcccagcactttgggaggctgaggtgggagtgttgcttgaggccaggagctcgagaccagtttgagcaacatagtgagaccttgtctctacaattaaaaagaaataaatatttttattcaaaaaattttttaaatatatttaaatttaagtggcaaaatagtgagttaggttagtattgtattttaaaacatggaatgttggacatgaagcttttaagtagattaagtttctctttcaaattttaggaaagctgaactagaagcagctgtgagaaagaagattgaatttgagagaaaagctctacatattgttgaacagcttttagaggagaatattacagaagagttcctaatggagtgtgtatgtgttaagttgacaaattattagttttgtagtataacatctttaaatctgtgcagcatgaaacttctttgcattattagaatctttgaatttgttctgagtcattagatgcagataacaatccatataattcatgcattttaaaataaacaactatcatgcattccttgtataatgactttaaaatgcactaatgaaaaataagtacgtaacaaggtgatgacacgtaatgtatatttcaaaattaataagagtggatttcaaatgttctcaccacaaagaaatgataaatatgtgaggtgatagatatgttaattagcctgatttgctcaatgtatacatgtgttaaaacatcacatactaccccacaaatatatacaattattattgtcaattaaaaagcaaaagaggccaggcacaatggctcatgtaatcccagcactttgggaggctaaggcaggcggatcacttgaggtcaggagttcgagaccagcctggccaacatggtgaaacctcgtttctactaaaaatacaaaattagccaggtgtggctcatgcctgtaatcccagctgctcaggaggctgaggcatgagaatcacttgaactcaggaggcagacgttgcagtgagctgagatcacaccactgcactccagtctgggcaacaagagtgagactctgtctcaaaataagtatataaataataaatgggaaaaaagaaaaatgaggatgggggagaaaaaaaaaaaaagaaaaagcaaatatattttacccttagtcatagttcttttaaccagtctgctaatatcacttgatttttttcaatttgttctaatgattgcaattccagttttctatattctgtgttgtgttattttaagtaacagaagaatattatttttgtcaatgtaatttcatcaattttcttatttcaaaaacctgaaatacagctcatttatgactcaacataaaacgggagaattaaattccgcattaaattttttttttttttttttttttttttttttgagacggagcctcactctgtcgcccaggctggagtgcagtggcgggatctctgctcactgcaagctccgcctcccgtgttcacgccattctcctgcctcagcctcccgagtagctgggactgggcgcccaccattacgcccggctaatttttttgtatttttagtagagatgggatttcactgtgttagccaggatggtctcgatttcctaacctcgtgatccgcccgcgtcggcctcccaaagtgctgggattacaggcatgagccactgctctcggcccgcattaatttttttttggccaggcacgatggctcatacctgtaatcccagcactttgggaagccaaggcggtaggatcgcttgagcccaggagtttgagaccagtctggacaacacagcgagaccctgtctaaataaaaatttgagaataaaaaaattttgaaacagctttactacattaaaattttgaatggaaatttctctttacatttttgtaatccttaagagggcaaattaaaactcaaagcttctattacaaaaacacttcttagtgtagttgatagatctttttctaaacaggaatatgaacatgacaattcatatttttattgacacaggtaactgcatcagaatctgcatatttgatgacaccagaaaagacaaaggcaaatatgcttcatttgaaacataaaacttacatcactctcaataaaaagtatttctgtctctgtgaaaacagaaaaacttgttaaaagatctcaaagttatgaacaagaatcaaaattatttgatcatgaagatgtcaaaggaaaatatttgatgttagcttataaccatcacctcaccactctgtacagatttttcagaagtaggaaaattttgcacaaactgtgttctgcagtaacaatgacacttttgaaatactttgtttttaaagattatgctttaaaaaataggtaaaattatattttattattttgtgatttagttaattttttaaataatactttttcaaaaataaaagatactgttgtcatttagcttgtgtatagctatagcatcacttcttcctcatgcctcagaattatttcatttaactatataatctacaaagatgcagagactactgtggcagaaatttttttaataataactttttttttgaatgctcactatatgttgagcacttctctaagtgattttgctttattttctcctctaattctaacctctaacttatgaggaaggtactattgctatccctgtgttttcagataagattgatgaggcttagagagctgataaatgaacttttctattaaactaggaggaaataaccctctcatttcattttaggggaggttcattacacctgctcactacagtgatgtcgtggatgaacgttctattgtcaaactctgtggttatcctttatgtcagaagaagctgggaattgtaagtaactcattttttttaaaatataggcttttattattttcatttagcaaaatactttgttgtaagaataagaaataaaacctaaggtcatgaactaaaggcatggattggccaatgatatgatatgtagatgacttaatcttgtaacataacgttcatgtttattatttggattcttttgtaagctgtactttcttttctttaggtaccaaaacagaaatataaaatttctaccaaaaccaataaagtctatgatattactgaaagaaaggtgagtttaaaggctttcattgtggcaattaattttttttctttactaaccactatcctaacaaggcatggcaattaatttttaatgatattaaataggattctaaaagaaactttaaaatcttactggttagaaaatagtgatgttaaaagtttgattttatttgtaaatatttcaatcaaggtattaaaaatttttttgcttaagcttcaattaagacttgaacatttaaaagtgcatattggcacaaatctgggcaaataaatcatggaacagaatagagagtcagcagcagactaaccacatatgtagacacttgatatatgacagcgggagtattgtagatcagtagagaaaggatggatttttcaataaattatactggcacaattagttatgcaaatggaaaaaattaaaattgatgcctatctcagtctctatacatagatcaattttaggtagattaaagacataaatgtaaaaggtagaagacactatgggagatgctggtcgtggtggctcacacctgtaatcctagcactttgggaggccaaggggggcggattacctgagctcaaggagttggaggccagcctgggcaacggcaaaaccctgtctctacaaaaagtacaaaaatcagccaaaggtggtggtacgcacctgtagtcccagctactcagaaagctgaggcacatgcatcgcatgaacctgggaggcagaggttacagtgagccgagatcatgccactgcactccagcctgggcaacagagcaagacactgtcttcaaaaaaaagacaatagaccgggcgccctggctcaagcctgtaatcccagcactttgggaggccgaggcgggcagatcacgaggtcaggaaatcgagaccatcctggctaacacagtgaaatcccatctctactaaaaatacaaaaaaattagccaaacgtgatggcgggcgcctgtagtcccagctactcgggaggctgaggcaggagaatggcgtgaacccgggaggcggagcttgcagtgagccgagatcgcaccactgcattccagccggggcaacagagtgaggctccgtctcaaaaaaaaaaaaaaaaaaagacaatatgggaagatataaacttggggtagagagacttcataaaataagatggaaaattataggccaaagaggagaaactgataaacatttctatattaaaatgtaaaacttttgttcatcagaagtttcaaaaaaaaaatgaaaagagaagccacaaagcagaatgttaactgaccatagaatcatatctagaatatatgatctataagaaaaagacagacaaactaatagaaaaatttacacaaggaacttgaatggctaataaacatatgaaaagatgctaaatattatcagtaatcagagaaatagcaaataaaaacacactgagttttgttttcacagcccacaaaattgcgaatgttaggaaatctttttgcaactagtgggaatgaaaattggtacagcctttttgagaaatggcttggcatttgtctggtgaagtctttgcacattctctataattaagcctttctattccttggtataaaccctaaaaaaattcttacacatgtacaccagcatgtatgtataaaaatgtttatagctggataaacaatgtcgtatatacacacaatggaatattagcctttaaaaaaaggaaggaaattctgacacatgctacaaggtggatgaaccttgaagataatatgctaagtgaaataagccagcacaaaaggacaaatactgtatgctttcacttatatgaggtacctagagaagtcagattaacagagacagaaagtagaatgatcatcaagagaggtgggaatgggaagttagtgtatagggtttcagttctgtaagataaaaagagttctaaagatgaatggtggtaatagttgcacaacagtgtgaaggtacttaataccactgtgctatatacttaaaaatgcttatgatgataaattttagattatgtatattttaccacaattgtgaacattttttaattgtaaaaaaaagtttatagtaacattgtagtgatagcaaaaaaattagaaacaactcaattgtctataaatggtaaagtgtaatactctaacaatggaatgtagtacacagtgaaaattaataagctacaactacttgaatgaatcttaaaaacataattttaaacaaaagaagtggctaggtacggtggctcacacctataattccagcactttgggaggccagggagagaagatagagaccagcctgggcaacaaatagagaccccatctctacaaaaaaataaaatagccaggtgtggtggcacgcctgtagtccaagctactcaggaggctgaaaccagaggattacttgagcccaggagtttgaggctacagtgagtgagaccctgtccctaaaaaaaataaaatttaataagtgaatgaagtaagataagaatgtataacaatattattccattcaaaaaaatgtttaaaaataggcaaaactgaatattttttaatagggatatgtacacaggtgctaaaactgaaaggaaatgagggaatgattaacaccaaatttatggtagtggttacttctggggaatgcggagggtgatgcagttgggaaggggcacatagaggccttcaaaggttcagtatcttatttcttaccttgggtggtagatctgtaggtttccattttattctttgaacgatacatttatgttttatactctcaactgtatgtaggtaatgtttcatgataagaaaaaaactagatttataatgttcttttcagtctttttgcagcaatttttgttatcaagcatctaagttttttgaagcacaaattcccaaaactccagtatgggttcgagaagaagagaggtaatttaagtcattgtgtatatacatttgttcatatattctaataatttgtttctgctttttgagattagctgagagtaagtctagttttctgtaaaaagttaccattttatatactttatggggaaatggttatattttaagcatagctattaaggattttacacttaaaatcagaaaatgcatacatacaaatgttatttgtttgttgttttagctttaattgcaaaatcagaactttaactccagtgtcctgtgatgctagttatgtctgtgaatcctgttaatataataatcctggaggaagaatgttaaattttttcagaagttactgggtcttaggatccaggtgaactctgctatgagaaaggttagaaagttcaggttcatttaatctttataaaaatcagtacactattttatcaatttaaagacacaattaaaaagtaattttttttttttgtaaaaagagtttatgggcaatgctggagtttagcctcttgggaaatgatttaaatactggcaatgttttactagatgctaaagtcaagaaaattttattattgagggtgaaatggcatgataatataaaggtaacaagttatccttatggtaattaaactgtattgcctagaaattccaatgaaatgcttaatgagataatgcccaaaataaattcatgtttgaaagagtgtattatagcaacacaaggcagtgttacttgtggtaaggtaggacctatgctaaataaactaatgacctaaacataatgagatgcaggttagctaaaaagctctggctcaaaaaaaaaaaagcaaaccttgaagtcttttctgatgcgtaaggcgatgtaacaccactctcaattcaaataacatcaattatgctgacaacagcacctgtgatggcagacacctctgcctgccgatccaatcctgtgtggtttaggatatggaaaacttaacactgtgtggcccttgataattgagttaaacataattaagactaaattgttcatcatttcaccaccagtctgccagcttccttgttgggaaaataaaagactctggcattgttcgacatgactgggaagctaagagtacttttttacttatcctttttctcctttcttaatatttctgtcactagagctgcccagtacttccccagtcctctgagagcaacatgttttattccccactgaaaccagtgtttcctcaagttatccttaactttgcttccaaagatattttctctacatcttaaatttaaccctttgtgccaccctcatatctacctcaactgcttcaaaaccatttaccaaattacctttcctgccatctctgttttcttcaagcataggtattggtccttcctttagctaatttaaaacaaatcttccagcctggtgtagtggctcatgcctataatcccaacactttgagaagccaaggtgggtggatcacttgagtttaggaatttgagaccagcttagccaatatggtgataccctgtctctactaaaaatacaaaaattaattgggtatggtggcgggcacctgtaatcccagctactcaggaggctgaggcaggagaatcacttgaacctgggaggcggaggttgcagtgagccaagatcgtgctgctgaactctagcctgggccacagagtgagattctgtctcaaaaattaaataaataaataaaatgaagtaaaacaggtcttcctgtaaccttttcctaaaatctcaccatcctctattcagaatgctcactgtttcccaaaacttgaagcccttttactttatatttgcagttcttgaaattctaccttagctatatacccttcactacctcactaaaaaagaaagatgaaaatgtcctttgtgccgggcgtggtggcttacacctgtaatcccagcactttgggaggccgaggggggcagatcacaaggtcaagagatcgagaccatcctggccaacatggtgaaaccctgtctctactaaaaatacaaaaattagctggacgtggtgacacatgcctgtagtctcagctactcaggaggctgaggtaggagaattgcttgaacctgggaggcggaggttgcagtgagctgagatcgtgccactgcactccagcctggtgacagagcaagactccatctcaaaaaaaaaaaaatggactttgtttctctaatctaaatgaatcaacttaatttacatttaaattgtgcagtaagtgcttagtacctggcaggctacacacatacacatacacatacacatacacatatacatatacatatacatacacatacacatacacatacacatacacatacacatatacaagtataaaacccaacctgtgaatttaacaatcactggatgccagaacatgaattaaacaagtttgtgttgactttaatggggacctgtcctataaattagcaaggttaggacattgcataatgagaaactgtgagcaaaagtgagaaaataaacttgtgggaatgggttgggatattgaacattggcccacttgaaatttgggaaacgagaagataacaataggtaaataacaaagggccaggctgagtgtggtaaaccctcaagtattggggagccatcaaatgtttttgagcagaatttattctgatattggtgtacaaaatgaattaaagaagaatcataattaaaagagctaaaagggtccttagagagatttaatccaaccccttcattaagtgtatttcttaaactagtgatccgtatgagaccaggattctatttattatattccacttgattagaaggaaacagtgaataatctatatatatgcatctgcctcattgtatagcataactgtagcccttaattatatataacacttgtcagtgtataaccatatcagtatcttttatatctggatgcatttgtgttaccttaatttccaaattcttaggggcagggattatgtccatgctatttaatgaatccactagaggtcactgttttttcagacatctttttacctgtgccaaggatcagaattctagaattttgtatttttaaaagcttgtctagctattgcacatttaagctctacagaaatgtgatattttaaagaatgtctgtttacatatggcatgggatacaatatcctgagtcagtcttcctttagggaggaaaaaattgcttcttttaaatggtggcatgtagtatttaatgcagagatatttttattagcttacaatgagtcatgataaagaataaattgcatcataatagtaattttaataatcataattttaaaataataataaatttttatggccaggtgtggtgactcacgcccgtaatcccagcatttgggaggccgagactggtggatcacctgaggtcaggagttcaagatcagcctggccaacatgacaaaaccctatctctactaaaaatataaaaattagccaggagtgctggaacatgcctgtagccccagctacttgggaggctgagtaagaagaaccgcttgaacctgggaggcagaggttgcagtgagccgagatcacaccattgcgctccagcctgggcaacagaacgagactaagaataaattgttaaatccacccaaaagattagatatcttattgaaatgacttccaaactttcgaccactataataagtgcattttacattatctcatatatgcatataactaaaactaaagcaaaacttctgtgaaacaatattattcttactacatgaaatgcctctgatattttctactctgttgcttttttaaaatgctggcagcaacctacttaattgattggtcctgatctgcagtttgaagagcgctgttttgttggatttagctcacgtttttggttgttttactgtaggaaacctgcttctcaacactaagtctcagtttcctcatttgtaaaaggaaaaagttgcattcaacttccgagttccctttggttctaatgatttacagttctaagccaattgtgtcattagtcattgctactatagagaaagttttctacataaggaaatatttattaaaatgatgaaaattaaaattatctgcttaagactagagaaacttatactaccttgtagaaaggtctgtctcaataattttgaataaagttactgactttaataatttgatctctttagtctgtaaaagtgaaggctgataaaatgtagatcaaagcttttaaattatgaagaaaaaccaggcatgttttagagcatgtcctgaacaatttgaacttggcatcactgaggatgccatgaccttacacaccatttggaaacagaatattgaatttgacctaatttggtctttcttacattattgtgaaagccagtaagtacaggcatatcttggagatattgcaggtttggttccagaccaccactatactaaagcaataaagcaatcatggattttgtttcccagtgtatgcaaaagttatgtttccactatactgtagtcttttaaatgtgcagtagcgttatatctttaaaaaataatgtacataccttaattttaaaatattttattgcttaaagatgctactgatcatctgagccttcagcaagtattaatctttttgctggtgaagggtcctgttttgatgtggatggctgctaactgatcagggtggtggtgtctataggttgggatggctgtggtaatttgttgaaataagacaaccccaggtttgctgcactgatcgacttcctttcactaaagatttctctgtagcattagatgctgtttgatagcattttacccacagcagaacatctttcaaaattggagtccggccaggagcagtgacttatgcctgtaatcccagcattgttgcggggcaaggcaggaggatcacttaaacaagacatttgagaccagcctgggcaacatagagggacccatctctacaaagtatttaaaaaataaaaaattagctgggtgtggtggcacacaactgtagtccttgtagctacttgggatgctgagactagaagatcacttgagcataggagttcatggttgcagtgagttagatcacaccactgcactccagccttggcaacagagcaagaccgtgtctcaaaaaaaaaaaaaaattgaagtcagtcctctcaaacttcattgctgcttatcagctaagtttatggaatattctaaatcttgtgttaccatttcaacgatgttgacagcaccttcatcaggagtagattccatctcaagaaaccagtttctttgcctatccataagaagcagctgtatatccgttcaagttggattatgagattgatgcaattcagtcacatcttcaagctccacttctaattcttatcttgctatttccaccatatccatagtgactacctctacggaagtcttgaacccctcaaagtcatccattagggttacaatcaacttcttccaagcacttgttaatgttgatattttggcctcctcccatgaatcccaaatgttctttttttttttttccttttttctttttttcagacagagtctcactctgtcacccaggctggagtgcagtggcgcgatcttggctcactacaacctctgcctcctcagttcagtggcgaaatctcagctcactgcaacctctacctcccaggctcaagcgattctcatgcctcagcctcccaagtagctgggaccacaggcatgcgccaccacacccggcttatttttgtatttttagtagagatgggggttttgccatgttggccaggctggtctcgaactcctggccccaagtaatccacgcaccttggcttcccaaagtgttgggattacaggcatgagccactgtgcccactcccaaatgttcttaatgacatctagaatggtgaatcctttcgtgaaggatttctatttactttgcccaaatccatcagaggaatcactctatggcaactatacctttaggaaatgtatgtcttaagacttgaaagttgaaattactccttgacccatgggctgcagaatggatattgtgttagcaggcatgaaaacaacactaatcttgtacatttgcatcagagttcttgggtggctaggtacattgttaataatcagtaatatttggaaaggaatcttttttttttttttgagcagtaggtttcaacagttggcttaaaatattcagtaagccatgctgtaaacagatgtgcagtcgtttaggctttgctgttccatttatggaacacaagcagagtagatttagcataattcttaggggccctaggattttcagaataataaataagcattggcttcaacttaaagttaccagctacgttagcccctaacaagagagtcatcctgtcctttgaagctttgatgccacatatttacttctcctctatagctatgaaatccctagatggcatcttcctccaatataaggctgatttgtctacattgaaaatttgtttagtgtagctatcttaatcagtgctcctagctagatctgttggataacttgctgtaccttctacatcagcacttgtggcttcaccttgcacttttatgttgtggagatggcttctttccttgaatctcatgaaccaaactttgctatcttctacctattcttctgcagcttcctcacctctctcagtcttcacagaattgaggagagttagaaccttgctctggattaggcttaagggaatgttgtagctggtttaacctatccagaccactaaaactttctctataccagcaataaggctgttttgcttttttgtgttcactggactagcattttaaatttcctttaagaacttttcttttgcattcacaacttgcgtactggcaaaataggcctagcttttggccagtctcagcttttgacatgccttcctcactaagcttaatcatttctagcttttgatttaaagtgaaagaaagtgtgactcttccttttacttgaacactcagaggccattgtaagggtttttttgttgttgttgctgttgctgttgttttttggtttttgggtttttttttttttgcatttagtagtgcattttatttattctaagttgcatacatttttacatttttaacatctgtgcaattgaaatggatctcacaactgatagactcttagattacagctggacacagaggctaacaccagtaatccagcactttgggaggccaaggccggtggagcacttgaggtcaggagttcaagaccagcctggccaacagggtgaaaccccatctctactaaaaatacaaaaataggtggtggcatgcacctgtaatcccagctacttgggaggctaaggcaggagaatcacttgaacccaggaggcagaggttgcagtgagctgagatggtgccactgcactacagcctgggcaacagagtgagactccatctcaataaattaaaaaaaaaaaaggctgggtgtggtggctcacacctgtaatcccagcactttgggaggccaaggcaggtggatcacctgaggtcaggagtttgagaccagcctggccaacatggcaaaaccccgtctctactaaaaatacaaaaattaaccgggcatggtggctcacgcctgtaatcccagctactcgggaggctgaggtgcgagaatctcttgaacccgagaggcagaggttgcagtgaaccgagatagtgccactgcactccagcctgggtgaagagcgagactctgtctcaaaatcataaataaataaatagaaattagcttttcagagagacagaggtcttgtcttgttgcagtctcaaaaaaaaaaaaaatttaaaggaaaagcagtattcaatgtcagtgagtcttccattgtaaagttactaattggcctaatttcaatattgttgtgtctcaaggaatagggaggcctgagaagaggaagcgagatgggtgaacagctggttggtggatcagtcagaacacacacatttatcaattaagtttgacattttatgtgggcttggttcatggtaccccaaagcaattacaacagtaacatcaaaaattaccacatattactataacagataataatgaagtttgaaatatgataattaccaaactgtgacacagagaacacattttgttggaaaaatggtgctgacagactggcagacacagttaccacaaacattcaatttgtaaaaaatgcagtatttgcaaagcgcagtaaaggaaagcacagttaaacaaggtatgcttgtgtaaatttatttaccagattttataataccaaaaccaaacaatatcccttagaatttataagagtaatatctttatatcacagtaagctcactacctcattggtatagatgtttaaataaatttaagatttagacaaattcataaattctacctccatacttttataaggttttggagtcagaaagggccttggaggttttctagctcctcatctttaaggtatgtaaaatatctggagtagatccgtaatgtcatggagactaacagtggttctcacaaaatgtctcctgataccctgttagagacaaaacattgacctagaatggtctgggtcgtgacgcactgtgatgcttctcatcttgtgagttagaaatttttcacccacttggtggccagaaacagaccacatagagttttgatgctctgagacagtgtgctcacataggtaattatatagttgcagttataaatcctgtttggctaaatgtaggctctgacaagcctttgaaggtgggaagtctcctgcattgtaatctaaaatcttaaatctaagaaggacaaatgtggaaaatcaaattatgattttaaagatgaaattggggtgaatggttaatgctgacagagctaaaagcgccatcatctggtccagagtaggggatttcacacgttgcttcttggcagtaaacagtagaatctcagaggtgcggaagccaaaaacctctgcagaacaactataacctcttcctgaacagccacctctgttgcttggtatgcagaataaaagctttctgaaacagggtttgacatgtctcaaaatagatttgaaaagttctcaccatacctgctgcttctgttggtttacatataacatacatattccaagtgatatatatgcacatatatataaatatgtacatatatccactaagttctttggcataagttatttctagttttagatttactttgctaaaatgaaaaccaatcatctaatttataccttagtgaaagtaagatgaaaatgtttataaagaaacagcttacaagcattctttaactaggatggttacatatttttgttttgtaaactgagctttcacaactatcttcaggacaacaaaaattgtgggaagataatagaaaatacttagctggaagagaaatggcactttctcttcaaacgaaagaaatttggatttcatctaagaaaggacagaaaagaaagagcaatgtaacttggtgcttcattctttctaaaacagcacctagcaaaaacaaactggaattttatatcgaatcttgaatctagtttatttcagtgtcaggtaccattctttatagattggggatgagggaaggtatttaaggttcctttaagatagttaagatctagaaacaatgttgagtttagttcttagaaaaattacacaaaggagaagaaaatagtttgtaaagtatattgagttcctgtgaaagggattaagcaaaggtggtatccttgcaacttttttgggtctttttctaacactaaatagaggcaacaggatatagaaagggcttggcctaattcgaatcctagatttactacttgttagctatgtgatcttaggaagtcatttaacctctcaaaacttcggtttcctcatctataaaaatagagttgaaggctcggtgcggtggctcacaactgtaatcccagcattttgggaggccgaggcgggtgaatcatgaggtcaggaattcgagaccagcctggccaacatggtgaaaccccatctctactaaaaatacaaaaaatgagctgggcgtagtggcgggtgcctgtaatcccagctactcaggaggctgaggcaggacaatcgcttcaacctgggaggcggaggttgcagtgagccgagattgtgccactgcactccagcctaggcaacagtgagactctgtctcaaaaaaaataaaaataaaaatagagttgtaaattgtgtgaggattaaatgaaataatgtgtaaaaccatctagcagacaatttgggaagatgaaaaagtgctggagatgcatggtggcgatagttgcacaacagtgtaaatatacttcatgctactgaactatatacctaaaaatgtattaaacggtaaattttaccacaatttaaaaaatccacctagcatatggtaggtgatgcctaccttatgctttttcccttgccttctttaaagatacaattttcttttaattctcaaaaaataacaagttgtatagcaggagatgttgcataaagctgtcttaaattgcattcataatttacagtaatgtttatatattttgattaccatttgattgagctacacttggacctcattcttgtttggaactattctgccttcaagatcttgaaataagagcttcccgtctctgaccacaacctctatctcaatctgcagctatcactcctgagtctgctttgtgacctcattttgacctcctatctctagcctagctctattcttctgagttggcagaccctcttacttttgttttcttgagctctacagtcagcgattacagtgtcctcttaaacaattgtagattctttctcccttaaccttctggcatgtccaccttcccaacctccagtcatactttttttctatttagcttgctgaacattttggggaaagttctcaaataagaccattagcgctttagataagctatctcatttaattcagtcctcttagcatccctggggaaatattatgttactcactttatggatggtggaactgaggctcagagtggtatggtgactcacccaaggacacttagttacatatagatttgggatttaaacccaggtctgtctgatatccaagcctacattcattgtatccctttggccctgttctctctactatgtttttcccaccttttttttctttcttactgactatagaatagaccttttctactctcaaactttgaatcgaccaccaaccatagtagatagtttaacccactttactgaaccaattggaggcatccagcagaaactccttcaacattattttcttcatatgggctctcatttctctgcctcattgctgataaagtaccctcctttatcttactgattccactttctctcctgggccttgctttatgatttatttgtattctgcctcctttgagatatcctttcatattgattattttccctctaccttaaaaaaacctgaaaaatatctatgagcagtcttatagtaattggtgatctcagtgagagccatttcaggagagaaatgagtacagattccagaaggcagaaagctgataactgagtaggaaatatggaagttgaaaatgatgagggcagacttctttaataaaggcttacgatgaaatgagtaggggctgtatgatcaaaggattgtttgtttgttttttttaagagattgggtagatttaaacacgattacatgctttaaaaaagagaaaaaagggagaggtttgtagagtaaataccccagagtggagattcaagggattagcctcaaatgcctttatatacagactgtatccatctttataagcccagctgaaatgacacctctctgaaactccttttgattggctcagaagcaagtttttctctgatttcctgtagcagcttatacatctctcatggcatttaacacatattgtcttgaataacagtgtagttattatgagctttactgtctgggtttgattcctggcttcaccacctactagctgtgtgattttgggcaaattgcttattctctctgtactcagtttccttatctataacatggggataatattagtagctacatcgttgttatgaggatcaatatctgtaaagctcttagaacatgcatttttcttctactaaattttaaggtctggcaggcgcggtggctcacacctggtaatcccagcactgtggaaggctgaggtgggggcagtggggagcgaggggttgttactactccaatgtaactgctttctcagaaattaaggcaaaaagtcttactgaccatgtaaaggaaatccaacaattataaacagtctctgcctttaaggagcttatagtctagttaagaaaccagacttaaacatatgaaaagttaaacattggccaggcacagtggctcatgcctataatcccagcactttgggaggccaaggcaggaggatcacctgaagtcaggagttcaagaccagcctgaccaacatggagaaaccccatctctactaaaaatacaaaactagttgggcatggtggcacatgcctgtaatcccaactacttgagaggctgaggcaggagaatcacttgaacccgggaggcagaggttatggtgagctgtgatcacaccattgcactccagcctgggcaacaagagcaaaactccatctcaaaaaaaaaaaaaagaaaaagaaaaagttaaacatttaggtaatggttctagtagtaggccataaaggagttcatgattaattatgttaattgtacagacaatgatgactctggaatttagggaagggatttactttagtccaagttagtcaaggaaaactttattgggctggtggaatttgaacttaaccctgaaaagtgagtatagtttgggtaagagagagactaatccagatttcttgttgatgaatttcagagtactttgtcctttaatttttttctttttttttcttaagatggagtctcgctctgtcgccaggctggagtgcagtggcgcaatctcggctcactgcaacctctgtctccctggttcaagcgattctcctgcctcagcctcctgagtagctgggactacaggcgcgcaccgccatgtccagctaatttttgtatttttagtagagatggggtttcaccatgttggccaggatggtctcaatctcctgacctcgagatccgcctgcccagcctccgaaagtgctggggttacaggcatgagccaccgcacccggcctaatttttatttctgtgttcttattacaggcatcctgattttcaactgctaaaggaagaacaaaggtatggttgaatcagtatcatttaccatttatatatttatgttaatagaaacattaggagtgaaccaggtgatatgagctcttggacttcctgtgctgatgcattatgtaagtgtcccattctagcccacacaaagaaatatttgacctgttcagctttttcttttgtgatggtaagatgatgtgtttgatctgtatgatttattgtacagctgttcctcccgaggaaatctaatttaacctgttgaaatatgacataaacacagcctccatctcagataccatgcttctttgtcaactagattgtgcctattacatttgttgaaaggtttttacagtcctataggatttcaaaaccagtaatgtaccagttacttaattatttgaaagagcatctaaagcattaatataaattccaagttgtgattttctttctaaactttcctcatggtattgtttgcctgaccatggccatctctcaaaacacatcccttaactctcagaataaatgttcctagttaatagtcactaccttagtcacatggcgttgagcacaaataagagatatttatttattgatgtatatctttatagcttcagagtagtataaaaacataattgccttaaaactccaagagaaagtatgaaatacatgaaagttaaattgttctaatttttttgagcttacacctatttttacttttcttctgatgcaagagacagccccatggctatataggctagattctaactaaaagatggtatctaagactaaactaacttttcatcttttttcttcattcccatccatgaccttgctttcaacttttatatatatatatatttttttctttacatttccccacagcttgcttcttgacccagagtctttttcatcctgatcttttaaagttttgatagtgtctgtgctttagagcatccttgtttgtttcaagtttgtattggcaaagctactgttgccttccctttttcgtaattcttcatcttattcaaatctaatctgaaaattgaagaacattgtcagggaaaacttttgtcttttattgttagcatattgttgtaactctggattttcaaatttaaatatcttttattgaaaaatgttgatttgctaacttgttctgctatgactttcctgtgattttcattctgtagaattttctgtacaacaatcaaccagaattagaaaatgtttacccatttatttttatcattttatcttttcaaatctaaacacaattcctgtaatttttttttttatttaagaaaccgataatgaaattttctttcttttttttttttttttttcaagacagagtctcactctatcacccaggctagaatgcagtggcgcgatctcggctcactgcaacctctgccacctgggttcaagcagttctcctgcctcagcctcctgagtaactgggactacaggcatgcgccaccactcctggctaatttttgtatttttagtagagacagggtttcactatgttggccaggctggtcttgaactcctgacctcaggtgacccacctgccttggcctcccaaggtgctgggattacagatgtgagtcaccacactcagccaaagttttcaaaagaaaaactttttttaaaaaggtcagccagtaatcccagcagtttgggaggccaagacaggtggatcacttgaggtcgggagtttgagaccagcctggccaacatgatgaaaccccatctctactaaaatacaaaaattagctgggcatggtggtgtgcacctgtaatcccagctacttgggaggctgaggcaggagaatcacttgaacctgggaagcagaggttgcagtgaaccgagatcttgccactgcgctccagcctgggtgacagagcaagactccatctcaaatgaataaaaataaaataaaatacaaaaaataaaaaataaaaagctcagccgggcacggtggctcacccctgtaattccagcactttgggaggccaaggtgggcaaatcacttgaggccaagaatttgtgaccagcctggccaacatggcaaaactccatctctactaaaaaaatacaaaaattagccaggcgtggtggtgcccacgtgtaatcccagctacttgggaggccgaggtgggagaatcgcttgaacctagggggcagaggttgcagtgagctgagttcacaccattgcactccagcctgggcaacacagactttgtcttaaaaatatatatttatttttatattatttttcatattatatattttttaaactacatatatactttatatattatatataatatacattatatatgtacaagtatatattatatatgtaaatatgtgtacatataaatatatactttatatttttatatatttatatatctttatatttatatatatactttatatatatatttatatatatatatatatttgcaacaacaggcaaatccaaatagtgcagtaggatagcattatcaagttttttaaaaagttttgctgtactcctgtaacaattttaaaataattgggggaaaaagatgaaggaagaagacagaaggagaactatatcaaaaaatatattattaacagatgtactgaaattataggcttcttctgaaatttatatatcagaacctagaaataaggttttgtctggggaataaaaatttctaccttgaaagttacaatgtataaatactatggggtactttacttttctattgttttcgggttttatttgctattttttatttagttattttatttctctttcattctacagtggccattctggagaagaagtacagttatgcagtaaagccattaaaacatcagatatcgacaatcctagccactttgaaaagcaatatgaatctagttcttctagcactcacagtgatagtagcagtgacaatgagcaagactttgtttcctccattctaccaggaaacagaccaaattcaacaaatattagaccacagctgcaccaaaaaagcataatgaaaaagaaagctggtcacaaagctaactccaaacacaaagacaaagaacagacagtagtagatgtcactgagcagttaggcgattgcaaattagatagtcaggagaaagatgctacatgtgaacttcctttacagaaagtaaatactcagagttcttcaaatagcactttgcctgaaagattaaaagcgtcagaaaattctgaaagtgaatacagtaggtcagaaataactctagtaggcataagtaagaaaagtgcagagcattttaagagaaaatttgccaaatcaaaccaagtgtctaggtcagtgtctagttcagtgcaggtgtgtcctgaagttggaaagagaaacttacttaaagttttgaaggagactttgattgagtggaagacagaagaaacattgaggtttttgtatggccagaattatgcttctgtgtgtctgaaacccgaagcctctctggttaaagaagaacttgatgaagatgacataatctcagatccagatagtcatttccctgcctggagggaatctcagaacagcttggatgagtctttaccttttaggggctcaggtacagccattaaaccactgccaagttacgagaatttgaaaaaagaaactgaaaagttaaatctgaggatcagggagttttacagaggacggtatgttttgggtgaagaaaccaccaaatcacaagactcagaagaggtatgtcttacagacattgagtttttccagatcgttaacatttggaaaactcaccacagcaaatcttggagcaggaaggatattgaagagttaattgttaaattttcaaatagtttctttagtcattctgccttttggtttacagtgccatctccactgttggcattactattttacaaataagttgacgtttacccctagcaaattttcatcagtgtgcaatatttttttctaatgtaaaaatagcctaaaatggtgggacaaagttttccctaattcttcatacaataaatgaagcctctgaagaggcttgctttttcttcttcggtattctttcagatttttacatggggtctgtgtgtgtgtgtttaatggaagtatatgccatggaatagacttggtagttacattggaaaatatttagcaagcatgtccattgaaaacattacagatcaaaatagtttgtaaaagagacttattgggaaataatggacaaagagaatggaaagcacattcagatagacctagatttgaacatctgttgtgtcatttactagctgtatgaaaaattagtttcttggtctgtttgctcatctgtaaatggaactattaatagcttctcttgctcaattgttatttgttttaaagataatgtgtataaagcatttatcacagtacatgacatataattggtactcagtaaatagtacccatatgtagagattgaaaatgtgccactgagatttagagagcatcttttagtatttctactacccatctttgattgatgtatactccctggaaaatgaagtcatttaacatgaagaggaatgggtaataaccttgtttttaccacaaaactttgttctcaaatattcctaagtaaatgtggctctaaatttaaaagcacattggagatttggaaagagggtagaagtagaaatgtagtaaaaaatttagaaatatatttctatagagtgttgcttggcccagcaccctacttcaaatcatttcaagtatcttattagacatcatccaaaacttatattaagctaggagaaacattgatctctgtcactgagctgcataaacctaccatagaacatcacttattttatcattttgtcctttttagccttaaaaaggaaaaaataatccctgaaatttgacttttaaaaatttataacattttccaaaaatgttacataacatgttaaaacatttccattgaagtacaacacaaatagtaattatatgatttcttgagtattcacatatgaatgtcctgatgtaatcactacccaagccaagaaataggtcattacaagtaaactagaagccccatatatatcccctcctaatcagcacctctttccaaaattaatattatattagcacagattagttctgtcattttttttccagtatatattcttggtgtccagtttatttcatgcaatattatacttttgagtcatttgtgttgttgcatatagctgtagttcattcttttattgctgtatagtattccattatataaatataccatttatttatgctaatggacatttagactatttccaatttggggctattatgaacaatattcttaggaactttctcgtatttatctctctgctaatatgcgtatgtatttctgaagtatctaggactgggaatggtgggttatcgtatatgcatatatgcaactatactagataatgccaaacagttttccaaagtggttgtaccggtttacagttccactactactatatgggagtttccttgattccatgtcctccctggtacttgatatagttagttttagccattctggtagtattggtttatgattataatacattactgtgatgattaataaattcagcactattttatttgcttattgaccacttggataatctcttaggtcaggtctgcagatctctcagccatggataccagcacctgctctggtggagatggcaggggggtgaaatggattctgtgaggatccttgcttttggttgtttaatgtactatttttgtgctggttagcctcctgccagaaggtggcactttcaagagagcatcagttgtggtagtatagggaggatcaggctgtgggtagggccgtagaactcccaagaatatatgccctttgtcttcagctaccggagtgggtagggaaggaccgtcatgggggcagggctatgtgcgtctgaactcaagactccttgggcagggcttgctgtggctgttgtgggggatgggagtgtggttcccaggtcagtggagctattccaggaagattatggctgcctctgctgtgtcatgcaggttgtcagggaagtgggggaaagctggtggcaggcctcacccagctcccatgcaacccaaaagaccagtttcactcccaccatgtcccttcaaacagcaccaagtttgtttacaggcagtgggcaggaagggctgagaacttgccccaggctaccagcctctcacctgtgagaacaagtagggctttcacatctcccagcctgtggagtctgcacaccagattcacaccctcccttgagttctggccaggagacttcctgttcatttggaattgttacaaagttcagctggcctatcatatggtctatctcggagactgttccatgtgctgatgaatagaatgtatatcctgctgttgttgggtagaatgttctgtaaatatctgttaaatccatttgttctagggtataatcaaaattatatcaaatattctctcagaccacagtggaattttttaatttctacttagatttcattgttgacctagtgatcattcaggaacaggtcttgatgacctgtctagtgctgtcagtggagtactgaagtcccccactattattgtgttgctttctatctcatttcttaggtctcgtagtaactgttttataaatttgggagctccaggtttagatgcatatttatttaggattgtcacattttcctattggactagtccttttatcattgtataatgtccctctttgtctttttaaactgctgttgctttaaagtttgttttgtctgatataagaatagctacttctcacttttggtgtccatttgcatggaatatgtttttccaccctttaccttaagtttatgtgaatccttatgtgtcaggtgagtcccttgaaaagcagatacttggttggtgaattcgtattaattttgccattctgtattttttaagtggagcatttaggccatttacattcaatgttagtattgagatgtgaggtactattctattcatcgtgctatttgttgcctgaacagctttttttttttcattgtcttattgttttataggtcctgtgagatttatgctttaaagagattctattttggtattatttccaggatttgtttcaagatttatcgctcctttagcagttcttgtagtgctgacttggtagtggtgaattctctcagaatttgtttgtctgaaaaagactatctttccttcatttatgaaccttagtttcgctggatacaaaattcttggctgacagttgttttgtttaaggaggctaaagataggactccaatgtcttctagcttatagggtttctgctgagaaatctgctgttaatctgataggctttcctttataagttatctgatgcttttgcctcactgctcttaagattctttccttcatcttgactttcgataacctgatgactatgtgccggggcaatgatctttttatgatgagtttcccaggtgttctttgagcttcttgtatttggatgtgtaggtctctagcaaggctggagaagttttccttgattattccctcaaatatgttttccaaacttttagatttctcttctttctcaggaacaccaattattcttaggtttgtttgtttgacataatcccaaacttcttggagcctttgttcattttttaaattcttttttctttgttggactgggttaattcaaaagccttgtcttgaagctctgaagttcttctacttgctcaattttattgctgagactttccagtgcatttgcatttctctaagtatgtccttcatttcccaaagttgtgatagttttttatttatgctatctatttcactggagatttttccattcatatcctgtatgatttgtttgatttctttaagttgggcctcacctttctctggtgcctccttgattagcttaataattgaccttctgaatcctttttctggcaattctgagattttgtcttggtttggatccattgctggtgagctagtatgatgttttgggttgttaaagatccttgttttgtcatattactagaattgtttttctggttccttctcatttgggtagactgtgagaaggaagatctgggactcaagggctgctgtttagattcttttgtcccacagggtgctcccttgatttggtgctctcctccttcccctagggatggggcttcctgagagccaaactgcagtgattgttattgttcttgtggatctagccacccagcagagctaccaggcttctggcgggtactagggagtgtctgcaaagggtcctgtgatgtgatccgtcttcagctgtggataccagcacctgctccagtggaggtacaggggagtgaagtggactctgtgagggtccttaattgtattttttttaagtgcgctggttttgtgttggttggccttcagccaggaggtggtgctttcaagagtgcatcagctgcagtaggatagggaggatacaagcttgctctggggtcaggcagtgggcagggccatagagctcccaagagattaagtcctttgtcttcggctaccagggccagtagagaaagaccatcaggtgggggtaccattgtgtgattcccaggccaatggagttatgttcccaggtggattatggctgactctgctgcatcacacaggtcactagggaagtgggggaaagctggcaaccacaggcctcacccagcttccacacagcctgcagcctaaaaggccagactcactcccaccgtgcccccacaacagcaccaagtttatttccaggcagctgatgagcagggctgagaacttgccccaggctacaggcctcccagctgagaaagcaagctgactcacagttccttgccttttctggtatgtttctgcggtagttcttggagcaaaagttcatgatgggagtctccacatgccgctctgtctgaccaagtgggaactgcaagttagtcctgcctcctatctgctattttttcccagacctaacatttatttttaatattaaaccaactttgcattcttataataaactcaacttgattgagctataatagcctttttatataatactggatttggtcctcctaatatttgccttagaatttttgcacatattttcagaatgagtgacattagcgtatgaattggtcatggtctcatcataaatcacatggtacaaattaagtaatctgaggaaagtttaattataggactgttttccaaagcgtgaaaatgtggtcagaatgaaggaaaccaaaggaatgatacactaatcatagtttgagagccctcaccacccctagacctcaaggaaaaaggtaggagtggaccacaaggtcttgtaccaaggaagtgctgcttgtagtggaccaagtgggaatgactcttctgcaccgtccagtttcttattcttcattggcaaaactgagataaaagccagagagcaaggaagcccattgatgcagcccatacagatcagccttctgaagtacaaagacaggtggaaaagggtgaaaattgttcagaatgaagataccttgcactgcctataattttcctttcttgtaatatcgttatcaggttttggttgtaatcatttggtaaaacaagttgggaaatgttccctccatttctggaagaatgtgtctaaaattaatgttagttctttaaatgtttagaagatcactcattgaactatcttttcctctgattttctttgtgggttgtcaatttttttttttttttttttttttttttgagatggaatcttctctgttgcccagtctggagtgcaatggtgccatcttggctcactgcaaactccacctcctgggttcgagcgattttcctgcctcagcctcccaagtagctgggattacaggcacccgtgccatgcctgcctaacttttgtatttttagtagaaacacagtttcaccatgttggccaggccaggttggtctcgaactcgtgagctcaagtgatctgcctgcctcagcctcccaaagtgctgggattataggtgtgaaccaccacgcctggcctgtgggtagtcaatttttaaaaactttttgttatggaaattttcagaaacacacaaagatagactaatacagtgcttactatacaatgtgtggtccatggaaccagcagcgtcaacatcatctagaagcctgttagaaatgcagactcttatccccaccccatatttactgaatgagaattactttttaacaagatccccagaagatgagcatgcacattaacatttgagaagcactgttggggtgtggtggtttgggtttgggttttggtctgctcattccatcagtcactgagaaagatgagttaaaaatctctcaccttaattgtggattgattatttctacttttatttctgcaaattttactttttgagaccatgttattgggtataaatgtaaaattgttatgtcttcctggtgaattgaaactcatatcactatggagcaacctttctatttgctttttttctttacagtctactttgctgacattaacattcttgtattaatgtggtcaaggacaatctgtctagattgataatctttgtcctttatatggagaatttaatctatttgcatttcatgtcacaattggtatacagtatttgggtttaaatctaccatctcactcctctttctatgtgtcccacttattctgtcttccttttctctcttgctttcttttgcattgaatcattattccattttttagcctctgttaaattgtttttatatactcttttactgatcattaaatggttaccctaagtgttaaaacctgaatctttgtcttattaaagtctaatgtaagttaatacttttattgcttcctggacaattagcaccttagcatgatttaactccatctatccctcttgacttatgttctgttattggatatttttattttctctaaatttcaaatatattgcaagattatttatagccaatactcagctggatttattcaattaattactctttcattgtttttcattccttcttctatccccattcttccatctgagatcatttgccttgtgcctgaagaatatacttctcttagtatcagttgataaagaattttctcagtttttctttgtcagaaaattattttactttcacttttgaaagatatttttctatattgaattttagatgagcagttattttctttcagcccattgaaaatatcattcccttgtcttttggcttacatttgtatctcttattgctactcctttgaaagtattgtgttttcttcctctagcttcttttaaggtttttttttgtaagttttggaatgttcccagttatctcttagatattgcttctattccattctgcctcttctctttagtctttttttttactgtatcttgtaggtctcttaatctcctttgtgctttacattatgtgtttggggagtggtgactgtgcttcattctggatattttcttattcagcattctctcttcagccatttctactatgcttttatgtctacccattagttcttacttttaaataccgtatttttctattctagggttttcattttgttattttatgtagtttccaattatctgtcaaaaattttcaacctcataatttttctttgaatatattaaacatgtattttaaataatgctgataacttcattatttagattccctgaggattgatctctgtaggctgtttcagatttttatcatattgtcttgttttattatatgccaaacattgtatattaaaaattacagagataactggagactcaggatgatgttatcttcctctagaatagatttatatttgcttctgacatgatttgtagcagttccatgtcactgtaatgtaatcagagattaagatgatttcaaggtgggattcactccctgaaagaactagtctatttcctattcttactgttattcctagagtatggtctttccaagtcctggtctcatacttggggaaggttgcccatacccctgccttcttgaaggataccctgaactctttttattagaaaaactgctcaatttctcaatatctaattagaaaattagtgctctatctgtaattaccttctccaggatctcagactgtaattctttatagcctcgttagctctctgatgctaacaaatgtgtttcaaacaaatgtggattgttttcccccaacttttttcagttctcagagagagagtcggtttgaattatcttgtctgccatttctagaatggttaggggtcaaatgacataatgactgaactcctcataatatatttatagtatttgctaattttaatattttaatcccctacatttgtacagcacttagcagtttacaaaatctttttgtttacattttattatttaataaaggaggtattaatatcccaattataaagatgagaaaactgactctccaaagagggcaaatgactcaaagaagttcacaacagcctaacaactgagttgatactcaaatttaaatctaattctcaagtctagttattttcctactgtgccacagatacaaacttttgtgttttaatgtttattgttctgcttatcaaagaaagaatgtaaacttatgattctgttttgctttgtttaaaaatgtgattcagcatgattccacctttccactgatagactcaagttcccagaaccagattagaaaacgcatcgtacttgaaaagttgagtaaagtgtaagtatgtaattgccattccagctttgtagtagttttaaattaacttgacatttaagctcataatgtgtaagtattatcctcagattttgaacattttgaaaaataatgtgaaaagtttacatggatttcttcacttaagaaatttggatttttaagatattttatccaagaaatacaaatttttgtgtagaggacacagaggcacatcataaagaggaaggttgagattgtgggtttagaagaccaaactaccttactcccacctaatcagtgaagtcagggaaaaaatatcaaagctagacccatttaaatactgatttgcggtaaatgtgtcacagcagtttcagatgcaaataagatgttattacaaagttttaagggtctgttaagtcactctgcatgcatatccttagaaccatttcacactcagcaacatgagtttttgttcaactcaacgttgcactttagctttaaacttcccgtggtggaaattattgttcttgtaattagcccagtcataaatgacatttaaaaattgctatcttggtttttctttcaaaaagaacttgaaggtttttttttcccagaggtatgagggctgtgttgaacttttcaacctgcattttcttattttagcagaaaacatggaaaagtgtgtcagtcattatttaagggttgtgaatatgaagttttattttgtagcagtttgaaaatacagaaaacatttcacattaaccaaggcataaagaagagtgaagacaaaactaattatggtataggagttttttgttgtttgtttatgaaagctgttgggtttttttctcattatcaaagttagaccttttttggttttttatttgaaccaaccaattgtaaaaagtgtttatttcagagtatcagaggaaataaaatatgttgtatattagatgacactaaggaattgttaatttggatggttatgatcattttattgtgattatataagaaagtgcctttgtatttagagataaaaatggaaacagttaggggtcaaatgacatgacgacagggatttactttaaaatattactacaaaataagaaaaaaatgtgccaggtgtggtggctcatgcctgtaatcccagaactttgggaggctgaggcaaggggatcacctgaagccaggagttcaagaccagcctgggcagcatagtaagaccacatctctacaaaaataaaaataaaaattcggccgagtgcagtggctcacacctgtaatcccagcactttgggagtctgaggcaggcagatcacaaggtcaggagatcaagaccatcctggctaacacggtgaaaccccatctctactaaaaatacaaaaaaaattagccgggcgtggtggcggatgcctgtagtcccagttactcaggaggctgaggcaggagaatggcccgaacccaggaggcggagcttgcagtgagccaagatcgcaccactgcactccagcctgagcaacagagtgagactccatctcaaaaaaataaataaaaataaaaattaatcgggtgttgtggggctactactcaggaggctgaagtggaggatcgcttgagcacgagagtttgagtctgcagtgagctatgattatgctcgtgattaaactgttctccatagtgggtgtactaatttacattcccaccaacactgtatgagggttcccttttctccacatttctcaccagcatttgttattgcctgacatttggattatgccactgcactccagcctgggtgctgaagggaatgaaaaatgaagcaaaggtagcaaaaattaagaaattgaatctggaaatagatatatgggattattactattctttctattttggaacatgtgtgaaactttttatactatcacactggtcttaaaaagaagcttaaaaaaataaagtaacacatactttagaaaatgaggcagtacaaaatggtttaaagaaggaagtaaaaattacctgtaatcccaccactcaacaataactactattaatattttgatgtatatccctgacatatatatggcatatgtatattcattctatttggttctctctgtggataaacctagaaggaatgaaatatgcttgatatatatgaagtacaatggtattatataatacatgtttttataaaaataggataatactatgtacatttttcacttcacatctatcatgaatatctttttatattaaaaaatagattcacattattttaaatgtcttattctattaaatgggtatagcataatttatctaaccaatcacctattgatacacatttgtttctgatttttcactactaaagctatttctgcaacaagcatattttttatgttcatctgattatttccttagattaaatttttttcatagtaaaactgttgggtcaaacacatttaaactgttaatatatattgtcaaattgcttcctaaaaaggtactaattttcactcccaccatggggatttagtaaggaagaatataccacactctcagattggaccattttgggggcagttgtgttctttccatcttggtctaatatttgaaaataaacaggtaagtaaaactagggacaagaatttaaatagctgccaaaatgattttgtgtttcagtgcttcacactcagtaacagactacaaagtggagtgtggggttactatgaatgtttccttatgagttctcaccaatcataacctaggttaacctttaaatcatgactgcttccatctaaatgccattattagctatggaaaattcagatctaggcatgacccaaaaaaagtttccatataattttgttttaaaataaatgtaatttttaaattttcaggttgcctgggcttctggttcctcttcagattacattgggagatatttacacacaacttaaaaatcttgttcgaactttcaggttagtgtttatattacaattatccttctcaattattttgactttatttattgccttgcagaatccaaaggcacagagaaagtaagtgacttacctttcaatgtcacagatctaaatacagtattctattttctcctccactaaacaacattatttctctcttctattgaatgcaacctttatttgctcaagccattatatatttcactttggatagtttatttacggaatagcctaaaattgagaaggaaaattatatctatgatgcaaagccagtaatactatgggtttaagtgaaatagtaaatatatattggctgacccacactgcaccaggcactatgggtaatgtaaaagaaacatagtgccaccctaaaggaagaactctcctctgtgaagatcatgtgagtacagtaaacagtacaagacagtgggcaatttaatattgaattacacagaacagacttaaagtgctaagaactataaagaaagggagaatagagaattgatatcaattgtgagtgaaactgttgtgatttttcctaaaactatcaagataaaaatactcactcaggctaagactaggttctctctaccaagaagcatagcaataagcctctaaatggcttattagtagaggtgtaccaaatacacatttcagccaaatgccagtgaccaaatattaaaattaacatttgcctgtggctgatgttgcactgacacagaataaacttctagggtggaagaattaattcatccaagaaatttatcatatatatttattattatagtctattgttgtcaacaatagcagtcagattttagaagtgtaaaattacagtacaggaacagtttcttggcatagtcagctgttagatttctcttgcagtcacatactgtacattagtaacacctaatagacatcattttaaactggcaaatttaaaaacatcagtaacctttttgtatgccaaaagtaattcaggaaaaagtttttcagtaagtcttttactagaaagagctttgtatctagaattcatagtttaaggcaaacctcaaaaattatttgtcttcaaagaattgtcttcagctgctgaaaaggataatttgtaataatttacattaaactatcaaaccttcatagattccaaactatagatgtcttaaaacattcttctagagtcttctgtagtgaactttgagtaaacaaaatgtacttgggatatctcagttttctctaagttttatcttaacacttttttatatcatgattagatattatattggattattatatatctgttgtttatatataatttaggaatttttccaactcatgatagtttgaggggacattgattttcattcatcgtcaattccccaacagaaatttaaatacaggtcttcaaggttattttctttaatgttgtgactactagtaggtaatacatttctgcaaagtttgagttattataaaatctaatgtctattattctgttttagattatttaaatttttattaacctattcccaagatatgttcttgagaaagtaatctagtgtattcaatgtttgtattaactatcattctgttttcctaaataattgaaagttattactgattgttttatacttaaaattaagctttcacaggcatcattaattattgtggtattttacacttcagttggctgataaaacaagcacataaagacatttttacttcattttatctaggatgtttatatttgaaagtgaatgtttaggtaatgataaactgaatgatatgattgttctaattactaagatttttaccctcattaggtgtcatgaaaactatgcaatttgaagattattgatcactcacaagttcagggatgtcaatcctcagattggccttggcctttgccaaaagaggatttgagcaaaataacaagtccaaagctgaacttgtctgcatgctgtgtgtcctgttagtaatgacgagagacattttttagatacactgtcttatacctatcacagaaccatgcatccaaaaggagataaaaagtatttaacaactgtctacactgatgataaagtttaaatagatatacatagtatggaaacactgaagtttaggatttgttcaggatttaccagggagtgaatatcatcatactaacataaagtcgagtgagggaagatgaaggtcagatcaggcagaggctgatcattgatttttttttttttttttttaaagacagggtcttgctcagttgcccaggctggagttcagtgatgcgatcatggctcactgcagccttaacttctgggctcaagccgcagcctggctaattttttttttaagttttctgtagagataggggtcagtctcactatgttgcccaggctggtcttgaactcttgccctcaagggatcctgctgcctctcaaagtgctgggattacagacacaggcaagagccacagctcctgaccatttcattgattttcaaaggacttgccattcaccctcctgcagacaacacttatttaatcaccattctgagcaaaccgataaagttatgctgtacatatcagaaaagatgagaataagccctatggtctccaactacacactttttatctagcttatgtagaataggttaactagcaatttaatttactttgtctatattttttagaacaatatttttctatagatctaatttgatgtctcttttttaaaaaactattctgaggttctcaaaagttactagaaactttaggaaaaaaatgttaggctaccccagatacttctaatcagtgagatttgctcaaatttggaagcttattagaatcacctagggagcctttaaaaattgccacctgggtcctaccccacccccgcccccacaaccgccccccaatcccccaaggattctgatttaattggtttggcatatggcattcaagggacaggattttaatgctctccaggtgattttaatgggtagtcaaagctgagaacctactgctgtagggcatgatgcaaaaaataataataataattttgggacaaatacctcactgaccttcccagtcccttggttttcctgcctgctcccttctggcagccagtcaataattttagaacttttactgaatggagactggtaatagtgacatttctattgtagtgattcttcacagttgttttttttctcctacatctaaggacctctttatttttccgccatagaattgataagtagtgactaatttgtgttttttaaaatattattattattaatgaaaaatacagccgggcacagtggctcatgtctgtaatcccagcactgcagatatgaggagacattcaactgcccttttcctcttataaactattatgacttttttctgtcattcctattttctggctctaagtcccttctagttactttctgcattatttaaagacttgattatatgacatctgagatttgcttcaaaattatctagattagcagtagtgttgaatatggggttgtacagaagaaacatgattagctgggagttggtaactgtcaaagttgtgatgtgtatataggaatttattttatattctctctacttttatatatgtttgaaatttaataaaaagctttgggaaaataagcccaaaaaagtatgctttattttggtaggaggtgttataaaattctgttccaaaaaccttggtgttaattacttttgaaaatctttactccttagtaactgtaagtcaaagtctgtagctttgataaaaattgcttaaattggcttcactgtccttcagaaaagtgtcagttgcttagaatacagaatgacctctgataagacagctgatttgaagtcttcagattccagattctggacaacgttggcaggtctgtgacagtttgtaggctagggctgccaggtgaagcttctggaaaaatgccatattgatgacagtaactattgttgagaaatcttttcaatcaatactgatagtgggaaagagttgacataaataaccatatccttctctctgaagtgacaatcaataataggaacttgtagaacagtgattctcaagccagttgtgcatcagaattacctggggagcttttaacaactatagatgtccggctccaccctagagattgagtttcattcggctagggttgggctcagacattagtattttctaaaagccccccttagataattctaataggtagccagagttaagagcctattttgggacctaaacataaagcagctttttcggctctatgagaatttccccagtgaatagagctgtcttttccactgaattgcattacaaatctgctatctagaatgttacattggtttacctgtcgtagtgtaaagcagtttccatcagaatctgcttgataatgactcactgtcatcagtgttgaatcaagatatttttctaaatttgaattaaaatttatttttacacaaaagtccattttaaatttaatcagtgatgaatcaaggtatttcaatctgtatgaatttcaaattatgttttgaaaatctgcttttcatttatttttatttttgagacagagtctcactctgtcacccaggttggactgccgtgtcgtgatctcaactcactgcaacctctgcctcccagtctcaagcaatcctcccaccttagcctcctgagtagctgggactacagacacacaccagcatgccccgccaatttttgtattttttgtagagacgaggtttcaccatgttgcccaggctggtctcgaactcctgagcccaagcaatgtgcctgcctcagacttccaaagtgctggtattacaggcatgagccaccatacctggcctgaaaaatctgctttttaaatgttttctatcaaatattactgtttcccttttgaattgtcactcaaacaatagtaaatacattcatttagcatctgtgctggaaattattttggctcaacaataggaaaaatatgaaaacaggtgaaattttgctagtttgctactggaagtactttgaaatgaaatgaaatgaaagcaaaacctcttatttgtgttctctccagtgcgtggaacagtgataatacagcagacactctaaatacatttttggtgaatgtataagtgaattatgaaatcttaaatctgtctcaactctaggagatttgagtataatagaaaaggaaatacttttttgagttgtatcttgctctgtcgtccaggctggagtgcagtggcataatcttggctcactgcaacctccacctcctgagttccaacagttcttctgcctcaggctcccaagtagctgggattacaggcatgcgccaccacacccagctaattttcatatttttagtagagacagggtttcaccatgttggccaagctggtctcaaactgctgacctcatgatctgcctgccttggcctcccaacgtgctaggattacaggcgtgagccaacacacctggccaggaaaggaaattttattcttttgtcattttattcctatatgcttatccttatttgagctagctcctttggctatatgctagatactgttttatttgctacaggtacatcagtgaacaaaacacacaaatcccttcactcatggaacttacattctaatagagggagtacaaaaatatgcccttttcctttgaagcagggaaatcaaatagtactaaggagggagaaagttgcactttttaataggctggttaaggaagacttcattgagaagacactgtttgtgtaaagacccgaaaggaggtaagggagcaagctgtgttgctgtctgtgaaactacagcagacaaggaattagcaggtgcaaagactaaaccaggagcaggcctggtgtattcacagaatatttaggttgctggtgaggctagagaaacgagcagaggcaagagtagagagatatgtggtcagagaagtatgggattggggttgggtgtagtacagactgtataggccttgtagctatgatcattctttgacctttactctgagtgagatggagggtaattgctaggttctgaacagaggaatgacatgatctaacatacattttttaacagcatcattttggctgccaagttgataattacaacagatgggccgaggcagagagaccaatacagctagaaatagccaggactattttggtaatctaggtaagaaatggtgtgactgaagagaaagcagtggaggtaataagaagtgatcagatcctattttgaaggtggaatcattagatttggtgactggctggacatgggatgtgagagagtcaagtttaaccataagatttgtggcctgagcaactggattctggaaggatagggtaagccatttactgagataggagtgtcacaccatccttagttttgggggaaggatgaggagcccaattttggctctaccaaattttgagatgcctattagacatccaagtagaagtgtcaagtggacccttagatacagaaatctagaattcaaggaggaggtccagactagagctaatacatttgagagttgtcagcatatagtttctaatatttaaagtcgtaagattggataacatcaccaagggaaagagtgtttgtttatacaggagagaagagacctaaggccagaggccctgggacactccagtattaaaaggtccaaggagagtgctcatgagaggtgggggaaccaggcaagtgaaaacctggtaaagaaaatgtttcctggagaagggagtgattgtcaagtgctggacagattaagatgagggttgcgaaatgtccgttggatttggcagtatggctgtctcttgtacagttaatcctcacaagaaccctgtgaggtgggtgatattattgtccttattttaccaaagtaagtttcacagccatcaaacaacgtgtccaaaataaaacactactgaggacagatctggatattaaacccatatctttcagactctaaccattatatactgtacttcctatcatctaggcttttttaaattttggaaaatgatggggaaaattcagattaatgtaacaaaatatatcctccactcagaattaatagattttaatattttctaaaatttgattcaggtatatattttaaagaaaacattataattaatttattcaaaaagtattaattgaatgcctactgacggccagccacttgttctgtaaacttggaatagtgaagtacacaaagactcttgccctctgacaagaaaaaacagaaacaacaattatatattagaaggcaataagtggtatggaaaaaaaagaaaaacatatagcagaataaggaggtcaggaatattgggtttgggaggtagagggcaagttgtactttttaatactgtggtccagataggccttattgcaaagatgacataaggaaacttacctggcagaagattgtttcagatggacggaatagctgatgcaaaggaggaagagggcatgaagtcagtcccctttgttccctttcccaatccattcttcgttcctccccagaagcaactgctactgtgaagtagatgtgtatccttctagtcttttttttgtatgtttactgccataaacaatatttagtatttagtctgttcttgatttatataaataatgctataccagctgggcaccgtagctcatacctgtaatcccagcattttgggaggccgaggcgggtggatcacttgaggccaggagttagagatcagcctgggcaacatagtgaaagcccacctctacaaaaatacaaaaattaggcgtggtggcatatgcctgtaatcccagctgcttgggaggctgaggcagaagaattgcttgaactcgggaggtggaggttgcagtgagctgagagcatgccactgcactccagcctgggtgacagagcaagactctgtctaaaaaaagaaaatgctatacgatgtttgctttctttcattcaaaattatgatgagcaaaatatgtaaatctagtttattcattttaacagctatttaatattttataaatatgccacagtttatttttctattacaagcaaagttgcattaaaacccatttttttaacacacattttttttatgtataagtgagagtatttttaggctttatatctagaagtatataaatagctgggctgtttatatgcattttcaactttattagatattgccaaattgtcattcaattgctcacatcaacagtgtgttaaaggcactatttcttcccatcctcaccaacccttggtattgtcagtctttcatttttccaggtggatggagtgaattattgtctttatattaatttctcaaattattagtgagattgagcttttcaaatttcacggtccatttcaaatttcctcctctataaattccctgttcatatcctttaccatttatgtattggctgatattttcttattgatttatataatttttaaatttagagtgatctttctaaatgctttctgagaatctaagatgactacagagttttttgttgccattaatggctaaatgataaaatttacttctgtttttttaaaaactgaacttttctttaataaagacctattcttataatttattaagccaactctcatttctgtaaattatgcattataacatgccttaattgcctgctaccaacctagcaccagatggaaaggtacagaagatgaagtaaaattaaaatcagaaattgcttaccttaagccagacacagcagcatgtacctgtcatcccagctactcaagaggctgagtcaggaggatctcttgagcccaggaattcaaggctacagtgcaccatgatcatgcctatgaagagccactgcactgcagcccaggcaacatagcaagaccccgtttctttaaaaaaaaaaaaaaaaaaaaaagagagagagagaagaaagaaagagaggaaggaaggaagggagggagggagggacagagggagggagggaaagaggggaggggaggaattgcttggttaggggaaagcatagagaatattatgagtatgtttgttggggatatgtgtgttttaatcaagcaatttagtttcccacattgttcctacatgcttatcttgtctagtagtaatattattaaaaacatataaaagtggggctggaacacttccttttgagatggccattatcagatagtgactattgagccacattattatactattgactctttcctgtcaaatataacaagtattttaaaaaaaagtgcttctttggcacattattataaatctgatgttatctagaaagaaatagaaagtttatttaaaggtaacactccttggataaattttatctatctttcaggttaacaaatagaaatattatacacaaacctgcggaatggactttaattgctatggtgttgctgtcattgtaagtactctctcagattttaactctaaatactaaatgtgaagcatattgattagggaaaaacaaagtgatccactgattttgtaaactgccttggaaaatatcatacctctattttgtgccttattttcctttcctatgtaagaaaacaatttttatttaaagtgatatgtaattattctctatattttttaccatcttttcttctgaataccttattctttacaaatactatttgttttcatctcttttttgttttttttttttgagacagggtctcgctctgttgcccatgctggagtgcattggtgtgatgtcagctcactgccacctctgcctcccaggctcaagcaattctcccacctcagcctctctagtggctgggactatagtcacacaccaccatgcctggctaatttttgtattttttgtagagacagtgtcttgctatattgcccaggctggtcttgaacttctggactcaagagagccacctgcctctacctcccaaactgctaggattataggcatgagccaccacacccagcctgttatcatcttggaaagagacaaatatcctcatgtggagtatatacagaatagtcttttcgtttcatttttagtagtctattatattaacattgaatgggcttcattattttacatctgtatttttacatatctaatattattttgtttgtcaacatactttattagcaccaaaaaagtttttcaaattaatgtacatttttaaaatctgacaggtttaaaggaactaaaccagatgcttactacaaaagcatatataaaacatttagtactcattcagcttttaagaaaccactagtggtttctaaggctatttatcaatagggttaaaactattcaataagtgtagtgtttttcagcttgaattgtaaaattcttcttttgaggatcattcattattgcattactgttgctgcttggtgcttgttagaggtcattgaagcccataggacattgaaaacttaccagacactcacaggtcaaaaagtgttatgaatcaatctcatagcctctccagccctgctttctctttctttgatattacttcagtctgacatgttattctggctttactgtccctaggaaggctgtgctgagaagcattagagtaggcttcagtgagccagaatctgtgtcacccaactagatgcaactcacatgattcattaaatcagaacatagaaaataactttacttgaatgccctgatataaattttttatcaaccataagaacaaatcttttgtcatttctactattcagtgttccagctgaattggtaatttgtgaaacagatcttattaattttttagaaagttctttccattttatgaaatttgtaaatattttggtcactggcaaagaaaatatcagtatctctgctcacccaccagatcatatgcctgctagtaaacacttatagacaactgtctaactgtagttctgcaattcattatactaaagggagaagtaacttttttggtcgacaagtcagaggcctaggctcagcactaatctcagaatcttgctttctaagccacttactgaaagtattatcatcatgagcactgcttactgaagacacattaagtcctactgtttttggattaagtttttgccacatcttatctaaaatatatagcaaagaactgaaaaagtatggaaaatgaaataataaaggctaccattaaaatttcatatgattattctatacaaaagtaaacctctctagtgtttgattttaatagaggcatccatgtggcacaaaatactgaaagctttgctagtccttttaggcactgtttgacttctttaactttggatataatgtagggaacctcttatttcaagagtcagtgacccataaaaattgtgccttaattgaattcacggaacaaattgcacacattttactgtagtgtatcgcatgtttcatattgggcaatcaatctttttttttttctttgagatggagtctcgctctgttgcccaggctggagtgcaatggcacaatctcggctcactgcagcctctgcctcccgggttcaaccaattctgctgccttagcctcctgagtagctgggattacaggcacctgccaccatgcccagtagagctggggtttcaccatgttggtcaggctggtctcgaactcctgaccttgtgatccacccgcctcggcctcccaaagtgctgtgattacaggcatgagccactgcatccggcctagggcactcaatcttgaaattgtagcagtaaacactatttgcttttgtcattcaccttgcatcccttctctctttcgttatgccctaatccctacctctagatctaaccttccttctcctagtcattggtcaactggacaactaaaatcttccccagttaggggaaacccttttagcttctttaaaaatctttggtcactatagacaccaagacaagtggtgtttcctaggtttttgcctttgaaatcttgttttctgataattctaacttttgctctaggccttccttgcagattcttttcattctgcatttgcacattctgtatcttcactagctgaatctccctattcttttgatcatcagcttctaagacttctgtctcctgccccatattattttcttatttcctcttttctcagaaattcccctttagcttttcatatttctgcccccactggaaatctgtggctcaactgatagactttttttatctccaactttgtccatttgtcacctttttatagcaaatactactgtacaagttagggataaaattaaaatacatattcatcatgttaaaactccattgacttctataaagtataattatactttaatgtgtatttccacccctcttctcccccttacagttttcacaattacattttagagaaggcattttgtcactggggaaagcaaaaacaggcatgaaggccagcattggataaatagccttacagtgaaaatatggagactttagaaacccagagacatgcacatataaagagaaaggacgaaacacatgcacacgttatttgtggagaagtaaccccacctttcagccttttagcttattgccactaacattgactgtaggcatacatgggtgtatgtcttttttaaaaataattatcctattattcagaaaattttcacatctactctcaaatttccaatggaatttttaagtcacaacttgtagacatttctggaattcatgtttaaaaacaaactgcttataagtctttatagctaggcaaaagattctaaatggcagttgtcacttaagatgaatataagataatatgttcagtagaactgttctttatatatgaatattgctaagttttattattactataatagcatttgtttaatccatgaaagctgttttcagaattcctcatgtgaactcttagaagaggatacatacatacacctatatataattgtattagtatgttgctataatgccacaagtctaactcttgttaaagggggaaaaaaatcaacattttgaccaaaacatgatagtccaggataacataaataaaactgagtcttgaattttcacacctttattcttaaaggaaataaggagttttggtagtaagccatcttctcctggtgactttcattgttctttcacagatgtattaacattttttaaatctgtgccaggtgcagtggctcatgcctataatcccagcattttgggaggctgaggcaggaggattgcttgagcccaggagttgaagaccagcctgagcaacatagtgagaccccgtctctacaaaaaataaaaacattagccaggcacagtggcatatgtctgtagtcctagctactagggaagctgtggtgggaggatctcttcagcccaggagatcaaggtgcagagagccataatcatgccactgcactcaagcctaggtaacagagcaataccttatctcaaataataataataatttggaccataacatgtaatttatcaatgtatactgatggaaattgtatttgtgtatctcagaaaaaaatctgaccagttggtacagttgatcattgcacactcaatgaaatgcatcccatatgaaaatacaccatgacccattcccacttcatttaggtttctcactgattccatgggacttgaattactattgtgattgcaacatttattgatatttatactatgaattcagccctaagtggttacccaagagcacatggaaagaccttttaaagcagagcttaagcactatacatttatgaaggaattaatgttcctttaattcctttaaaaatgtcctcttattcttatttaataaatgttacaattaaagactctcaagcactccttacacacagaacatatataacagtgataattgattgactttttttagaagaactcattagaaatgcaataaaataacctgataattgctcagatttattgcttaagtacttggttgtaattttgcatcttagttgaagtttatcagactttactcttagatctgattttgttcctggaaaaggtactatatagtgaaataatacagagttgaacctgattttcttaactaaatatgccctattgagatgttaggctctttccacaatctttgatgcatgacttttaataaaaatgtatataagtatatatagattgtcttctataggccaggtgcagtggctcatgcctgtaatcccagcactctgggaggccgaggcaggcggatcagttgaagtcaggaccagcctggccaacgtggtgaaacctcatctctactaaatatacaaaaattagccaggcatggtggggcatgcctatagttccagctactctggaggctgaggcaggaaaatcacttgaacccaggaggcaaaggttgtagtgagctgagatggcaccactgcactccagcctgggcgacagagcaagactctgtctcaaaataaaagatagtcttctataaatatttagtacctatatactctactgtgtaaagcttattaatgtatttatatattttgaagttagaaaggacagtaggcggggtgcagtgtctcacgcctgtgagcactttgggaagccgagacaggtggatcacgaagtcagaagattaagaccatcctggccaacatggtgaaatcccatctctcctaaaaatacaaaaattagctgggtgtggtggcatgtgcctgtaatcctagctactcgggaggctgaggcaggaaaaccgcttgaaccagggagtcagaggttgcagtaagccaagattgcgccactgcactccagcctggtgaccgagtgagactctgtctcaaaaaaaaaaaaaaaaaaaaagaaaggaccataatgaattgcataaaattatattttttgatgtggtatcaaagtatatcatatttgtttttatattcctcataattccatgttacccacaatataagaaacctgaaagtaaagaatcacttttaatcatggtcacagtattcagaatagcttttttgagatttaactggtattttgagaagattttctagccataggacacatcgctcagcttctgtcccatttactccttccctcttccctttgctcttggtcttccccagtcttctgtgacctctgtcagtatatttgagcctgtaacacaagaggtcactgtgctgatggtgacctaaaactgagaaatacagggaaacgtccagaccaaaactggcagccaaagagaagacatatagaaggctatcgagaagcagcttgactggcccgagttcctttatgtgcagcctatgtgccagaagtgggaatcaggtttcctcaagtgtttatacttaaaatgtaacttttcctcccaaatttaatataaaagctttgtaaataagccactactttgtattctgatggtctgtggtcaattgtatcataggagtcaaatgtctcttggtggccagggagagaggtgtgtgttgtgttctgtgtgaattatttggttatccaatgaaggagatgagtactttgtattactcagaaaggatagaggataaagtgacttgtagtagtctaacatggatacatgctattcctagttctatgcccttgatgttctctaatggaaagctttcaagaccatctccaaaaatgtctgctttcattttatttatctgaactggctgtttccagtgaactgtggcccgcttcctaggcagagaccatacaatagtttattctctctaaaagctttgagtattcctgtcgttcagggagtagcatgcaagtcctgggaaatggtatttaaacaagctcaacttgaccatgatcgctaaacaaaagccatcactggacataggcagccactttaggtaaccatcatacagatagatactctggagagtcacttccctagggctaccaggcctgaatggaaagatgtgagtaaggcttttgcctcagcaggctgtttttttttaaagcctgcctatcactaatttcctcagaaaaatctgtgaacataccatgaaaaacaaagagatggttccttagaaatttattggttacaagtattcccaactctttcccttaacagtccaaatttaattttaggtatctgagaccatatttgaagatcattgaaattacttttttatatttccttacaactatggaatttttatatttaactgagctgtttaaagttgagataaaattaatatacagttcatcatttgtatattttaaaatatacaaaatatacaattcactggtttttagtatattcactgtgttgtacaactatcaccactatctaattccagaacatttctgtcacccaaaaaagaaacctcctatctattagttcagtcccaatttcccttcctctagtcctctggcaaccataaatccattctcttatcttgacagatttacctatttctgaacttttcacataaatggaatcatatgtgaccttttgtatttggcttctttcacgtaacatgttttcaagattcatccattttgtagcatgtaacagtacttcattcctttttatggccaaataatattccattgtatggatataccacatttgtttattcatcagttgacaaacatttgggttatttccattttttgctatttaatggataacagtgctataaacattcatgtacagatttttttgtgtgagcatatgttttatgttctcttaggtatatacctaggagtagaattgctgggtcatatgataactctgtttaaccttttaaagaactgccaaagtgttttccacagtggttgtatcattttacatttccactagcaaagtatgagggctccaaagattgaactttacaaattatctcatcttgcttcacacccagtagtcattttaaaggcttatatatgcagtttcccaaaaacttaaatatgcctaatctcattgattttaggttttcatggacatgtaacatcaatttcttatgttttaggaatttctactatacacgcaaaatgagtactttcaagctaaaaacaaaggttacggtgttcatagtgttcaatttgaaaccatataaatgtctgaacagtagctactggtattcttttggattcctcagtatccataaaattcattttttgtttcttgcttatatacatcttgaatttgttatcttatgatatttactatcctatcacctttgtcattgtgaagtttaagtatttacctgtttactgaggattaagcaataattagattatttctatacgttcccatacttattgctgagagtttatgtaagaaaaacatatctttaaattgaaataactttaccctcagccaacagaactatatgggaatctagatagtttctaaagaaataatacttgttcaaagttttaatcaaagccaattttctacattaattttccccacagaattccctatatctttggcagttttataatgctactcttttttttattcataagtagttgagtgtctccaacttcaggccatactccacattaaaagtcaccaaggatcctgagcaaaaagatgtgcactccaacttcactatcccaagcagcagcagtggtggtgatgacagcagttagcagcagttggcccttgcaaatcacagccttgattttaggagccagtccctagatctgctagtgccatcatcacatcctgattgagctccctgagagctaggaagcatgaagcttaagggaactgttaaccttagcatcggggtctgccactataagggtgtgataatcattgtgtgtggaagccatagttgattacatttcaatcttagagtattgaaaaaaagctggagacactattctgagagaattgttacaaggcaacaatgataaagaaaagcttttccagcattcatctgccaagctgttctatagatctgtcacaaacaggaattagatataaagttgtaaagtcactgtaacccagccctttaaacaaacctatgtgtaatatatcaccacaaagtgagttacaaagaacttttttcttttgaattagaaatatcagtggaaagcatccctgcttccttattaatgggtaaacctaaagcattaaatgcaaacattaacaggacataaaccatctgttataagaaaaacattttattttatttggctatcatagtttcttataatcaaagtttttatctctgttttctagatagtagttctgaaatggaaagttcatagtgacatacttcttaatattatattcttcttgtctactttttttgtttctcttggaagtcctttaatggtactaacctcacatgcctcttggtttttcaaatttggggacattagctttgtgcctaaaattaaataaatgcaattttaatttatgtaaattattattattattattattattattattgagacaggttctctgtcacccaggctggagtgcagtggcacgatctcagctcattgcaatctctgcctcccaggctcaagcaatcgtcccacctcaacctcccaagtagctgggactacaggcacatgctaccatacccagctaattattattattattttttgtagggatagggtttgaccacattgcctaggctggtcttgagctcaagcaatcctcccaccttgtccttatgtcattaatttttatttaacattttttttaatataattattctaccccatagactacctttaactatacaagggtctcttgaaaccctaaactcagtctcattctggatatatcctatttttgttcctaactatcagtgtagccttgtacaagttacttaacttcattgactattgttggcagtatgagggattggagtaaatccaggttaaatcaacttggtagtactaattcaagtatgaggtgtaaaaagtaagaaactgttttcatgcgatatatcaaaggcttctgaaagagataaagatgagtatatttagcataggaaacaatttaattttgcaaatggagttccatggtgacactgtccaagtgttatactttgttaggtatctccatcataagcttggcagggaaatactagtcagtcactctttctatggaaagatttcagagtactcatttaagaaagtgagaggaacacccccaagatgccttctctttctagtgcagactttagttgacattatacaggttaagtattagaaatccaaaatccaaaatgctccaaaatccgaaactttttcagcaccaacatgatgctcaaaggaaatactcattggagtgtttcagattttggatttttggattagggatgttcaaccagtaagtataatgcaagtattccaaaattctaaaaaatccaaactccaaaacagttctggtcccaagcattttagataagggatactcaaactatattgctcttcatatcaaagatatggaacttttcctcaaatgcaaaaggagaacgtggagtggtttagtatctgcacattataataaaggtggtaaagagcaaaatgaaatgtgtaaattaattttttaaatgttaaaatatgttttaaaactgttttacttacagaatcctcactccaactgtgggcctttttttcctcatccaatttattctttacattttatttatttattttttaatttttttagtagagacggggtttcaccatcttggccaggctggtctcaactcctggtttcaagtgatccacctgcctcagcctcccaaagtgctaggattacaggtgtgagccaccatgcccagcctattatttatattttattctgggaataagtatcaacaatgaatagaaaagtctagaaagttattttatgtgagagtttctgattcttcaaatcacatttaaggaattttttagaaaatagctctggaataacattttcctttttttgtttttattttttgagacagaatctctctctatcacccaggctgcagtacaggtgacctgatcttggcttactgcaacctccgcctcctgggttcaagcaatcctcctgcctcagccttccaagtagctgggattataggtgtgtgtcaccactcctggctaattgttttttttttttttttttctgtatttttagtagagatggggttttgccatgttggccagactggtctcgaactcctggcctcaagtgatctgcccacctcagccttccgaagtgctgggattacaggcatgagccaccacacctggcccattttccttttttattctctactttttttgtctcattaaaaaatgggccaggcgcagtggctcacacctgtaatcccagcactttgggaggctaaggcaggtggatcacttgaggtcaggagttcaagaccaacctggccaacatggttaaagtatgtctctcctaaaaatacaaaaattagccaggcatgatggcggggaccgcctgtaatctcagctactcaggatgctgagacaggagaattgcttgaactcaggaagcagaggttgcagtgagctgagattgtgtcactgcactccagcctgggtgacagagcaagactctgtctcaaaaaaaaaaaagaaaaaaaggattacatacacacacacacacacacacacacacaaacagatgtttattgagcaatgctatgagtaagactgtgtcttagaccctgtagggaatacaaagattaaacaaatccctttccctcaaacactttacagcctactggaggttgaggaaagggagaaatcatgtgcacaagtagctacaataaaaaattgaatgtgttaaatgccaaaaaagaaaaaggcacaaaatattgttgggattcatagaagtaaaagatttcaattgggaggttataacagaagtaaaagatctgtttggggggccatacaaagttgatgggttcaaaagacagaaaggatttcaagaaatagaacagatgagagtattctaggaagtacctatagcgtgaaaaaagcaagataaggctgataactagaaggaaaggttgggtctgttgtactgatggattttttttgtttgttttcagacacagtctctgttgcccaggcttgagtgcagtgacatgatcttggctcactgcaacctctgcttcccaggttcaagtgattcttgtgcctcatcctcatgagtgctgaagactataggcatgcgccaccacacccagctaatttttgtatttttaatagagatggggttttgccatgttggccaggctggtctcgaactcttggcctaaagtgatctgcctgccttggcctcccaaagtgttgggattacaggcgtgagccaccataccctgcccctgagataaattctttaatggcagacaaacttaattcagtgggtaatgaaagtcatttaaattttttgtttttgttttttgtggagtttcatttgctcgtttgtttgttttagacacaggatctcgccctgttgcctaggctgcggtgcagtggcgtgatcatagcccactgtaacctcaaactcctgggttcaagtgatcctcccttcatgtaagttttgagtagaataacatcataaaatctgtgttttaggaaggttagtctttcagagatctggagccagatctgatactatcttccaccttgcgtcagcccttcaaaggctttcaattgctcttaaagaaaaactttttattgtggcctacatacccctgtggtctagcccttctttcttctccagcctcatctcacaccatcctaccttgttctcccattccggtcactctgaccttctttcatatgtttctcatcatagtctttaccactgtagcacacaggtccagaatgttctctcccctcttcccttggttaattcctcttcatctttcagaacttgaggaagtgtttcctcctcacgaaactttccctgacttccctgactagataaaatatctctatacataggcctttacaacactatatacttttctttcttagcacttatcctgttttcagttttatatttaattgtatgattacttgattaatgtatgcttgtctcactgtacttaaaatttttaggggctggctcatctttattttttttccttttgagacagggtctcgctctgtcacccaggctaaagtgcagtggcacagtcgcagctcactaaagccttaatctcctgagttcaagtgatcctccttcctcagcctcccgtgcagctgggaccataggcatgcaccatcctgctcagctttaaaaaaaaaaattgtagagataggggtctcactttgttgcccaggctggtcttgaactcctaaacttaagtgatccccaaccttggcctcccaaagtgctgggattacaggtgtgagccaccatgcccagcctattcatctttaaatttaaaaaaaacaaaacagaaaaaacaaatagacctatcctttgttcttgacctcaggctatcatccactcacctaccaaacttcttgaagagcaagtctgctctcagtaattccagtgcttctcattaatcctttgcattctgtatcttgcccccaccttttatggaattgattttctcaaagcctctactagtaacagcctagttaaacaaagagcaatgaggcaatgaaatgaaaaggaagagacaaattatgagaaacactacagctctagaatccacaggattttgaaaagctggggaaagtcaaacataattttaagatattaagacaggtggctgtgaagatactgatgccttctgggaagtaggtaggaagaactgattggaagagatgatgcatttgtttttattttatatttatttatttatttatgagacagagttacgctcttgttgcccaagctggagtgcaatggcacaatctcggctcaccgcaacccccgcctcccaggttcaagcaattctccggcctcagcctccgaagtagttgggattacaggcatgcgccaccatgcccgtctaatttttgtatttttagtagagacaggattttaccatgttggccaggctggtcccgaacttctgacctcagatgattcacccgccttggcctcccaaagtgctgggattataggcatgagccatcgtgcctggcaatgcacttggttttatacctgttttgcaagtgctgagacttcctgttcaatttaagatttaggcagattatcagttagatggctccctgacaggagttgaaaatgtggaactagagctgaagaatggtgatgaaaatcagagacctagattttagtgtcagcattgggatggatgaaatggcaagaggcagaggatgttaaatgcagagtcaagatgggacagaactttgtgggacagctggatcaaggccaaggatgcctgaagaatacagagaaagcagaaaaggggagggaggggaaacagacactttgagcaccaactaaatgcaaacactgctagactctacattattttatttgattctcacaattcagtctggtaagtggtagtgttccactcaccaacggaagaaataggctctgtaaaaacatatactttgcccaaggtcagagctaagattcagactcagaccctatctgacttcaaaatatgtactttgcactgcagtgtgcctcagacaggtatgtaatcaaccagaacactgttaaagagtccaaagtaagtttaagtgtcaagaaaaatgtagtaactacctttctagagatgaagtagttgctgtctgctaaacgaaaatgagaataaggactaaggactgtggtcctggcaattaggtggtgtgggtaaccttcaagaaagcagtttctacagaatgataggagtggagaccagattgcaaaggctgctatagtattacatatggtgttggggcactagacggagcaaatgccgactactcttttcttatggttggcaaaagcagaaaggagagggagtttataatccaatatgatatgataaattgtcagaagattctcaggatagtggaagtttgagcattttggtagcagaggggaaggagacattagacaggcaaggctggaagaactagagggtaactggtggaatgtggcccatgaagagactgggaatgacatcaaaggtgtatttgcctctttttctttcctaactcctttcacccactttcctacatatctgcaacatatttctctctccttgccttaaatgtcagtgttatttggtaacattttgcctcctgttcttaatttcaaaagtgcagaaaccaaaccttgtatatttcagctcccaaaaacccatattgttaattttcattactgttacattcattactgtattattagtttcattctggctctgattgattcttacctccctttctccacaggtcaattattcccctaggagaattaatttaggcatttctgagcttgagttgtacagccactatgtttaattatggtgactaacctttattttctcatattcatgacttttaccttcccctgccttctcaccttccatgacccacaagtcggttttaggaacataaacatgtaatttaccaaaagcaaaaagcatatatatatatataatatatatatacacacacacacacatatatatatatatacacacacataaacacacacacacacacgtaagtttctacatgagaataagagaatttccatttatccaatattgtgtttggacaatatgtaaacagtgctaaaccaggaaagatacctatagtaagtgaggtaaatttgaagcagttttcttaccaaaacataatctccatgcagtcaaatacattgtctggattacttttgtcttcctagtgccaagcacttactctagcacttagtaagcattcagtgaatatttgttgatacatcaaaagaatgaatggatgggaaaaacttggataaattattgttgatattatggacttatggcatagatttgataacactggtaaaattgcattgcacgtgaaaaaacaaaaatagttgcttactattgtgactgaagaaaagactttcattatagagatgtaatctgtataatgattcatattttcccatgtgaatacagtctgataaagatgggactatttagccttaaaagaattgctacttttaaccaaatccagcattgcctttttgcaaatacaatttttataaaatctttaataaaattaacaaaaaacaaagttagatgtaaatgtgagattatcttttaattcattagttataaaattagtaaacactttaactttttaaaatgtttctttgattcaaaactttattccaaatattgcttttatcttccatggacgtaactgttttctgtggactgacaaaatagaagaattggttatagagcagttaatcaccaggtcgatagaggtggcactaagtcttttagttatttatctgatgcatcacagatacaattctggagaattctttaaatgttttacatgttgatatttgttcgttgaattggaagcatttatcaaatattaatgggtcctaatggaaattttttactcaagaggcaaactcttcctttaactagttttactgaatgtattttaaaacatagccttgcaaacttaaatgaaagttataaggagaaaaaaattattcccaggtgtattaagagtgctcgttaaattcaagatcctgatcaccgagtgtgttttctcctctgttgttaaacacttccatttagattgtatattatagagactcaacagcttttaaatattcttcctgcctctggcttttctcattctgataattccagttaaccaataaagtcctgtggtttttggaagcaaaattcaaatgcttccattttattccttgtttaaatatttttacaaagttttaaagcagattttacaagccagaatggtgaaaaagagcctggaattttctgcttctcactattggctgtttgtgttgtcccaccattcgctttgaatgagtttgggatttggctgtttgtcattttagtacagctcaagtataatctgccttaaagatgggaacatatcagaatacacaaggcttaacattgaaaattccgagtgcagcaaaagcacttcagaaactgctcaaaactgcttggtgaacacctgcaatttttgtggtggtgaaaagacattacagtaattgaatctccaggactatttccattttatttatatactaattttcttttcagtgagttttgaggccccacattataatgttttttatcacttacaggtttttcattgcaatgagtgacaaatctgctgcactgcaaaaatgtttcatgagaataaaaaaattgccaggttataactagtattattctggtttcagtgcagaaaaaaatgttgctctaaaatactaagacttacacaacttttacatgctccaaaatcaatcaagttcccaaacatataaaattaagtgccactagctaattctttgcagccaaggttatacattgagatagaaggttatacattgaaagtaggagtaaaatctatactccttctccagggggaaaaaaatgcacatttgaaaaaataaaagcctttttataatttgaaggagtctatgaacccctgcatctcaagttaagataaggaagtggagtcagtaaacgttggcttctcttttgaggaacctgatgataagggtaggaaagagattgaacagtaaccatttgttttggatagaaacagacttaagcatacggtatggagaaggagccaataaagaaaaataatttgaagctgcgggcaaggtagatacacatgatggaacagggcaggtctcagaggaggcacaaggaaatgtgatcatggcacaggcagatggaatagtgtgaacaggagagaaatactacatcttctgagacaggaagaaaagaacagcgtggctgcagatgcatttataggtagaagggagagatttttacatcatgcctaacaacttcatttttcagtgaagtagggtatgaggttctcttctaagagtacagaagttacggttgtataaagagtgaaaacacaattgacccttgaacaacatgggtttatgggtttgaactgtgcaagtccacttctatgcggatatttttccacctctgccacacttaagatagcaagaccaaccccacttctctttctcctcctcctcagcctactcaatgtgaagacaaggataaagacctttatgatgatctacttccacttaatgaatagtaaatatattttctcttctttatgatttgcttaacattttttttcctctagcttactttattataaggatctaatacatatccttacatatgcattatgtaatatttattataagcatataacataaaatatgtgttaatcgactgcttatgttgtctctaaggcttctggtcaacagtaggctatttatagttaagttttggggagtcaaaagttatatacagattttcaactgcatgggggagggggtcagtgtccctaatgcctgcattgctcaggggtcaactgtaatgataatggagtagtcattgagaggatccagaaaaggagctaattcagggtgagagaaaattgacaagtgacattaagtatccagatgaggctacagatcatggatttgtagtggtatcgaccttcagggttcccttcttccccatatctccataccaccagtagtttccagccatctattataggtatggagaaagcagattgcaacatttatctcagggtgtaggttttgctaggtagaaaagctaaagcaaggatgcaagaggtttggaagagtactaatgagataatagttcaaaaaatcaagacaaatataaggaagaaaagtagagttacctagaaagaaaattggtcatcctcatcaaataattcttgtgtttctccccccaaaatggtatcttcagctctgacatctctcctaaatcgtagaccaaatttttttttattttttgctgggcaccttcatttggatatctcccaagcatttcaaactctcaaatttgagattaagtcattttgcctttcaaatggccccttttggtggcattggtatcctcctaattacccagaattgtgcttctctttatctctcatatctaatcaattgctaagtccttttagttctgtatacagttagctttctccattgccactgctactaacccacattaggccttcattacttgcctagactgctgcaattatagccctcccaagcaggtctccttgccgtgtgtctcttcattcaactagtccatccttccctctagctttaaaaatcatctcactgaagcttaactctgatcaaggcaggcctttgttcagcaacttagtgacttcccagctcctaccagataattttgcatgaaattcaaggcccttcagaagtggccccaacttacctattcaccttatttcccttttatgtcttcacattatgtccactgactgtttcccccacaatcatcttcaataggacttgacctatgcttgaaacttattttcttttcatatctgcctattctagccttcaagatccagttcaaatgttaccaactccttagaagccttccttaacaccccacagtcagaaataatacctcccttgtataaacccccttaagtaagacctctcattgggcccttctgctttgttacacatttatataaaaatctcattttctttactatccgatttcttccaaaagtgtagttaacaagtataacaaataaacagaactacacaaatttattcaattcagaactttaacacagcttcacatcagttgttttcaatactggctatacattagaattacatggggaggttttaaaaaaatactaatggctgattcaaagattttgattcattggtcttgggtggggcatgggcataagaattttttaagttccccaagtgattctaatttgtgcaggcagaattgagaaccactgtcttaattctagtgcacattggtgtgctaagtagagaagtgctaaatcagttgacttagctgcatataccaggatttgcttggttagaggtacttaaccttttttctaaaatcgttaatagtttgaaaggttcctcttgactatcacaaaggaagggtgaattagaaacagcaaaactgttggttttcatttgtacgttttatttggttatgacagatttcaaaaattatttgaagagtatatccaagtgggtctttgaaaattgtaagatctactcagttcttaaaatgaatcagacatgtgaacttgtgtggtctagcggttagaagtgtagactagtgggagtacttctggggttatttgttcatcttttactgacttacatgaccttaagaaagtcacttgagcctcaacatttcctgcaacttcacagaaaggttgaagaccaacaagtcagtctcataaaaaaaaaatttaacaaacttggaaatcacgatagcttcttaggtttgactgagttgttgagatctttcctgccacaaagggaacaactaggaaagaactggcattcaggagaagctctctagctccaatttagaaagtttcccaccatccattttaaagtatctgaatgttttagccggatgtggtggtgcttgcctgtagtctcggctatttgggaggctgaggtagaaggattgcttgagcccaggagtttgaggctgcagtgagctgtgattgcaccactgcacctcagcctgggtgacagagccagaccatgtctcttaaaaaaagtgtctgaattttaaatttagctctgacctcttggcatttgtttccttatcaattataaaaccatatttactgaaaaacaacatcaataacagcagtttagcaaagtaccacaaagtagttacctatgcatgtggcccagtccatgttattttatggaaaaacaaaaactcttcaacagggtgacaggttcgttctctatgcccagggagctattgtgttactttggggaggaagccaggggccacatgtgagacagatgttttcggtgtctcactaatggagttgaatcttctgccttttcctcaataagaaacaagcaaggcagagaaagagttaatattaaacatgaaattgtaattactttcatgctaaggagcctgcagtatatattgtatattttatctaacatacagataaaattccttttgaaagtatataccagacttttttttcagtatctgagagaggcattttgcaaaatgtctggggtttgtatggagccctgcaatttctggaaataggtgacattttgacccttggtgttactggtcacagctcttcatttcagttttgattgtatgggtgtgcaaacaggtattttggtttaatccttgatcatttaccacttgttcttgtagaaaagggagaaatctctactcaagttttagaagaagataaaatatgggtaaggtgacagttgttactgccatgcaggaagaaaatattggggcttgatagataagcaaataaacaagatacctttgtgataaaggtctccacttttagcactcttcttagccagtatgaccctcaataattcctttaccatctccaaagcttcaggtacttcagctctcaaaaggaaagtgactggataggttgcacctaaaacacatttgggaaaattaagtgtgatttcctcaaatataaccgtatagcctcctaaaataagactatgctgttaaacctcttcttttagattctttacttacccaacccattattaattagtgcctcatctatcccagacggcttttgcgtttgtttgattgtaagccttcaaagtgtcaggtattataatacccatttgttttaattggttaaagtgataaacatagtgcctgtgcatgtacacattgaaggtatggctgtttgacagaaataatcttcctaccttctccttcccagccctaacttctgaagggtgagagaatgagtgtttaaaaaaattttcttttcagcccaatgttatcttttagcagtctttacatcttcatcacctttatgcatggtaatcagcagaacaggtctccctactgcagcagaactctgcatgaacccagtaatttctcaaatctgataggtacagaaaagtgtgtggcctttcacttcctgtcccttcctccaaccccaaaccatagagaagcatgctttctggtgacattttattcacatagacattctcacagctctttattctgtaagaaagattatgtggagtatgaggagtgttgttccgtgtcattttataactgcctactcgtttgattttgcaaatttggaaataaattatgaacgctcaggaaaatccttctatgagagagttattacttctgtccagttttgaaagtcaggtttgcagctatctgtgctatatcattttaggaaggtgcctgatgtgatcttcacacgtatcacctaggattattcaggaaaggataattcagattgtggagctacaatatggagtttccagtggttcagtatgagtgcagtgagcaagacaatagggaccagaatggggaaggccacttaaaaatccaagttcatggctggccacagtgggtcacaaggtcaggagtttgagaccagcctggccaacacgctgaaaccccatctctaataaaaatacataaattagctaggcgtggtggtgggcacctgtaatgccagctactcgggaggctgaggcaggagaatcgcctgaacccaggaggcagaagttgcagtgagccgagatcgtgccactgcactctagcctgggcgacagagcaagactctgtctcaaaaaaagaaaaaaatccaagttcgttactgacttttattgtactccacgagataaaaaacatagagattcatcagtttagctctacttgctcaataaaccacaactttaactctttatatatatttttctgttgacagaatacaaactggtgacttccaaaattatgggtaccttacttctgaggtttagtcaagagtttgtacagctctaaatccttggatagaaggttttaataaaaatgccaacttttaattaaaaatctctctcttgattcagttatcttgcccaaacttggaaactcttcttactactgtatataataattcctgttaaccagatgttgtttgatagctcagtaataacaaatggagggtacttgtcctaacctgatttacattctttccttttgatgtgtagcatatgtggagcagtcagctaaataaaggtcttatcaataagatgcagtttgacacttggctttttgcttttgttgttacgccacttaccatatggtaaagaattgttatagaaggatatctgtattttcagaagtgaggtttgaattggtggaggtttcatgagcagtttcctcatttgtgatttatacattgtaagtttttatcatgtgagttgttttcaaattatattcaccagcagatagcctgtgttaagccatcttaagtgtcaccttttgaggtttttattcatacttaaaagcaattgaaagaaataactttcaacagaaatcttttgtttttacttacagccaatcacattctctgctgattattttaataagtatttcctgcataaaacacattaaatatcagctgtagtataaattactgttttttatttacatagaagttatttgggcccaccatgttattatggggttttgcttgtttgttttgtttatgttttagagacaaggtctgtctcgctgtttcatccaggttggagtacagtgacatgatcatagcgcactgtaaacttgaactcctggggtcaagtttacaagttgtgggaaccgatcctcccacctcagcctcttgttgggacttcaggcgtgcacctccacactcaactaatttttttatttttagtagagatgggatcttgctctgttgcccagactggtctcaagttccaggcctcaaacagtcttcctacctcagccttccaatgcactgggattgcaggtataagtcaccactcccatcctggatttatttgatattcactattagaagttgcaagattggaatagaggcttgagtccctttcattgtgtattggggtaggagttgttcattaatgaaaaaattaaacaggtaagtaattagtatatcataatttatactgcacagataaaggaataaggagaaaagaggagcctggggagtcaatttaacaaaagaaaaagagaggaagcaggtgtttggtaagatcttgcaattgtacttcaaagaaagataacctgaaagtaaacatttttattttgtatgtttctctttctgtgagacaagagtcttgctctgtcacccaggctggagtgcagtggtgcgatctcggcttactgcaacccccacctccagggttcaagtgattcttgtgcctcatcctcccaagtagctgggactacaggcatgtgccaccatgcccagctaatttttgtatttttagtagagatggggtttcaccatgttggccaggcttgtcttgaactcctggccaaaagtgatccgcccgcatcagcctcccaaagtgctgggattacaggcatgagccactgtgcccagtctattttatgatatatttctgtggggttggacatgttttgttttatattttgaagtactgaatttggacagtttggacaatatttatattatggggcactacgctttaagaaaatgataagctagaagtgagtataggaaagaacaccactgcaaacaccaatcccaatagggagtagtcagatggcatctataaggaaagattaaaaagacttggaattaactgagaatcattttcaagaatatgaaggaataacttcaagagctttcgtacccccccaccaaaaacacccacaaaagttccatgaagaagaaaataaaatcctgcaagagacatttagattatatatgagaaacagtgtctagaatttaaggtttattaactgttgcagcatgctacacatagaagtgtagaatctccatccttcaaaatcatgtaggtagtttattagcagttttgtgaaaagagaccaaatcactatattaagaaagggtctattctgcttactttggtgagactttaaaaaaaaacacgggggtgggggctttgggtctcatttaattcttaatagaaggagactgaaagggagtataaatccccaaaacagttgagtcttcattttgctgatactttctgctattctcatttacctaaaaaaaataaaaatataccccatgcaagaatagtgatagccagaattacacagaaataaagacctatagataacaagcattggtgaagatacctggaaaagggaacccttgaacattgtcagtgggagtgtaaattagtacagccattatggagaacaatgtggaggttcctcaagaaattaaaaataggccgggcactgtggctcatgcctgtaatcccagcactttgggaggccaaggtgggtggatcatgaggtcaggagttcgagatcagcctggccaacatggtgaaaccccgtctctactaaaaatagaaaaatcagccaggcgtggtggcatgtgcctgtaatcccagctactcgggaggctgaggcaggagaatcacttgaacctggaaggcagagttcgcagtgagctgagatcgtgccattgcagtccagcctgggcaatagagtgagtctctgtctcaaaaaaaaaaaaaaaatatatatatatatatatacctacagtataatccagcaatcccactgaagggtgggtgggtgggtaggtatctaggtagataaataagacagatggatagatagataagatagatccacaggaaatgaaatcagtatgtcaaagagacatctgcactcccattttcattgcagcattgttcacaatagccaagatatggaatcagccgaagtgtccatcaacagatacatgaataaagaaaatatggtatatatattatatacatataaacagcggcatatattcagctttaaaaagaaggaaatcctgttatttgtgacgacataggtgaatctggaggatgttaagttaagtgaaataagccaggcacaaatacaaatactgcacaatctcacttatatgtggaatcttaaaaaaaaaacctgggccaggtgcagtggctcatgcctgtattcccagcactttgggaggctgaggtggaaggattgcttgaggccaggagattgaggctgcagtgagctccgattgcaccactgcactccatcctgggtgacagtgagaccctgtctcaaaaaaaaaaaaaaaaaaaccagaaaaagcaaaacaaaaagaagtatcttacacctagaaagcaataaatattagccattattatcatcatcatcaaaacagtagatttaagtgttcttaccacataaaaataagtatatgaggtaatgcatatgttaattagcttgacgcagtcattccacaatgtacacatatttcaaaacatcatgttgtactccataaatatatgcaatttttatttgccaattaaaaaataactttatgtagataccctaaattgcttcttcccttggccaagtaaatctcatatcatttagaatgaaaagaatttcctctcctttcatatttcacctataaggcttaattaagtacttttgttcctgagaaagggaccaagcaaccactccaggcccagccccttgctctacagtttcctttgtagttctggaagtgaattaaagctaacgcctaagcctgctcagtggcacatagcactattcatgcttagccagtcgtagggcttcccagacaacactgaattccaggacaaatggaagtgaggaagagaatttcagtaacaagtggtaggtcatgatttaatgcctgatgaatttaaagctcatctcacacctcactgatggatgttttgaaatattctggcaggaagatgcagaatgtgtggcctgggggagggggaatgaagaaaatgtttcctccattcttctaaaaatgaaaggaggggagcccagcacagtggctcacacctataatcccagtctctcaggaggatgaggtaggaggattgcttgaggccaggagttcaagaccaccctgggcaatatagcaagacactaaaaaaatttttttaaagtagccgggtatggtggcacatgcctgtagtcccagctattaatactttggaggctgaggcaggaggattgcttgagcccaggagttcgaggcttcagtgagctatgatcgcaccactgcactacagccagagtgacacagcaaggcctcatctcaatcttccaaatgagaggaggaaaattttgtgaaagagaaaaacatttcggtaatcacaataaataattgtcctcttaaactagttcttcaacaagtaattattgatgatctacagtgtaacaggcacgacggatacagtggacacaatatatgaagtcattgtcctcatgacgttcacattcttttggatggagatagacaagcaaacaaatagacaattattaatgatgatggagaaaaagcaaagaaaggaagtagagaggtgagactgaggatggatttttagagggaaaggtgacattaaacaaaactgaatcacatgaaggatcctaccatgcagagaactgagggggaatatccccaagcaagcctctaaagaagcctctaaagtgaggacaaatttaacctcagcacaaattgagatatggttagccagtatgattggaatagaatgagccagggaaaatactctctccagctggaaacttttatgagatagttttggttactaagcatcctccatccgtaagtggtccagtatgtgagagatttttcatagatcagcccgtgaatatcctagagctaaacggttcctttagatttctcatctcctgttgtaattgctctaatcatcagagcgatagtatataaagcattacattaatgactgagttattcattttaaattaaaactgtaaggccatgtacagtggcttacacctgtaatcctagcactttgggaggccagggcaggcggatcacctgaggtcaggagttcgagagcagcctggccaacatggtgaaaccccgtctctactaaaaataaaaaaaaaaaaaaaaaaaaaaaaaaaaaaagtagccaggcgtggtggtggcgcacctgtaatcccagctactcgggactcaggctgaagaactgcttgaacccaggaggcggaggttgcagtgagcagagatagcgccattgtactccagtctgggcaacaagagcaaaacttggtctcaaaaaaaaataattaaagctgtatgtaatagtacaggggttggcaaactttggtaaaggactagatcataaatatgtttgtctttgctggtactacacttgcaactacttgattgtgctgttgtagcatgaaagcaactatggaatatgtaaataaatggttatggctgtatttgaaataaatgggaagcccaatttggcctgtggaccataggttgtccattgacctattctattacattgagaagccaacaagagagattataaagaatcaggggtaggagaaaaaccatgactaagaggaggagaattctaggaagggaggaagtgatcagaaacatccaatactgcagttaactaggaagagaacacagaagagcctttcagaagtggaagttaggaggccattactgaccatgaaaagaacagttctggtattaagtctgttcatttttcactgggcctggttctatgcacatatagggactgcgttgctaggtgctttgtggtttacaaagtcctcttccatggttactactaacaaaagcacactctgaatagaaccttatctccaagctcagtgcttggacctctacatcagataggtcctaaactcgagttactccaatgacacctatcattagggcagtatgtgtcctaaaaagaatcccaatagtaagtagcatctttggcaatagctacaaccaattcttatagttgatcaaaaccatagtaggcggataaaatgttataatctcacttctgattcatctatgcaaggagacacagagcctcttgctacagacataacatggaattcagaaaatgcccagtaagcagccagactggaaaagcatgcaggtagttaattgctattaagtaataaaacataaagttgatgggtgagagggagtgagggattaaaaaactgcacattggatacagtgtatactgcttgggtgatgggtgcaccagaatctcagaaatcgcctctaaagagcttatctatgtaagcaaaaaccacctgctcccccaaaaccactgaaataaaataaaatttaataaataaataaaaataaagtagatggggcaaggaatctgtgctattaagtaataaagcatgttaaatgaatctggaaaacataaagattatatatagaccttattcaattttgaatgtaaattactttggaaataaaagcaaatcataatactcttgaatgaatcattcataaaattatattatacatcagattttcagggttcagcatcttaaaaataatatgttttacatgactccaaaagtagtccactagattaatatttagaaatacacaggaactattacagtatttattcatgtatacatcgcctaattccaaaaataatttctcaacttataactcttagaaagctaatacagttagttctttgtacacaggggttctgtaactgtggattcagcgaatcacagatcagaaatattcagggaaagggccggtgcagtggctcacacctgtaatcctatcactttgggaggctgaggcaggtggactgcctgagctcatgagttcaagaccagcctatgcaacatggtgaaaccctgtctctactaaaaatacaaaaaattggacaggcgcagtggctcaagcctgtaatctcagcactttgggaggcctacgcgggcagatcacttgaggtcaggagttgaagatcagtctggccaacatggtgaaaccccatctctagtaaaaatacaaaaattagctgggtgtggtagcggacgcctataattccagctactcaggaggctaaggcaggagaatcacttgaacccaagaggcggaggttgcagtgagccaagatagagccactgcaccccagcctgggtgacagggtgagactctgtctcaaaacaaacaaacaaaaaatttagatgggtgtggtggcgctcacctgtagtcccagccactcaggaagcagaggcccaaaaaccgcttgaacccaggaggcagaggttgcagtgagccaagatagcgccattgcactccaccctgggtgacagagtgagactctgtctcaaaaaaaaaaaaaaaaaaattaaaatattcagggaaagaaaaaactgcatctgctttgaacacctatggacattttttcttgtcattttccccttaaaaatacagtataactatttacataacacttacatagtattagatgttataagtaatgtagaaatgatttaaagtatacgggaggatgtgcataggttatatgcaaatactatgctattttatatcaaggacctgggcatcctcagaatttgatttccatgggaggtcctggagccaatccccgacagatactgagagacgactatattatatagatctataatcatttatattctgttagggactggtgggggaggagtcttttcagttaaagattaaaagggaaatacaagggaataaataagattaaaggaaatcttatttccttactgactaaactttccaagaatataattatgcagcaacagttaggggtcacgtgttaagaatagtcaggaaatcctgtctccagatgcctgaggattgctatctatttgtttgatgacttgctgtagaaatctctaggccccaagttgatattcttgtctccaccagacaccagactttgtgtgatttctctatcagcacttccttctgcctcccaactacttgccatttttacatctgtagtcctctagttctctaaagcaaatttaaatcattctattccttctgtatgttcattgagggatcagtacgtatgagtcaggcaagtaacaattaaatttatagcactttatagcctacaaagaatgaaagctagcatattagctaagagtttgggctttttgagataaattgtttaggttcaaagccctaacctgctacttactatctttgtgaacttggggaagatacttctattttttatgcctttatttccttgtctgttaaatggaggtgacaactacatccttaggatctctgtacatttaaaggagataattcatgtttagaacatagtacatggtaagtactcataagtagcacatggtaaatgttagttgataatataaccaatactataattgataaaaagagctattcctctacagtatcccatttgagttttgtaataatcttttaaggtactttagtattatcagccccattttatagatagaccctaaggctttgaggtgcaacttgccccaagtcatacaagcattcctagcagggctaggattagaattgggttgtgtaggccgggcgcggtggctcatgcctgtaatctcagcattttgggaggccgaggcgggtggatcacaaggtcaagagatcgagaccatcctggccaacatgatgaaaccacttctctactaaaaatacaaacattagctgggcgtggtggcacacgcctgtagtccagctactcaggaggctgaggcaggataatcgcttgaacctgggaggcggaggttgcagtgagccaagatcgtgccactgcactccagcctaatgacagagcgaaactttgtctcaaaaaaaaaaaaaaaaaaaaaagaattgggttgtgtacatagttcctctagggcttgtagttagactgggggggaacaggtttcatctcaagagccagccctgaacagttgaaatggttattcagagtcctgttttgataattctcaaagcaggtccaagctcattaagaaaagaatgcctgatagatgagcagtatttgccatgggctcaggaacatgtagtgggattatgtccttgctctccttttgtgtttgtttgtttcctcctacctaaagtttctcattaatccaaggatttctttataaacagaaattttggttttagtaatttatagaatcattttagccttacaagttttctagagaagtattattattcctaaaatagtttgtaactaaggcagttgatagaggggcagctcttacagctgtttctctgtaataactctttacatttgctattctcatatgggcacacagattgagaaatctagtagtcaccatttatttataattttaggtttaagtttggacatttgggttaagtactaatggcactttgagaaggaattgagaaaaccttattttcacatatgagccaaatactaatctccttgaaagtcagagaagtcgttttggatgtgtcaaataagtaccactttatttattcattcattcattcattcattcattcattcatttttgagatggagtctcactctgttgcccaggctggagtgcagcggtgtgatctctgctcactgcaacctccgcctcctgggttcaagcgattctcctacctcagcctcctgagtagctaggattacaggtgcccaccaccacaccaggctaatttattttttattttttatttttagtacagatggggtttcaccatgttggccaggctggttttgaactcctgaccaaatgatccgcccacctcggcctcccaatgtgctgggattacaggcatgagccatcgcgcccggccagtaccactttaaatataaacaaaagctaggtttctgtggagttggtatatttgaaccgcctgacttggacttcttggttttattttagccagtgttatcccatcccttattcttggtcttactatggggaagtagcaacttaatattttaaatgttgacatcacttaagtattggaaaagctagagttagcttctcggttccatcttctctacaggaaaatgcctcagaaaaaaagctggccacaactctaggtttacctctatacccagcttgggcttggcattggaatacttgggtagtcctatttctcagtatgaactacctttggggaatatgtgcagacaaagctcatgaagtctgagaacttagtactccatctcctagctgcaaagaaatacaggagagatggtaaaggaatgcacaatagcaattttcccagttagaattctatggatttcattggactattgcagtcatctcatctccagttcttgctaaaatacttcagggacatagagaatttcccacctcctctggaagtcctggccatatttggacaattctgacaaaatttcccttttacttctactttccgtataggatgggctaagcaaggaagaaaatctgcctctcagaaaacacttacatttcacactgactactatggaactgatctgctctgatttcttgagctttattgatttaaatttgagagttattttatttttattaaatatgcccaggcaaataaccaaggttaaataaatatctgaaagagctttgtgggaagtgtaaaactatttggggagaaaagaattttctcccaaaaagctttctaggaatgtaacttgtaagaactctgagacgcatactctctagagaaaaaaatatatatatttatgagaagtcagggtctttaatctttataattagaatagatattgctcagtttttaaaaatcatgtcctgatcacatttcagtttaaattacttttaaaattccattgtgcagagtcaatctttaggagtacttactggaaatgattagagaaaaaagcgtattgtttcttacagaattggtatgaagtgccttacaagacgtaattcatttatttagtgttttaaaaagaaaaatgttagccaggcgtggtggctcacgcttgtaatcccagcactttgggaggccaaggcaggtatattgtttcaggtcaggagttcgagaccagcctggccaacatggtgaaaccccatctctactaaaaatacaaaaattagccaggcgtggtggcacacacctgtagtcccagctactcaggaggctgaggcaggagaattgcttgaacccaggaggttgctgtgagctgagattgcaccactgcattccagcctgggtgacagagcaagactccatctcaaaaaatttaaaaataataataatataaataaataaatataaaaatgttgaccaggcatggtggctcacgcctgtaatcctaacactttgggaggctgaggctggtggatcgcctgaggctggtggatcgcctgaggccaggagttcgagaccagcctggccaacatggtgaaaccccgtctctaccaaaaaaacgaaaattagccgggcgtggtggcaagcacctataatcccaactactcgggaggctgaggcaggagaatcgcttgaacccaggaggtggaggttgcagtgagctgagattgtaccactgcactccagcctagatgacagaagcgagactctgcctcaaaaaaaaaaaaacaaataaaatttcattcaaaaggtaatcttgtttgtttactattgtctttttaggtgatataatccaaacatctaatataagtatgtttttaaagcaattctcagctctaaactccttttcgtaacctccctttcccaaatggaaagagttcattttctgagcagaattttagtagtttttgctggcatgaagaagaacaaacatattatagatttaggcttttatacttctttcatacttaatgtttgatctttcagtcttttcctgagacttctcttctgcctttgttagtaaagccttctctctgggagtttagttaaatcaaagagactttattattctcataaaattttctctgccatgttgaagataggagtccctttgcccttatcatttcatggatatgcatttagtatttttggttgtttcagactgaccccaattcttggcattcagaaacattctcaggaaggtatggtgtttacacggtttctagacaccctccttgaagaattacatctaaaaaatgaagaccttgaaagtctaaccatcatatttagaaccagctgtttaccagagtggtaagttggattgtgttttattttggtttttattcttcatttgttgcctatgtggattctttttttttttaattggaaattgtaaaaaccaagtacagacctcaagatgccctcagtttgctaaggaaggacatgatatcccttagttctcaactgcctcagtcacttcctgtctacttactttgtgccccatatttgttgcattcctctcttgtaggttacaacagttctgttttttgcagtccaggaaactccgcattatcagtttcatactcaagtgtaggctatcccacatgtcccatctgataagtttcttcccaggaagtagcagtttacttcaactcggctactgcagtgatccattgtgaacatcctcatcctactgcccctttcagtgaaatcaacccctacccagccaataccttagtcatttcatgtacagataagcaggtgaatttacaagtctgactttgttgaatcctaaccctgttcccagatacacagccctctcctactatcccaaacccttccctctttcagaactgcccatcagaatattcccttccttgtcctgccttaattataactttccatgtattccttccttctcatttcacacaatcccaaagtgcatgctcagataggtactgatttaatgttataattgaggaaattcatcctaagctacaaatgagattctctcagggagattttcttttttttttttttttaacgttttttaaattataaaagcaatacagaatgttgtaaaataaaaattaagcaatacagactgcataaatataaaaggaaaattcccccttcacctctgcctctaatcctatctctttcccacaagcatacttgatgtctgtcatttattttattattttttttaattttattattattatactttaagttttagggtacatgtgcacaatgtgcaggtttgctacatatgtatacatgtgccatgttggtgtgctgcacccattaatttgtcatttaacattaggtatatctcctaatgctatccctcccccaccccccaccccacaacagtccccggtgtgtgatgttccccttcctgtgtccatgtgttctctttgttcaattcccacctatgagtgagaacatgcggtgtttggttttttgtccttgtgatagtttgctgagaatgatggtttccagtttcatccatgtccctacaaaggacatgaactcatcattttttatggctgcatagtattccatggtgtatatgtgccacattttcttaatccagtctatcattgttggacatttaggttggttccaagtctttgctattgtgaatagtgcctctataaacatatgtgtgcatgtgtctttatagcagcatgattcataatcctttgggtatatacccagtaatgggatagctgggtcaaatggtatttctagatctagatccctgaggaatcgccacactgacttccacaatggttgaactagtttacagtcccaccaacagcgtacaagtgttcctatttctccacatcctctccagcacctgttgtttcctgactttttaatgatcgccattctaactggtgtgagatggtatctcattgtggttttgatttgcatttctctgatggccagtgatgatgagcattttttcatgtgtcttttggctgcataaatgtcttcttttgagaagtgtctgttcatatccttcacccactttttgatggggttgtttgcttttttcttgtaaatttgtttgagttcattgtagattctggatattagccctttgtcgatgagtaggttgcaaaaattttctcccattctgtaggttgcctgttcactctgatggtagtttctttgctgtgcagaagctctttagtttaattagatcccatttgtcaattttggcttttgttgccattgcttttggtgttttagacatgaagtccttgcccatgcctatgtcctgaatggtattgcctaggttttcttctagggtttttatggttttaggtctaacatgtaagtctttaatccatcttgaattaatttttgtataaggtgtaaggaagggatccagtttcagccttctacatatggctagccagttttcccagcaccatttattaaatagggaattctttccccatttcttgttttggtcaggtttgtccaagatcagatagttgcagatatgcggcattatttctgagggctctgttctgttccattcatctatatctctgttttggtaccagtaccatgctgttttggttactgtagccttgtagtatagtttgaagtcaggtagcgtgatgcctccagctttgttcttttggcttaggattgacttggcaatgcaggctcttttttggttccatatgaactttaaagtagttttttccaattctgtgaagaaagtcattggtagctttatggggatggcattgaatctataaattaccttgggcagtatggccattttcacgacattgattcttcctacccatgagcatggaatgttcttccatttgtttgtatcctcttttatttcattgagcagtggtttgtagttctccttgaagaggtccttcacatcccttgtaagttggattcctaggtattttattatctttgaagcaattgtgaatgggagttcactcatgatttggctgtttgtctgttattggtgtataagaatgcttgtgatttttgtacattgattttgtatcctgagactttgctgaagttgcttatcagcttgaggagattttgggctgagacgatggggttttctagatatacaatcatgtcatctgcaaacagggacaatttgacttcctcttttcctaattgataccctgtatttccttctcctgcctgatttccctggccagaacttccaacactatgttgaataggagtggtgagagagggcatccctgtcttgtgcccatttttcaaagagaatgcttccagtttttcagtatgatattggctgtgggtttgtcatagatagctcttattatgtctgtcatttaatatttatttttattatttgaatttttataaagcaatcttttttttttttgagacggagtctcgctctgttgccaggctggaatgcagtggtgcaatctcagctcactgcaacannnnnnnnnnnnnnnnnnnnnnnnnnnnnnnnnnnnnnnnnnnnnnnnnnnnnnnnnnnnnnnnnnnnnnnnnnnnnnnnnnnnnnnnnnnnnnnnnnnnnnnnnnnnnnnnnnnnnnnnnnnnnnnnnnnnnnnnnnnnnnnnnnnnnnnnnnnnnnnnnnnnnnnnnnnnnnnnnnnnnnnnnnnnnnnnnnnnnnnnnnnnnnnnnnnnnnnnnnnnnnnnnnnnnnnnnnnnnnnnnnnnnnnnnnnnnnnnnnnnnnnnnnnnnnnnnnnnnnnnnnnnnnnnnnnnnnnnnnnnnnnnnnnnnnnnnnnnnnnnnnnnnnnnnnnnnnnnnnnnnnnnnnnnnnnnnnnnnnnnnnnnnnnnnnnnnnnnnnnnnnnnnnnnnnnnnnnnnnnnnnnnnnnnnnnnnnnnnnnnnnnnnnnnnnnnnnnnnnnnnnnnnnnnnnnnnnnnnnnnnnnnnnnnnnnnnnnnnnnnnnnnnnnnnnnnnnnnnnnnnnnnnnnnnnnnnnnnnnnnnnnnnnnnnnnnnnnnnnnnnnnnnnnnnnnnnnnnnnnnnnnnnnnnnnnnnnnnnnnnnnnnnnnnnnnnnnnnnnnnnnnnnnnnnnnnnnnnnnnnnnnnnnnnnnnnnnnnnnnnnnnnnnnnnnnnnnnnnnnnnnnnnnnnnnnnnnnnnnnnnnnnnnnnnnnnnnnnnnnnnnnnnnnnnnnnnnnnnnnnnnnnnnnnnnnnnnnnnnnnnnnnnnnnnnnnnnnnnnnnnnnnnnnnnnnnnnnnnnnnnnnnnnnnnnnnnnnnnnnnnnnnnnnnnnnnnnnnnnnnnnnnnnnnnnnnnnnnnnnnnnnnnnnnnnnnnnnnnnnnnnnnnnnnnnnnnnnnnnnnnnnnnnnnnnnnnnnnnnnnnnnnnnnnnnnnnnnnnnnnnnnnnnnnnnnnnnnnnnnnnnnnnnnnnnnnnnnnnnnnnnnnnnnnnnnnnnnnnnnnnnnnnnnnnnnnnnnnnnnnnnnnnnnnnnnnnnnnnnnnnnnnnnnnnnnnnnnnnnnnnnnnnnnnnnnnnnnnnnnnnnnnnnnnnnnnnnnnnnnnnnnnnnnnnnnnnnnnnnnnnnnnnnnnnnnnnnnnnnnnnnnnnnnnnnnnnnnnnnnnnnnnnnnnnnnnnnnnnnnnnnnnnnnnnnnnnnnnnnnnnnnnnnnnnnnnnnnnnnnnnnnnnnnnnnnnnnnnnnnnnnnnnnnnnnnnnnnnnnnnnnnnnnnnnnnnnnnnnnnnnnnnnnnnnnnnnnnnnnnnnnnnnnnnnnnnnnnnnnnnnnnnnnnnnnnnnnnnnnnnnnnnnnnnnnnnnnnnnnnnnnnnnnnnnnnnnnnnnnnnnnnnnnnnnnnnnnnnnnnnnnnnnnnnnnnnnnnnnnnnnnnnnnnnnnnnnnnnnnnnnnnnnnnnnnnnnnnnnnnnnnnnnnnnnnnnnnnnnnnnnnnnnnnnnnnnnnnnnnnnnnnnnnnnnnnnnnnnnnnnnnnnnnnnnnnnnnnnnnnnnnnnnnnnnnnnnnnnnnnnnnnnnnnnnnnnnnnnnnnnnnnnnnnnnnnnnnnnnnnnnnnnnnnnnnnnnnnnnnnnnnnnnnnnnnnnnnnnnnnnnnnnnnnnnnnnnnnnnnnnnnnnnnnnnnnnnnnnnnnnnnnnnnnnnnnnnnnnnnnnnnnnnnnnnnnnnnnnnnnnnnnnnnnnnnnnnnnnnnnnnnnnnnnnnnnnnnnnnnnnnnnnnnnnnnnnnnnnnnnnnnnnnnnnnnnnnnnnnnnnnnnnnnnnnnnnnnnnnnnnnnnnnnnnnnnnnnnnnnnnnnnnnnnnnnnnnnnnnnnnnnnnnnnnnnnnnnnnnnnnnnnnnnnnnnnnnnnnnnnnnnnnnnnnnnnnnnnnnnnnnnnnnnnnnnnnnnnnnnnnnnnnnnnnnnnnnnnnnnnnnnnnnnnnnnnnnnnnnnnnnnnnnnnnnnnnnnnnnnnnnnnnnnnnnnnnnnnnnnnnnnnnnnnnnnnnnnnnnnnnnnnnnnnnnnnnnnnnnnnnnnnnnnnnnnnnnnnnnnnnnnnnnnnnnnnnnnnnnnnnnnnnnnnnnnnnnnnnnnnnnnnnnnnnnnnnnnnnnnnnnnnnnnnnnnnnnnnnnnnnnnnnnnnnnnnnnnnnnnnnnnnnnnnnnnnnnnnnnnnnnnnnnnnnnnnnnnnnnnnnnnnnnnnnnnnnnnnnnnnnnnnnnnnnnnnnnnnnnnnnnnnnnnnnnnnnnnnnnnnnnnnnnnnnnnnnnnnnnnnnnnnnnnnnnnnnnnnnnnnnnnnnnnnnnnnnnnnnnnnnnnnnnnnnnnnnnnnnnnnnnnnnnnnnnnnnnnnnnnnnnnnnnnnnnnnnnnnnnnnnnnnnnnnnnnnnnnnnnnnnnnnnnnnnnnnnnnnnnnnnnnnnnnnnnnnnnnnnnnnnnnnnnnnnnnnnnnnnnnnnnnnnnnnnnnnnnnnnnnnnnnnnnnnnnnnnnnnnnnnnnnnnnnnnnnnnnnnnnnnnnnnnnnnnnnnnnnnnnnnnnnnnnnnnnnnnnnnnnnnnnnnnnnnnnnnnnnnnnnnnnnnnnnnnnnnnnnnnnnnnnnnnnnnnnnnnnnnnnnnnnnnnnnnnnnnnnnnnnnnnnnnnnnnnnnnnnnnnnnnnnnnnnnnnnnnnnnnnnnnnnnnnnnnnnnnnnnnnnnnnnnnnnnnnnnnnnnnnnnnnnnnnnnnnnnnnnnnnnnnnnnnnnnnnnnnnnnnnnnnnnnnnnnnnnnnnnnnnnnnnnnnnnnnnnnnnnnnnnnnnnnnnnnnnnnnnnnnnnnnnnnnnnnnnnnnnnnnnnnnnnnnnnnnnnnnnnnnnnnnnnnnnnnnnnnnnnnnnnnnnnnnnnnnnnnnnnnnnnnnnnnnnnnnnnnnnnnnnnnnnnnnnnnnnnnnnnnnnnnnnnnnnnnnnnnnnnnnnnnnnnnnnnnnnnnnnnnnnnnnnnnnnnnnnnnnnnnnnnnnnnnnnnnnnnnnnnnnnnnnnnnnnnnnnnnnnnnnnnnnnnnnnnnnnnnnnnnnnnnnnnnnnnnnnnnnnnnnnnnnnnnnnnnnnnnnnnnnnnnnnnnnnnnnnnnnnnnnnnnnnnnnnnnnnnnnnnnnnnnnnnnnnnnnnnnnnnnnnnnnnnnnnnnnnnnnnnnnnnnnnnnnnnnnnnnnnnnnnnnnnnnnnnnnnnnnnnnnnnnnnnnnnnnnnnnnnnnnnnnnnnnnnnnnnnnnnnnnnnnnnnnnnnnnnnnnnnnnnnnnnnnnnnnnnnnnnnnnnnnnnnnnnnnnnnnnnnnnnnnnnnnnnnnnnnnnnnnnnnnnnnnnnnnnnnnnnnnnnnnnnnnnnnnnnnnnnnnnnnnnnnnnnnnnnnnnnnnnnnnnnnnnnnnnnnnnnnnnnnnnnnnnnnnnnnnnnnnnnnnnnnnnnnnnnnnnnnnnnnnnnnnnnnnnnnnnnnnnnnnnnnnnnnnnnnnnnnnnnnnnnnnnnnnnnnnnnnnnnnnnnnnnnnnnnnnnnnnnnnnnnnnnnnnnnnnnnnnnnnnnnnnnnnnnnnnnnnnnnnnnnnnnnnnnnnnnnnnnnnnnnnnnnnnnnnnnnnnnnnnnnnnnnnnnnnnnnnnnnnnnnnnnnnnnnnnnnnnnnnnnnnnnnnnnnnnnnnnnnnnnnnnnnnnnnnnnnnnnnnnnnnnnnnnnnnnnnnnnnnnnnnnnnnnnnnnnnnnnnnnnnnnnnnnnnnnnnnnnnnnnnnnnnnnnnnnnnnnnnnnnnnnnnnnnnnnnnnnnnnnnnnnnnnnnnnnnnnnnnnnnnnnnnnnnnnnnnnnnnnnnnnnnnnnnnnnnnnnnnnnnnnnnnnnnnnnnnnnnnnnnnnnnnnnnnnnnnnnnnnnnnnnnnnnnnnnnnnnnnnnnnnnnnnnnnnnnnnnnnnnnnnnnnnnnnnnnnnnnnnnnnnnnnnnnnnnnnnnnnnnnnnnnnnnnnnnnnnnnnnnnnnnnnnnnnnnnnnnnnnnnnnnnnnnnnnnnnnnnnnnnnnnnnnnnnnnnnnnnnnnnnnnnnnnnnnnnnnnnnnnnnnnnnnnnnnnnnnnnnnnnnnnnnnnnnnnnnnnnnnnnnnnnnnnnnnnnnnnnnnnnnnnnnnnnnnnnnnnnnnnnnnnnnnnnnnnnnnnnnnnnnnnnnnnnnnnnnnnnnnnnnnnnnnnnnnnnnnnnnnnnnnnnnnnnnnnnnnnnnnnnnnnnnnnnnnnnnnnnnnnnnnnnnnnnnnnnnnnnnnnnnnnnnnnnnnnnnnnnnnnnnnnnnnnnnnnnnnnnnnnnnnnnnnnnnnnnnnnnnnnnnnnnnnnnnnnnnnnnnnnnnnnnnnnnnnnnnnnnnnnnnnnnnnnnnnnnnnnnnnnnnnnnnnnnnnnnnnnnnnnnnnnnnnnnnnnnnnnnnnnnnnnnnnnnnnnnnnnnnnnnnnnnnnnnnnnnnnnnnnnnnnnnnnnnnnnnnnnnnnnnnnnnnnnnnnnnnnnnnnnnnnnnnnnnnnnnnnnnnnnnnnnnnnnnnnnnnnnnnnnnnnnnnnnnnnnnnnnnnnnnnnnnnnnnnnnnnnnnnnnnnnnnnnnnnnnnnnnnnnnnnnnnnnnnnnnnnnnnnnnnnnnnnnnnnnnnnnnnnnnnnnnnnnnnnnnnnnnnnnnnnnnnnnnnnnnnnnnnnnnnnnnnnnnnnnnnnnnnnnnnnnnnnnnnnnnnnnnnnnnnnnnnnnnnnnnnnnnnnnnnnnnnnnnnnnnnnnnnnnnnnnnnnnnnnnnnnnnnnnnnnnnnnnnnnnnnnnnnnnnnnnnnnnnnnnnnnnnnnnnnnnnnnnnnnnnnnnnnnnnnnnnnnnnnnnnnnnnnnnnnnnnnnnnnnnnnnnnnnnnnnnnnnnnnnnnnnnnnnnnnnnnnnnnnnnnnnnnnnnnnnnnnnnnnnnnnnnnnnnnnnnnnnnnnnnnnnnnnnnnnnnnnnnnnnnnnnnnnnnnnnnnnnnnnnnnnnnnnnnnnnnnnnnnnnnnnnnnnnnnnnnnnnnnnnnnnnnnnnnnnnnnnnnnnnnnnnnnnnnnnnnnnnnnnnnnnnnnnnnnnnnnnnnnnnnnnnnnnnnnnnnnnnnnnnnnnnnnnnnnnnnnnnnnnnnnnnnnnnnnnnnnnnnnnnnnnnnnnnnnnnnnnnnnnnnnnnnnnnnnnnnnnnnnnnnnnnnnnnnnnnnnnnnnnnnnnnnnnnnnnnnnnnnnnnnnnnnnnnnnnnnnnnnnnnnnnnnnnnnnnnnnnnnnnnnnnnnnnnnnnnnnnnnnnnnnnnnnnnnnnnnnnnnnnnnnnnnnnnnnnnnnnnnnnnnnnnnnnnnnnnnnnnnnnnnnnnnnnnnnnnnnnnnnnnnnnnnnnnnnnnnnnnnnnnnnnnnnnnnnnnnnnnnnnnnnnnnnnnnnnnnnnnnnnnnnnnnnnnnnnnnnnnnnnnnnnnnnnnnnnnnnnnnnnnnnnnnnnnnnnnnnnnnnnnnnnnnnnnnnnnnnnnnnnnnnnnnnnnnnnnnnnnnnnnnnnnnnnnnnnnnnnnnnnnnnnnnnnnnnnnnnnnnnnnnnnnnnnnnnnnnnnnnnnnnnnnnnnnnnnnnnnnnnnnnnnnnnnnnnnnnnnnnnnnnnnnnnnnnnnnnnnnnnnnnnnnnnnnnnnnnnnnnnnnnnnnnnnnnnnnnnnnnnnnnnnnnnnnnnnnnnnnnnnnnnnnnnnnnnnnnnnnnnnnnnnnnnnnnnnnnnnnnnnnnnnnnnnnnnnnnnnnnnnnnnnnnnnnnnnnnnnnnnnnnnnnnnnntatgagactatgtgaaaagaccaaatctatgtttgattggtgtacctgaaagtgatggggagatcagaaccaagtttgaaaacactcttcaggatattatccaggagagcttccccaacctagcaaggaaggccaacattcaaattcaggaaatacagagtactccacaaagatactcctcaagaagagcaaccccaagacacataattgtcagattcaccaaggttgaaatgaaggaaaaactgttaagggcagccagagagaaaggtcaggttacccacaaagggaagcccatcagattaacagcggactctgggcagaaaccctacaagccagaagnnnnnnnnnnnnnnnnnnnnagatatttgaaagaggtgattttggtgattaagaaagaataccagaccgggtgcgcagtggctaatgcctgtaatcccagcactttgggaggctgaggcaggaggatcacttgaggtcaggatttcaagaccagcctggccaacatggtgaaaccctgtctctactaaaaatacaaaaattagctgggcgtggtggcaagtgcctgtaatcccagctactcaggaggctgaggcaggagaatcacttgaactcaggaggtggaggtcgcagtgagccgagattgtgccactgcactccagcctgggtgacagtgcaaaactccatctcaaaaaaaaaaaaaaaggaattagcactgtaactgccccccaatttatacccaatggtcttttcaagtgatcctgctactctgaggacactatatagcaaaggcttttactgaaggagtgagcttgggttggtttgtataagcataacattcaaaggcccttaaagaatatggagaggttggaatttaaaccaatcatactcctcagtccatgacatcctttgtacattggttgacaggtgtcttggctgggtgcagtagcttatgcctaaaattccagcactttgggaggccaaggtgggaggatcgcttgagcccaggagttcaagaccagtctggcaacaaagttgcccagttttgtagagatcctgtctctacaaaaaataaaaaaattagtcagatatggttgcctacaggtggcacctgcctgtaatcccagctactcgggaggctgaggcaggaggatttcttgagcccaggaggtcgaggctgcagtgagccatgatcacaccactgcactccagcctgggcaccagagcaagaccctgtctcaaaaaaaaaaaaaaaagaggtttctatttcagactgagagcaaacagtacctagccagaagtccttctaaacctgctgtaatgaatagataccaattaaaaatcattttaactagcatattttaaacttgtacataaacagatgatgttaaagtagttttaaggactttcaacagtagatgttttaagtggacttaacagttcccctatgatcattatttatttacattgttcatttgcttaagtaatcaaaggtaaatcttggcccagattactttgtcagtattataaaggattatgaatgaatggcccttattacataattttctatatgagaaatgaagatggttgtgagtagaaggatagaaggtttttttgtttgcattattttggtatgccatggtaaattcatttgagtttagagattttaatatctagtaaccttttgaagattactacctagtatattaatatgctttcagttgtgaataacagaaaaaaaatccatttccaactaccttttgttattgtggtatattagttaacttttgttactaacaaatttctccaaacaaacaaacaaacaaaaaagatgtttgtggtttaaagtaacaaacattttttatgtcacagtttctgtgagtcaggaatctaggtgcagttgaactgggagcctctggctcagggtctttcctgatgttacagttaagctatctgccagcgctatgatgtcacctgaaggctagaatggaagatctccttcaggctcactcatgtggttgttggcaggatcgcactcctcatagactattgaactcagggtctcagtttctcactgttgtctagaaacctcccctaatcccctgcccataggcctttctagagtgcacctcacaacatggcatgtggcttccatcggagtgagccagtgagagaggatacccatgatggaagccacagtctttttgtattaataactaatctcagaagtgacatcccatcacttttgctatattctgttagttagaaactagtcactaggtccagcccatactcaaggtgagaggattatacaagggcatgaataccaggagacaacagccattgggggatatcttagaaggtgtctagcagaggggcaaaaatgttcagtaggctccagttttatatatagcataccatactgccttggtgagagtcttgaacttcatcctgactgaggacagccctgaaccaattcatggggtcatgggaatgctgtgagctaacgaaatcattctggcaaaggataaggggaagagctaatgaaatcattctggctagggatgaaggaaagagaagggcttttccagttgaccttgatcagttaaaacttagccctcaagttgaatacgaagctcagtctactccacccaaactgttgttgggtagaatatacatgatggggaagaaattgaatgaatattgacaagacacacagtgtctacaacagctagtaaaatactttacatgtttttttgttgttttgttttttgggttttttttgagatggtgtcttgctctgtcacccaggctggagtgcaatggtgcaatcttggctcactgcaatctctgcctcccgagttcaagcaattcttctgcctcatccttccgagtagctgggactacaggtgcatgccaccatgcctggcaaactttttgggtttttttgtatttttagtagagatgggggtttcaccatgctggccaggttggtctcaaactcctgacctcatgatctgcctgccttggcctcccaatacatgttttactcaaagtatccttttttgcttcacagatatattccatgaagacaaaatagaagatgaacttctattcaccgtttctggaattctagccgccatgatggtctggtggtgactgataactagttttattccaagacatacctttacctctttaagtttcaatctcccatctcccagtccttcagtccccaactgcagaggatgacctccccagatagaggagaatcattactccaacaagaataaccaagtctttgtatccctagtacaagacatagtatttttattcgaaaatgaatgtttaagtattaaattgaaacttgaatgaatattcaagaaaatataatgatctctactttttctggatgatttccagccatcatatcagtttgccaaaaaaattgagaaagttatgattttgacctcccaacctaaactctaaattctaaagatcagtaaacaattaggtcaataaatacatacaatttaagatgaagccctttggaagtctagtccaaaacaggaaaatctcagaactttctggactcaaggaaatgctttaaatggaatctgtagtttgtttgcaggagagacaatttctagaatttagattgcttttcaaaatgtttatcaggtaggcaagttagcagttgaggcggaacacagacaacttggggagctttactggaaggccaagaaaatactcttggacactggaggaaatgacagctactaaagcccaatcatggaaaaggaccagaaagcagcccactggaatggggagcttagtgggcaaggaggtagggatataatttctcttcttggctccaccagtaattagctctgtggcccagtcacctaaactttctggacttcagttcaggttgtatggcagtaggccatagaattggctactgccatacaatctctatgggaaaggactgcaaaaactaaattttatctctgtatgggcaaaggctactgtcatcctgttgttggtctggggccactctgacaattttttttaacctcatttgattgtgtaagggtctaaccacaacaaaaaatcatagtgtaatagaattaatcaagttcagcaaggtcacaggctagatcaatatacagaaaatcaattgtatttttctgttcagaaaactccaaaaatgaaataaagaaaattgtgttcacaatatcaccaaagagaattaaatacttaggaataaatttaacaaaataagtataagacttgtataacgaaaactataaaacattcaagagggctgggcatggtggctcatgcctttagttctagcactttggaggcagaggcaggaggactgcttgagcccaggagttcaagaccagcctgggcaacaaagtgagaccctgtctccacaaaaaataaaaataaaaataaattgaagatggccgaataggaacagctccagtctacagctcccagcaggatggacacagaagatgggtgatttctgcattttcaactaaagtacctggttcgtctcactgggactggctggacagtgggtgtagcccacagagggttagccgaagcaaggtggggcatcgcctcacctgggaagcgccaaggggtcgggggatttccctttcctagccaagggaagccgtgagtgactatacctggaggaggggtacactcctgcccaaatactgctcttttcccacagtcttcgcaactggcagaccacgaaatcccctcccatgcctggttcagtgggtcccacgcccacagagccttgctcactgctagcgccagcagtctgaaatcgacctgggacgtgggagcttggcggggtagaggtgtccgccattgctgaggcttgagtaggcggttctatgctcacagtgtaaacaaagcagcagggaagctcaaactgggcagagcccaccacagctcagcaaggcctactgtctctgtagattccacctccaggggcagggcatatctgaacaaaaggcagcagacagcttctccagacttaaacgtccctgcctgacagctctgaagagagcagtggttctcccagcaccgcgttcaagctccgataatagacagactgcctcctcaagtgggtccctgacccccgtgtagcctgactgggagacatctcccagtaggcgccgaaagacacctcagagaggtagatgccccactggaacgaagcttccacagtaaggatcaggcagcaatatttgctgttctgcagcctccactggtgacacccaggcaaacagggtctggagtggacctccagcaaactccaacagacctgcagctaaggggcctgtctattagaaggaaaactaacagaaaggaatagcatcaacatcaaaaaaaggacatctacaccaaaaccccatccataggacaccaacatcagagaccaaaggtaggtaaaaccacaaagatggggagaaaccagaccagaaaggctgaaaattccaaaaaccagaatgcctcttctcctccaaaggaacacaactccttgccagcaagggaacaaaactggacagagaatgagtttgacaagttgacagaagtaggcttcagaaggtcggtaataacaaacttctccaagctaaaggagcatgttctaatgcgtcgcaaggaagctaaaaatcttgaaaaaaggttagacaaatggctaactagaataaccagtgtagagaagagcttaaatgacctgatggagctgaaaaccacagtacgggaacttcgtgaagcatacacaagcttcaatagccaattcgatcaagtggaagaaaggatatcagtaactgaagatcaaattaatgaaataaagcgagaggacaagattagagaaaaaagagtgaaaagaaatgaacaaagcctccaagaaatatgagactatgtgaaaagaccaaatctatgtttgattggtgtacctgaaagtgatggggagaacagaaccaagtttgaaaacactcttcaggatattatccaggagagcttccccaacctagcaaggaaggccaacattcaaattcaggaaatacagagaacaccacaaagatactcctcaagaagagcaaccccaagacacataattgtcagattcaccaaggttgaaatgaaggaaaaactgttaagggcagccagagagaaaggtcaggttacccacaaagggaagcccatcagattaacagcggacctctgggcagaaaccctacaagccagaagagaatgggggccaatattcaacattcttaaagaaaagaattttcaacccagaatctcatatccagccaaactaagcttcttaagtgaaggagaaataaaatcctttacagacaagcaaatgctgagagattttgtcaccaccaggcctgccttacaagagctcctgaagtaagcactaaaatggacaggaacaaccagtaccagccactgcaaaaacatgccaaatggtaaagaccatcaacactatgaagaaactgcatcaattaatggatgaaataaccagctagcatcataatgacaggatcaaattcccacataacaatattaaccttaaatgtaaatgggataaatgccccaattaaaagacacagactggcaaattgaataaacagtcaagacccatcagtgagctatattcaggagacccatctcatgtgcaaagacacacataggctcagaataaaaggatgtaggaagatttaccaagcaaatggaaagcagaaaaaagcaggggttgcaatcctagtctctgataaaacagactttaaaccaacaaagatcaaaagagacaaagaaggtcattacataatggtaaagggatcaattcaacaagaacagctaactatcctaaatatatatgcacccaatacaggagcacccagattcataaagcaagttctacaaagagatttagactcccacacaatattaatgggtgactttaacaccccactgtcaatattagacagatcaacaagacagaaaattaacaaagatatccaggacttgaactcagctctggaccaagcagacctaatagacatcgacagaactctccaccccaaatcaacagaatatacattcttgtcagcaccacatcacacttattccaaaattgaccacataattggaagtaaagcactcttcagcaaatgcaaaagaacagaaatcacaacaaaccgtctcagaccacaatgcaatcaaattagaactcaggatcaagaatctcactcaactgcacaactgcatggaaactgaacaacctgttcctgaatgactactgggtaaataacgaaatgaaggcagaaataaagatgttctttggaaccaacgagaacaaagacacaatgtaccagaatctctaggacatgtttaaagcagtatgtagagggaaatttatagcactaaatgcccacaagtgaaagcaggagtgatctaaaatcaacaccctaacatcacaattaaaagaactagagaagcaagaccaaacaaattcaaaagctagcagaaggcaagaaataactaagatcagagcagaactgaaggagatagagactcaacaaacccttcaaaaaatcagtgaatccaggagctagttttttgaaaagatcaacaaaattgatagaccgttagcaaggctaaaaaagaagaaaagagagaagagtcaaatagatgcaataaaaaatgataaaggggatatcaccactgatcccacagaaatacaaactaccatcagcgaatactataaacacctctacacaaataaactagaaaatctagaagaaatggataaattcctcgacacatacaccctcccaagactaaaccaggaagaagttgaatctctgaataaaccagtaacaggttctgaaattgaggcaataattaatagcctaccaaccaaaaaaagtccaggaccagacggattcacagccaaattctacgaaaggtacaaagaggtgctggtaccattccttctgaaactattccaatcaatagaaaaaaagggaatcctccctaactcattttatgaggctaacatcatcctgataccaaagcctggcagagacacaacaaaaaaagagaattttaggccaatatccctgatgaacatcgatgcgaaaatcctcaataaaatactggcaaaccgaatccagcagcatatcaaaaagcttatccaccacgatcaagtcagcttcttccctgggatgcaaggctggttcaacatatgcaaatcaataaacataatccatcacataaacagaaccaacggcaaaaaccacatgattatctcaatagatacaaaaaaggccttcaacaaaattcaacagcctttcatgctaaaaaccctcaataaactaggtattgatggaatgtatctcaatataataagaggttatttatgacaaacccacagccaatagcatactgaatgggcaaaagctggaagcatttcctttgaagaccagcacaaggcaaggatgccctctctcaccactcctattcaacatagtattggaagttctggccagggcaatcaggcaagagaaagcaataaagcatattcaaataggaagagaggaagtcaaattgtctctgtttgcagatgacatgattgtatatttagaaaaccccatcgtctcatcccaaaatctccttaagctgataagcaacttcagcaaagtctcaggatacaaaatcggtgtgcaaaaatcacaagcattcctatataccaataatagacaaagagccaaatcatgagtgaactcccattcacaattgctactaagaaaataaaatacaaagcactgctcaaggaaataagagaggacacaaacaaatggaaaaacattccatgctcatggataggaagaatcaatatcatgacaatggccttgttgcccaaactgatttatagattcaatgctatccccatcaagctaccactaactttcttcacagaattggaaaaaactactttaagattcatatggaaccaaaaaagagcccacctagccaagacaatcctgggcaagaagaacaaagctggaggcatcacactacctgacttcaaactttactacaagcctacagtaaccaaaacagcatggcactggtacaaaaacagatatgcagacgaatggaacagaatggaggcctcagaaataacaccacacgtctaccaccatctgatctttgacaaacctgacacacacaagcaatggggaaaagattccctatttaataaatggtgttgggaaaacgggctagccatatgcagaaaactgtaactggaccctttccttacaccttatacaaaaatcaactcaagatggaacaaagacttaaacgtaagacctaggaccataaaaatcctagaagaaaacctgggcaataccattcaggacataggcatgggcaaagacttcatgtctaaaacaccaaaagcaatggcaacaaaagccaaaattgacaaatgggttctaattaaagagcttctgcacagcaaaataaactatcatcagagtgaacaggcaacctacagaatgggagaacatttttgcaatatatccatctgacaaagggctaatatccagaatctacaaagaacttaaacaaatttacaagaaaaaagcaaacaaccccatcaaaaaatgggcaaaggatatgaacagatacttctcaaaagaagacatttatgcagccaacagacatatgaaaaaatgctcatcatcactagtcattagagaaatgaaaatcaaaaccacagtgagataccatctcatgccagttagaatggcgatcattaaaaatcaggaaacaatagatgctggagaggttgtggaaaaattggaacgcttttacactgttggtgggagtgcaaattagtccgaccattgtggaagtcagtgtgacgactcctcaaggatctagaactggaaataccatttgacccagcaatcccactattgggcatatacccaaaagattataaatcattctacaataaagacacatgcacacgtatgtttattgctgcactattcacaatagcaaagatttgaaaccaacccaaatgcccgtcaatgatagactggattaagaaaatgtggcacatgtataccatggaatactatgcagccataaaaaaggatgagttcatgtcctttgcagggacatggataaagccggaaaccatcattctcagcaaactatcacaagatcagaaaaccaaacaacgcatgttctcactcataagtgggagttaaacaatgagaacacatggacacagggagggtaacatcacacaccagggcctgtggggggtggggggctaagggagggataacattaggagaaatacctaatgtaggtgacaggttggtgggtgcagcaaaccaccatggcatgtgtatacctatgtaacaaaactacatgttctgcacatgtaacccagaacttaaagtataataaaaaaaataattattaaattttaaaaaactagccaggcatggtgctgcacacctgtagtcccagctacttgagaggctacattgggaggattgcctgagcttgggaggttgaggctgcagttagctgtgactgtgccagtgcactccagcctgggcaacagagcaagaccctgtctcaaaaaaagaaaaagaaaaattcagagagattaaagaaggtatcaagaaatgtagacacaatccatgttcatgaattggaagatcaaatgttgttaagatagcagttctccccaaattaatctacaatgcaatccctatcaaaatcacagcaggcttttttgaaaaattgacaagccaatcttaaaatctgtatgaaaacataaaggattcagaatagccaaaataattctgaaaatgaagaaataattctgatccagaacttactacaaagctacattaatcaagacagtgtggtactgatataaagataggcatacagatcagtggaacagagtccaggaataaaccttcacatttatgatcaattaagttttgacaaaaatcccaatgaaattatggagaaaagatggtcttttcaacaaatagtgctaggatatttggatatcaaatgcagaagaaattaatttagattcttacctcctaccatatgcaaaaataaactcaaaattgatcacacacctacatgtaagagctaaaactataaaacatgtagaagaaaacatgggagaaaacctagatgaccttggtttaggaagaattcttaagacactaatagcacaattcataaaagaaaatattaataaattggacttcattaaaatataaaattttgtttcaaaaaactattaagaaaattaattggcccggggaggtggttcacatctgaaatccctgcactttcggaagccaaggagggtggaccacttgagctcaggaatttgagaccagactggacaacagagcaaaatgccatctccacaaaaaatacaaaaattaaccaggcatggtggcgtgctcctgtagtcctggctactcagaaggctgaggtgggaggatctcttgaccctgggaggcagaggttgcagtgagccaagatcacaccaccgcactagagcctgggtgacagagtgagaccctgtctcaaaaaaaaaaaaaaaaaaaaaattaattgaaaaatcacagactgggagaaaatattttcaaaccataataagtatctgatagaggacttgtatctagactatgtaaagaattcttaaaactcaaaaataaggcagacaacttaaaaatggacaaaatgtttgaatagatatttcagcaaagatatacaaattgcttagcatatgaagagatgtgtactatcactagtcattaggaaaatacaagttaaaagcaaaattagataccattttggacccactaaaatgactataataaaaaagacagacaaagatatgtgttggtgatgatgtggagaaactggagccctaatgcattgctggtgggaatgtaaaatggtgcagccactttggaaaacagtttggcagtttcttaaaaagataaacataagtttaccatatgatcctgctattccatgagaagagaagtggaaatgtgttcacatcaagactcgtaggcaaatgttcatagcattatcattcatattagtcaaaaagtggaaaccaaatgaccatcaactactggattttttttttttttttaagagatgaggcctcactatgttgcatactctgaagtcaaactcctgggctcaaacaatcctcctgcctcagcctcctcagtaactgggactgcaggcaggcaccaacatacccagattatttctttttctttttttttttaactggtggatttctttaaatgatatatgtatacaatggagtagtgatataggctacaatatggatgcatctcaaaacattatgcttagtgaaagaagtctgatgcaatatcccacatatggtatgtttccatttacagtccagaaaaggcatatactaaattagcagttgcatgggtctgatgtgaaaacatggattgcctgcagatgggcacaagggatcttttgggggtgacaaaaatgttccaaaactaagttgtaatttttgcacaacttttatgtgtgtgtgtgtgtgtgtgagatggagtttcactcttgttgcccaggctggagtgcaatggcgcgatctcagctcaccacaacctccgcctcctgggttgaagcatttctcctgcctcagcttcctgagtagctgggattacaggcatgtgccaccatgcccggctaattttgtatttttagtagagacaggttttctccaggttggtcaggctggtctcgaactcctgacctcaggtgatcctcctgcctcggcctcccaaagcgctgggattacaggcgtgagccaccacacccagccatttttgcacaactttataaactttaaaaataattgatttatgcacttaaaacaggtaaagtttatgtgtataaattataccttaataaagctattaaaagtcaaagattataacagggcctctctctctctgacctagtgacctagggtaaagagaaaaagaagctagccaggcacaggggctcacacctgtaatcccagcactttgggaagccaagatgggctgattgcttgagtccaggagtttgagaccaacttgggcaacatagcaaaaccctgtctccaccaaaaataaaaaaaattagccaggcatggcggtgtatgcctggagtcccagctactcaggagtcagaggtgggaggatcacttgagcccaggaggcagaggttgtagggagccaagattgcaccactgcactccagcctgggtgacagagcaagacactgtctcaaaaattaaaaattaaaaaatgagggaagctgctgtatctccacttcttccctctctgtgcccagagatatctcttcagttatctcacatgccctacaagtctagagacctcaggtgaggagccagtagctcagtatagaaactaaggatccaagtagacaactgccaccaagtcaccacagggccagctgctttgggagggtgctgcatctgcctcccatacacttctgccaagtttatgttagtttgggaggactgaagcagaattcagttcaaagtactgtgctggattttggtttctaaatattttccaatagaaaagaacccaggcttcttgagaaaatagctaggttctaaggctagagccaaaaaaatgcaagataagcctggagcatcttgtagtaccagaaactaagcaagtgctcaaaaacaaaaggatagaagcatgtcagacagacacaggagccaatctgaaagagctccctggccgggcacggtggctcacgcctgtaatcccagcactttgggagactgaggtgggaggatgacttgagcccaggagtttgagaccagcctgggcaacatagggagaccccatctctacaaaaaagtaaacaattagccgggcatggtggcacacgcctatagtcccagctactcaggagggtgaagatcacctgagaccaggcggtcaaggcttcagtgagccatgattgtggcactgcactccagcctaggcaatagagtgagactgtctcaaaaaataaaattttaaaataactgaagag

SEQ ID NO: 1670 - DNA, 3065 bp, Homo sapiens
tagggaggcggggcctcggggcgagacgccggagcgtgtccccgtccggcagactactctcccccatggcggacttcgctgggccgtcttctgccggccgcaaggccggggctccccgctgctctcgaaaagccgcaggtactaaacagacaagtactttgaaacaagaagatgcttctaaaaggaaagctgaactagaagcagctgtgagaaagaagattgaatttgagagaaaagctctacatattgttgaacagcttttagaggagaatattacagaagagttcctaatggagtgtgggaggttcattacacctgctcactacagtgatgtcgtggatgaacgttctattgtcaaactctgtggttatcctttatgtcagaagaagctgggaattgtaccaaaacagaaatataaaatttctaccaaaaccaataaagtctatgatattactgaaagaaagtctttttgcagcaatttttgttatcaagcatctaagttttttgaagcacaaattcccaaaactccagtatgggttcgagaagaagagaggcatcctgattttcaactgctaaaggaagaacaaagtggccattctggagaagaagtacagttatgcagtaaagccattaaaacatcagatatcgacaatcctagccactttgaaaagcaatatgaatctagttcttctagcactcacagtgatagtagcagtgacaatgagcaagactttgtttcctccattctaccaggaaacagaccaaattcaacaaatattagaccacagctgcaccaaaaaagcataatgaaaaagaaagctggtcacaaagctaactccaaacacaaagacaaagaacagacagtagtagatgtcactgagcagttaggcgattgcaaattagatagtcaggagaaagatgctacatgtgaacttcctttacagaaagtaaatactcagagttcttcaaatagcactttgcctgaaagattaaaagcgtcagaaaattctgaaagtgaatacagtaggtcagaaataactctagtaggcataagtaagaaaagtgcagagcattttaagagaaaatttgccaaatcaaaccaagtgtctaggtcagtgtctagttcagtgcaggtgtgtcctgaagttggaaagagaaacttacttaaagttttgaaggagactttgattgagtggaagacagaagaaacattgaggtttttgtatggccagaattatgcttctgtgtgtctgaaacccgaagcctctctggttaaagaagaacttgatgaagatgacataatctcagatccagatagtcatttccctgcctggagggaatctcagaacagcttggatgagtctttaccttttaggggctcaggtacagccattaaaccactgccaagttacgagaatttgaaaaaagaaactgaaaagttaaatctgaggatcagggagttttacagaggacggtatgttttgggtgaagaaaccaccaaatcacaagactcagaagagcatgattccacctttccactgatagactcaagttcccagaaccagattagaaaacgcatcgtacttgaaaagttgagtaaagtgttgcctgggcttctggttcctcttcagattacattgggagatatttacacacaacttaaaaatcttgttcgaactttcaggttaacaaatagaaatattatacacaaacctgcggaatggactttaattgctatggtgttgctgtcattactgaccccaattcttggcattcagaaacattctcaggaaggtatggtgtttacacggtttctagacaccctccttgaagaattacatctaaaaaatgaagaccttgaaagtctaaccatcatatttagaaccagctgtttaccagagtgatatattccatgaagacaaaatagaagatgaacttctattcaccgtttctggaattctagccgccatgatggtctggtggtgactgataactagttttattccaagacatacctttacctctttaagtttcaatctcccatctcccagtccttcagtccccaactgcagaggatgacctccccagatagaggagaatcattactccaacaagaataaccaagtctttgtatccctagtacaagacatagtatttttattcgaaaatgaatgtttaagtattaaattgaaacttgaatgaatattcaagaaaatataatgatctctactttttctggatgatttccagccatcatatcagtttgccaaaaaaattgagaaagttatgattttgacctcccaacctaaactctaaattctaaagatcagtaaacaattaggtcaataaatacatacaatttaagatgaagccctttggaagtctagtccaaaacaggaaaatctcagaactttctggactcaaggaaatgctttaaatggaatctgtagtttgtttgcaggagagacaatttctagaatttagattgcttttcaaaatgtttatcaggtaggcaagttagcagttgaggcggaacacagacaacttggggagctttactggaaggccaagaaaatactcttggacactggaggaaatgacagctactaaagcccaatcatggaaaaggaccagaaagcagcccactggaatggggagcttagtgggcaaggaggtagggatataatttctcttcttggctccaccagtaattagctctgtggcccagtcacctaaactttctggacttcagttcaggttgtatggcagtaggccatagaattggctactgccatacaatctctatgggaaaggactgcaaaaactaaattttatctctgtatgggcaaaggctactgtcatcctgttgttggtctggggccactctgacaattttttttaacctcatttgattgtgtaagggtctaaccacaacaaaaaatcatagtgtaatagaattaatcaagttcagcaaggtcacaggctagatcaatatacagaaaatcaattgtatttttctgttcagaaaactccaaaaatgaaataaagaaaattgtgttcacaat

SEQ ID NO: 1671 - protein, 612 aa, Homo sapiens
MADFAGPSSAGRKAGAPRCSRKAAGTKQTSTLKQEDASKRKAELEAAVRKKIEFERKALHIVEQLLEENITEEFLMECGRFITPAHYSDVVDERSIVKLCGYPLCQKKLGIVPKQKYKISTKTNKVYDITERKSFCSNFCYQASKFFEAQIPKTPVWVREEERHPDFQLLKEEQSGHSGEEVQLCSKAIKTSDIDNPSHFEKQYESSSSSTHSDSSSDNEQDFVSSILPGNRPNSTNIRPQLHQKSIMKKKAGHKANSKHKDKEQTVVDVTEQLGDCKLDSQEKDATCELPLQKVNTQSSSNSTLPERLKASENSESEYSRSEITLVGISKKSAEHFKRKFAKSNQVSRSVSSSVQVCPEVGKRNLLKVLKETLIEWKTEETLRFLYGQNYASVCLKPEASLVKEELDEDDIISDPDSHFPAWRESQNSLDESLPFRGSGTAIKPLPSYENLKKETEKLNLRIREFYRGRYVLGEETTKSQDSEEHDSTFPLIDSSSQNQIRKRIVLEKLSKVLPGLLVPLQITLGDIYTQLKNLVRTFRLTNRNIIHKPAEWTLIAMVLLSLLTPILGIQKHSQEGMVFTRFLDTLLEELHLKNEDLESLTIIFRTSCLPE

SEQ ID NO: 1672 - DNA, 121743 bp, Mus musculus
  misc_feature (1)...(121743): n = A, C, G or T/U
gcagggtagtacaagatcattaatacgtaataagaattccagcaaaaaaatatgtgtatgtttatatgggttcaatacccagatctgactattgactatctctacttgacaatacatttattataaacactacaagtgagtgtaaacttaaattctgtttcatgataaacctaaatcactagtacttgaataaaattgtactacagactgataaaccagaaaggcagaatgtttttgtatacattggcttttatttctacattaggtgtttataatttgggattgttctaagtcaataaatgaccagaggtaattttgtgagagctataataaaaactgtaataaatatgcatacctagtgctaagtcttatggtaggaatatacatttcacaaaatctatctgaacatttataataaaaacagtaattagaaaataaaagctatgacaaatacaatttcttctggggaattttagattaccctcctttgatctgatttctattataattgggttagcaagaagagcccacctgattctagatgttacacttctctaggtaaacttgttggatctggtgtcatatttatctcatttttttccttcatgtttctgatggttttgagaatttagaaaggagctgtttatttacactgatgtcagatcttttcattagtatgtccctcacacctgcttgtgataacgcattatcaataccaacataacactgctgatgcgtaatataaaaataagttcatcttatctctaatttaatcttagctaatgtctagacagaatgcatcttagtcacaaacatcaactaccctttatataccttatatcaaagacaaagtctaatttttatgaagaaagaatccctttccagttttaattataaaaatgttaggttttggaagtatagactaagtatataaaaactaatacttgtggataatatttcacattatatttggttgtaaaaatgataggagtattttttcagtggtatgcttctatttacttttttgggagagatttagtagataaaagctgatctattcagtccatgattatataattatcaaatgatttcttctttttttcttttctttctttttttttaatttttgttttttcaagacagggtttctctgtatagccctggctgtcctggaactcactttgtagaccaggctggcctcgaactcagaaatccgcctgcctctgcctcccaagtgctgggattaaaggcgtgcgccaccattgcccggccatcaaatgatttctaatgtaaggtattggaaacttctttaattaacttgtacctgccacatgtacagagaaaattctaggtaaaagcaaactggtggcatgtttatgaacattgttaattcatttaattcatatatgatatctgggaaagatttttaactttaggaaaatagttattatggcttcattcaattaaatctaaattttacatgacatcttgttttatacctaagtataaaacaagtcaataaagttatctggacataatgattttcctttcataataaattttacatatcttacacttacatacatttctaaaaatgttatgggaaatatgactaatatcttgactgtaacagtgtattagaattttctacctctttttttcaatgttaaataatctgtgttggagttttaagttctacttttcctcttatcttcaaatagacttttcagcgtataaacttgaatagctgacaccaccaccatgaccatcaagttaaccacagaccagaaattgactctgtcaaagttgctttcttgtatgtttcgatctcgagcttcaaatgctctaagtagagtttgtatgtggccacttttgcttagtctggacttgatgctgttgatggattcctggagatgaatacaataattttactattaaaaagactaagagcatgtttaacaatatgcttcatgctagttcttaaaatacaagacaattttttaaatagatgggaatacaattcaattaaagggcaggtatgacttgtatcatctaaagagcccccatgaagttataacatagtaaggataaatttaaatttctttaacagaggaataattctttaaccagaaatcgaaaaaacaagatcaaagtatttgagtagcatagcacagggcctttttttgttttgttttgtttttttcaaaatagggtttttcttttcttttttaaaagaattttaatatattttatttatatgagtacactgtagctgtcttcagacacacctgaagagagcatcggatcccattatagatggttgtgagccaccatgtggttgctgggaattggaactcaggactctgaaagagcagtcagtgctcttaaccattgagccatcaatccagctcaaaaaacagatttttctatgtagctgtggctgtcctagaagttgctctgtgggctaggctggacttgaactcagacagatctgcttgcctctgcctcctgaatgctggaattacaggcatgtgccaccactgcctggcagcaacaggacttttatatatactgtctctcttgtagtcctgacaattttacctaacacatttttgtgtctatagtactttactgtttaaatgttagttatgtcatccaggcagcttcaatgtaattacacagagtctggagtgatacaagaggcacaagccatggattgacagcaacacctgtaagactttagacctgtgaaattcacttcagatttgtgagacaataaatccattttgttgttgttgttgtttaaagtttcactacatctgaaaaaagggtattttcatgataggattcacttaagatatgtgatttgaaaaactaattaataagaggataaacataacattgagacttgaaatgatataaaaaaatggcaaaaccaacagtttctggaaaatacagctaagattgcttagttcaatccctgacatatagtaaaacactggatgctggattgtcattacttattaaaagggcctactaaccaggatatcttctagcttcatctccaggacatctgtattagtaatatactttttccagtcttcttggccttgaacctcttctcccatattatccaggatcaattcaaagaaaattaccttctcagaaatggtgctgaatgtgttatcaaagcagaacatgtaatcaccatcttcagtctctatactacatttaaaaaaaagggcacacttttagtattctgtatttctatttgggaaacaacctggacacatctattcaaatattttcaagtttcacacacttggaacttacttggccaattatgttatattgatctaattattttgaggtggggcctgggaaaaataccattcacagctgaaatacatgataagtcctaataagctttaatatttatactttatttaaagaaattctatattaagtcctattcataggcaactttaacaaccaacctacccttcaattgagattattctttaaactgtgttttgtttaattttcaaaagcagtgattgttaaaactggagagatggttcagtggttaagagaacttgctaccaggcagtggtggcgcatgtctttaatcccagtacttgggaggcagaggcaggtggatttcgagttctgaaatccagcctgatctacagagtgagttccaggacagccaaggctacacagagccattacagatggttgtaagctaccatgtggttgctgggaattgaactcaggacttttggaagagcagaagagcaatcagtgctcttaactgctgagccatctccctagccctacctatgaatgaatcttattccacacaaaagataattttctttagtaagacttcttataagggcttagttatgtccacaaattttctctcttagataaacctttctggatatatttacactatctgtcattcaattttcaatttctcaagagagacttcaattgggattagaggatctgagaagggggagtggggagtcagagctgctctttttattgttgctcaacattagagttatttttacatccttctaatatctttaattcattgtctttattaaattggacattaacttgcacttccttatatcagcatattttgtctatatttctctttggttgtcactcagcattctatagttatgcttgacaaaggcaggctcttcagtgaaactcagatctatttggcacctgttaatttggggtcagcatggtgagctctaggacagtcagggatacatagagagaccctgtcttaacacaaacaaacaaagccctaaaactgctaagagcatgtagctcagagatggaccctttgaccagcaatatacctttatagtgtccaggttttactgttatgcctttctttctttcttttttttttttttttttttttttgagacagggtttctctgtatagccctggctgtcctggaactcactctgtagaccaggctgacctcgaactcagaaatctgcctgcctctgcctcccaagtgctgggattaaaggcgtgcaccatcactccccggcgcctttcttttatatacatatatgtatgtgtgtgtgtatatatatatatatatacatatataaaattttctgaaacacaaatacaacctgtgataatcatgttttatgttaatttcactttatttctagtttattttttctttgagcattgtgaatagttttacattacaaattattcaactcactacacttgtccacaattcgtgccactatttttatatattgtacctctttcgacccttattacattggaagatggtgtaattggttatgtctaggtaaagtgaagaacaaatctagtaagctgatgacatagcttgttgagggccatgatgcggcttggctggcctgccctccttttggcgctggggattaaatccaggcctggaacacacgaagcaagcactcagcctggaacacatgaagcaagcactcagccactgagcttcatctccagaccaaacgcttgcttttctgattttcaaattaataggtttttctataacactgctcagagtttgccggtattttttttttccaagctcctcattttatttgtatatgaaaatttctcccaaggcttggccccatgaaaatgtttagagatgactggatcataagtgttgtatggactatttggaagtagggcctacatcgagaaaacagaatggagagtgacagtggtgtgtgtccttgaacctggtcccttctcttttttctgctctatttgccatgaagtgagacgctttgctcctctaaatgttccgatcacaatattctttgctcaccatgtatgtgcctacaataaaatggaacatagtagctgtgctggtttgagtgaaaatggcccccaaaggttcatagggagtggtgtttattaagaggtgtgtccccataggaagaagtgtgccagtgtgggtaatctttgagttttcaaatgtttaagccatgtctgtctcttcctgctacctgctgatccaaatgtggaagtctcagctggctctccatgactgccttcatgcagctatgcttcctgccaacacaataaatgaactgaacctctgatcctatgtttaatgtcccaattaaacattttcctttataagagttgccgtgatcatggtgtctcttcacagcattaaaaacctaaagacagtaaccataaactgaaatctatgaaatcaaaaaataaaccttatttcctttaagttgactttcttagatactttgtcttaggcagaacaaatactggtgaataaagtgaggaatgagggctggcgagatggctcattggttaagagcgccgactgctcttctgaaggtccggagttcaaatcccagcgaccacatggtggctcacaaccatctgtaatgagatctgatgccctcttctggtgtgtctgaagacagctacagtgtacttacatataataaataaataaatctttaaaaaaaaaaagtgaggaatgactttaaaaagatagaaaagagataaaaataaaaagatagaaagtaatgattatttcctaagaaaaactttctatcatactcaacgtatatcaacatatgtattgacttttatgataatgtaaaactggttgatgactcttcagagggtctgacctgtacctcacaggctgccagtgcgcgtcagaggatgattatgaatgtagctcaacacaaaacagtaaaacttgctaaaaatatgaaaccttttttttttttgtaatttctcttttataacttgattacacagttctgagtgtaaactctggagattgtattatagtgtcaaaaggttaaacacacctgagtattccatgggggatgatactgatccaaaaagggcaagacatatatacatacagcaggtggatggatctctgtgagttcaaggccagactggtctacagagtgaattccaggacagccaaggctgcacagaaaacccactatctcgaaaaaaaaaaacaaaaagaaaaacaaaaacagctgcacatcatggtgaacacctttaattctagcatccatgaggcagaggtaagcaggtctttgagttccagtccaatcagttacgtgattgagatcctgtctcaaaaacaaagaaaaccaaatattttttttcttagccaagaaggcagatataaaatgccacaacagattaacaaaagcacaggaagaaattagctgggtgtggtgttctccatagtaaacacctatgatcacacccactggaggaggcaaaagcaggaggattccttgatcccaagaaatagagtaacagactgtagtgacagacagacaaagtggaaatgagtacatcttaatttggaaaaacggcccactatcaaagcccgtgcaaaatcatacagctatggacgtgctgacgtcctggtcctctcttcctttcattagagtcagctaaacagactcaatggagatacctgggcatggtggcatgcacctgtcatactagcacttaggagtccaaggttaaagaactgctgcattccaagcctgcctgtcccacccccagtgtctcaatcaacttacgtatgaacaccatctgattttctttgttcaaaaactaaggttctgccttctggagaggtaaggtggaaatcaatatctaattctcctccatctaaaacctagagaagagaaaaatacatattacaaactttgaaaatacaaagttctatcaaataaaccatgtgatgtcaagattttaaaaagattttatctattaatgtatttattggaaacagggtctctttatgtggccccggctgtcttggaactcactatgaaaaccaggcttggccagcctttgcttccttcggagtgctgggattaaaggcatgcatccccatttaaaagatgtgcacgtggaggccagaggttgacatcctgtattgtgctccaacttacttttgagacagggtcttattacatagcccaggctagccttaccttgtcatcttcctctcttagcctcctgagtatttagaattatcagcatacagtaccatgcttgcttgcaaggaaagttctgatgaataaaatttcttttcttacctagattctttcactaaacccatagctggtttccctgtgcctagttttacttcctttaaatctgcctttcacagtctacctacctatctgcttaatcttacatggccttgcaaaaaataagggaaaaggtattcatcacaaaacacatttatggtcccttctgcgttgcctcgatgtgtggtctattttcttcctttgctactcctaccctaagacctgacagtcttcaaagctaataaaaccccagtacttatagtatgcctcggaacacttaaactatacatcctacaatcacaatgtctagtcaattcttcccttttctaaaactggcctcattccttgcattcttaactcattttcagatttatttttattttctccaacaatcctattatctgaaaaccaaaaatcatgctttattcaaattgcctgtaggatgtgatggttcatgctgtaataccagtcctgggggtgggggggacacgacttagagaaggactcctgtgagatctgaggctagcctgggctaaatactgaattcaatgccattggatacatagttgaaaccttgtcacaaaaaccagagcaaccaaccatccatccaaccacagcctaccaaacccatcaagcccaaacaaagcctgcctatgaacccccaaactcctgagaaccaggtttttctcagtttgttcctcctcctggaacaattccttgcatacattaattgttcagtaaatgctaaacttttgttcacaagtggaaatcaagaaatattaagctgtaaccttagttgtgctgagatttttgtatattatgactttagatacttcctgtaattactgtaaacatctataaataatcccaaaggctccacatataaaagttttacataagaattaaaaaaagatttaatgataagcgtattctgctgatactaaaaagaaaacaatgacacgggaagaaagctgacaaagttcaatggaagaaaggtcatacactattatcttatttgatttcaaagtgatggatgtacacccgggatgacaatgtaccactaaatacagcaacagtccatttcaacacatttcaaaatctgacttagagatcttcgcatggacacaattcaatactcccaagactgggtttcactatgcagccttgactgttcagagatccacttgcctctgccacgggaatgctggggttagaggcgtgtgccaccactgcccagccacaattcaaaacatcgtgccgattttataatatcgggatttggtgaaagtggtgagagtgagtcaaacaagtgttatcacttcgtccaataataaagaagaacgtgtatcaaccccttacagcgaacttctcagaactgtagggtatgtaaactagcttgaaatggcttgggggaattaagaaacaaagagtaacgccattgacgtcaccagtgctggcctctttccgaccagaggaaagggaagagagagggtaggtgtcaattttaggactggccaaacttgtgagttccaggctcccaggagccccgcttaagtacgcctgcgccaagcaggccagtttcccaggagaccctcctcggattcacctcggtcgctgtcccaccttttccaagtaggtgagaggcgaccatgtggtgcggcccggcccaaggaaggctagcccacttccgcacttacttggtattcgatctccaacgatgccttcaggggcatgggctggtagaaacactccttccggccggccggcagcgtgaaggtaaaatcactgtccaaagagggtgtgaagccggccgccccgcgcagcaacgctgcgggcagagcggacaggagcagcacggggaatggcagccacatcctgccgcccatccctgtcgatctctgcctggacgcgtgtagggaggtgcgggatactggtgtctccgatttgaaatcccgatctgagggaacttcaggcagcggcgagcctcactctcttggaaggtggaagcactgccttccactgggccgggcgagggcggggccagcgtcccctttcggctgccttctgggtttcgcatccttccttcacaccagacttgtcggtttcggcttccctcacacacgccaatcaacgttggcgggggtaacgacgggaaatgtagtccgaggtgaccacggcacgccgctcatccgcgcttccagactcatttcccggcatgccctgcgccccgctcccgttcgcagagccccgcgtggtgggcggggtcggggcccgggaggcgggtcccaacggctgccgcggcggttcgaactcggcgcctcagaggttcgctggttctcctcatcgagagtcagaggcttccatgtcgtgggctgcgagagtgtcccaggcttccgagcgcagaggaggctcgcggtgcgccgtggtctggggacgctaaccccgcctgcgatctgggtggtgagcaaacgcctcctggctggaaaagggctttcccgaggggtttgttttctcttgggacagtcgacctgcgcctggcctgcttgtgaggcgttttcttttatttgaggcagaatcggaaaggaggctgccagactttgctctactccctacaggcagatggaggacctctttcttgaaataaaatactgtataaaaccatgtactctttctcaagcggaaagtcctgtcacaggattttatagagtgtaaagtgcttgtccttcgctcgatgagtgtgcgtgtgtgagaactcatttttcactagacttgaagatacggttgtcagggccgccctataggtaagatgataagcctttctacgtacacatactacaggtaaacgtaggaaaatgaggatgtttaaataccagacgtatccaattctgaacggctagaaaattcttacgtgaaaatgcacaagttgctgaacgtaaaagcctgacttaaatggtgtcctacagtactgatcagcattttctagtctcaagtttcttcttttctctcctccattattctgtacgaagctagagatgttgcatagatgtgaagtagcatggattcctgagccactgactggggaagtcttccagcttatgcagaagcaaatttgttaaaaagaaaaccagaaacagggtagaaaagggtagaaacatttacatctacaaaatatctcgtttaattttaggcctcaactttttccaataaggtgcgaggtgtttttttgtttttgtttttttttccaatccaccctactcctgagaaattttgcgtgggaaattaatgtaccaggaccgtttttacctgagtgagggagggagaaggcagtttattcatttatccgttcaaaataattgagttttcctaagtgcattacactcttgaacataataggtgggaattaataatatctgtaacccaaattttaagaaaggcaatgaaagaggtgctacagtgaaaaaaaaattaaatggaatatgagagagaagtgaaattgtaagattatgcagaaagttctatagtaggagtggaaattctaaaactttttagtttttattttagtaattacaataataaagcatcctttactgtgatttcaagaatattaattttactctgtgtctgtgggtgtttgggatcctctgaaactcgagttacagaccattgtaagctaccatgtgggggctgagaatatcagtggcaaccctttgaaagagcaatgcctttaaacccagagccatctctccagcccatcatgatctttcttttatggccaagaaacttagtttcatgctcacaggttggtgcagcaaacagttcactgcatgtagttctatgaattgaactgctaactgtcatttttgttttgttttgtatttttttgagaccatgtcatactatacaggccaggttggctttgcgctcacagagacccacttgcctctacttcccaagtgctaggattaaaggaatggtaaccatatccactctctacatgtcattttgatctgtgattatgactcgcgagtgttgttaaattttacaaccactgtgaatgggaggagataacttacctggtaataatagcttttaagaatttatggaagatttttgttttgttttgttttgttttgttcttttttgagacagggtttctctgtatacccctggctgtcctggaactcactctgtagaccaggctggcctcgaactcagaaatccacttgcctctgcctcctgagtgctgggattaaaggtgtgcgccaccacgcccgacagaagattgttgtaacatcagatatccagggcttctaaagttaagttttaacatctcatattgaagttaattagaaaactataccttgattcaaatctcagattgatcctctaaaattgtgtgactttgagcaaattcatcttctacgaaaaaattgcatccattcatttgtgtgtgtctgtgtgtgatgagtgtcatgactgtggaaggcaatggacaacctgtgggagcctctcctctaccctgatctgttggtcctgaggagcaccttcggttctcagtcttggtgccaagcacaggtttttcaattttattgctgtgagattattttaatttataccataaaatcttcaggctaactccaagaagtttctttctattttttgttaaggaaatggaatttatctcatcagactactgtactaaagacaacgacaatgaggaggaaagtttgcttgcaaacgttgcttcattaagacatgaactcaaaataacagaatggagtttgcacaatttaggggaagagttatccaggcaaggaaataaaatcacatgaataaattgtaaagtatttataaatgtaaaatggctagatttcattatatgttctgtttagtatgtcccgggactaagacataattgtgaaagtggaaatattaacaaacatttacatattaagaaaacatctttaatatatcaggaaccagtatacaatatatattcagattacttatctttcattattgtggctgcttttttattcctgaagtaaagagattcatgaaatatatagctaatgtaaactaattgtgatttactgaaagtgtgttggaaacacagtcttatgctcataactttggatctaatttctgattattatatgtagaaatttgtggtaaaaagtatgtcagaaatgatctgtagttttccttttttctgtagtgttagtccaagtgaaaattctgagtatgtctgcagtccttcaagatctgaaaggcttattttggaagaactcacccaacctagccacctgggacgtttgatttacccaccttataagaaagtttgtaaaacatctgatagtactgattatcaaaagaaatcaagagatcaggttattatctttagatctgattatttaaaatatcttcctttgcatgtcttatgtttttacattattatagtcttttactatagttattgtgattgaaatataattgttctttttaaatatatgtggatgagtgttttgtctgcatatgatgtagaggtcagaaaagtgtgttggatcccctgaaacctgagttaaaagtcctgagttctgggcagtaagttccagttgtaagtttctatgtggatgctagaaattgaacccagtccttgagaaaacaactcgtgctcttaattgccacctccccagctccataattattcctgtctgaggccagctctggcggttcttctggttctgtcttgagggtagctgaggccgggaagagtgtaggcaggggcaagacttggtcttgcaagatatttagggttgcttttttgtttttttttgtttttgttttttgctttttttttttttttttttttggtttttcgagacagggtttctctgtgtagcccaggctgtcctggaactcactctgtagaccaggctggccttgaactcagaaatacacctgcctctgcctctcgagtcctgggatcaaaggcgtgcgccaccacgcccggtttagggttgctttttaataataaaatgtttacctgtcctaagtctaagttacttgtaatggtagctgacctgcctgtctgagttcctctgaggccagaaactgcagtctctgtagttcagcatcttatagtaaaacagtggggagttaagcaaaggattaatggctagggctgtttttctctcttgcccagaagccttgcctctgcttgtcaggctgtagagatgtttggagcaataaactttgaaccaggagaagaatatcatgctcccagaaggaaaaacttactcaagtatatatgcataaactcacataaatttgtatttaaattcacacatgtgcatttatacatcttcatacattcctgttggggccagctacatgcttatgtcataattacatactcacacacataattaagaagtaatctatttgtgtatatagcatgactacaagacatcttcactgttctgcagagatctgctcaaaatggatgggctaatgcctagtgattattatatacatttaatagtaagaggaaaagcctattagaaggaatttttcctcaactgtaatctctttggccttgtctagaaaagcaaatccatcatggccttacagtccatagtggaaccatctcaggaagatcacctgccagtttttagcttctcctagatggttcctaacatgttccttttatactctaacttttttttaaaagatttatttatttattatatgtaagtacattgtagctgtctttagacactccagaaaagggcaccagatctcgttacagatggttgtgagtcaccatgtggttgctgggaattgaactcaggacctttggaagagcagtcagtgctcttaaccgctgagccatctctccagcctatactctaactttttatgcaacgaaaactccacagttaagaggaatactatgaagttttcaatgtattatgtaaaattgccaatgtatattatataaattttaaaagtaaagtatatgttaggttttttttatataaagaagaaatgcaagtgagtaattatttatatgcatttggaatcactaaaaaatcaaattataaagatacagtaaaaagccaggcatggtggtgtctcacacctataatcttagcacttggaagactgagctaggagaattccagggtagcctgtcctgaaaatttatatcaaacaaacaaagcaacaaaaaggctgacgatttagctcagttggtagagttcttgcttagtaagcgtgggccttgggtctgactttgagcagttcataaattgggcataataactttgtccaataacctcagcactgaagaggtagaagtgagagattcagaagttcacggtcatcctggcttatgtagggtagggagtgtgaagtcagcctgaacctatctcaaaaaacgttaaagttaatgtgttaaacagcttctaaagatggcagattatatatttttcttttcaagactgggtttctctgtgtaacagtactggctggaacttgctttgttgacttggctgtcttggaactcggaggtccttatgcctctgcctcatcagtgttgggattaaagatgtttaccaccattcctggccaaggatatgtttttgtatgcttttccttttattagcttgctttatagtttatatatatatatatatatatatataaatttctcaaaaaattgaaaataactcacaaaattaaaatattttatatattatgttataaaattagcatcataaaaatgtatgcataagttaaaccatatttgtctcattgttgcttgccttatgaattccttccatatccttttatacacagtaaaattgtaaatatccttaggtgtagaaatacaaaggtttctatcatatttatgttcagcagtgatattgtgagttgacttattgagtaataccctagtttaataaagtggaccatgctctccagtttgtacttaatttgtactactatgactggaaaagaatgtctcacataatactccctaatgctcattgtcctgagttgttcaataattttaatggcaattactgctattttctattaattatatatacacatcaaataatttaatgtacattgtcttttttttttttttctctttattttcaggtgtctttttcatctgtttctatggatcaagaggttaaaaaccttcgagagaaacttcataaacttaggcaacagaatgcttgtttggtcacacagaatcattctttaatgactaaaatagaatctgtccactttgaattgacacaatcaaaagcaaaagtatgtctcttgatgggtgaagagaatatttgtaatattttatgatttataattagaaattttttaaaaagatttatttattattatatctaagtacactgcagctgtctttagaggcaccagaagagggcatcagatctcattatggatggctgtgagccaccatgtggctgctgggtgttgaactcaggacctctgacagagcagtcagtactcttaacccctgagccatctctccagccctagaaaatatttgtattgcctatctagtaggtagaaatttttatactctagttgaatattgataagggatagaatcatacctatatctaaagataatttaggaaacttttaattaatttttgcatttagataaatcagcttcttaaaatcttactgttggaaacttaaaaagtggaaaaagaagggatggaaagatagcttatatgttagagagcacttgcaaacaaaaacagaaccaaataaaacaaaaacagagaaacaacaaaaaccctccgcaagaatctttgggcttgtgggagagctctaaatgagatgggagtagaaccttgtgtgtgtggctttgtgttgatccctttctttctaactcaacctcatctctgaggcttttctcaatatcttcatctaacaaacttcctacttttaccttgctgttggtgttctaggattggaaaataggatgctgatgacatacttatagagcctctgggtttttgttttcttgatgtcttctcagttccctattttaaacttacttattttttattatttttttaaaactttttaagtataagcagttcttattgcttttttgattattggctaattcatgaataattctctatcttttacattatggattcctttcctgcttcagtggttttactatatcttcctggctgcagggttgctatgcttttctgaattatctagattttctttattaagcatgatttctaaaattagtttatataaaatatattagtttatatatattattatgtcaagtacactatagctgtcttcagatgcaccagaagagggcatcagatctcattacagatggttgtgacctaccatgtggctgctgggatttgaactcaggaccttcggaagagcagtcagtgctcttaactgctgaaccatctctccagctcccctgaaattagtaattagttgtttttttttttttttttaagatttatttattcattatatgtaagtacactgtagctgtcttaagacactccagaagagggagtcagatctcgttacggatggttgtgagccaccatgtggttgctgggatttgaactctggacctttggaagagcagtcgggtgctcttacccactgagccatctcacttgcccgaaattagttcttaagtcataaaaatttagtatatatattttttttacctaatttttcattttggtcatataacttgtatataatctaacacacatacacacatacgcagagtctaacttacatgaaattaatattcctaggtgatgttaggaattattgtatgtagtttcccccaagtataccgagatatttaaggatagtggcaggttatatgctgagcctgtcttatgatgatgatgtgtacagataagagctgatcaaaggaataaataatttagccagagactgaggagtcctaatgaaccgtctcatctgataaggaaagaccaatattcaaatagattgatttatttactgaaacatagtgccataaaagttgtctttatgttttagattgctatgcttgagtctgcacaagagcaggcagccaacattccaatcttagaagaacagattataaatttggaagcagaagtttcagctcaagataaagttttgaggtaattacactgtacagcctgtaaatttttattttgtacttgtttggtacatcttattaagaactatctcttatactatcttttctaccctaataagtttttggtgacttattaaggtcttaacacatcattaagttttttttcagtcagtcagagcatctcatagctgtaacttacatgcagtgtacaaggactaaagatgaattattttcaggtgagatccttatttgcatacttttatttaatatgaattagtttatttcttgccctatagtgcagtacacacccattgcttcagtggagtttaagtacaagacaaagggtatttttatcatttatttttatcttctattttaaatgtaatgtgtactgaacatcatgttacatttgagtgattctcattactgttctgggacttgtagtattagcattatctgataatttagaagaaatgtggattattgagccctatctcatatatatgtatatgtatatgagatagggctcaatatatatgaatagggctcaaatatatcaatttatataaaatagggctcaaatatataaatatattttatttatttatttatttatttattttgagacagggtttctctgtgtagccctggctgtcctggaactcactctgtagaccaggctggcctcgaaatcagaaattcgactgcctctgcctcccaagtgctgggattaaaggtgtgcactaccactgcctagctataaatatattttataatatatataaaaataaatatatatatatatatttatattttgtttttcgatacaaagtttttctttgtagtttttcagtactggaactccctttgtaaaccagactggctttgaactcagagattcacctactttttcctccagagttctgggattaaaggcttgtactactactatacccagctaaattttaatgagtaccacaggtgaatctgatgtatgttaaaatgtcttttaagtttatcagttttagagctttctttgtaatacatacatatatttagcttaaatgtattctgtgttctgtgaatttttgtctgctcaatgtttttttattaattctttgagaatttcatataatgtattttaatctgatcatattccccttttccaactcttctctgattcactcttctcatgcatccagctttgtctgtgtgcaggagcactcttactcacttgctcactctacccaccacccacactttgaatcttttttgtattggccaactattatgtctggggcctgtcctggagtatagtttagagtaatggagaaaaaccagggtttacactgttaaagaaaaatgaatctcattctttcagaaggtatcaaatgtcagttgctccttggttaggggtagggcttagtacttgccttcttccgttctggattttctggaaaacacttgttttccctaaagtcacacactactctctggctcttaaaatccttctgttctctcttccatgcagatctctgagcctaggtttcctttacaacttaaggctgaatactccacagcctcttattctttgcacattgactagttagttgtgggtctctgtgtataactgtccaaggctttgacaggcctgggtaagctgaggcagggcatggagttgaggaataattattcagcagacttttctctgagggaacaatgcttgattctggggctggctaagtactccctgtagccagtgagaagcatcacacacacacacacacacacacacacacacggtggatgaagcaaagctccaacaagcaagctccaacaagtttagtttttctcccaagtttttatatcccagcaaaatcattcaagcagtacaaagagcacatttgaacgtgattgcattctatttttcaattacaatgagtatacatagaaaaacattccctaagactctcacattaataaacattacatactacaggtaaaaccaaataaattattcctaagaacccacatatattcataactaaacaagttgttatagattaacaatgtaatcaagcaaggtaattttctcagccagtttttcttattagtaggctgcaatttgtcattacaaagaaaggatcaattattttattatttatattaaaaagtagtcttataaaaatcttaaccacagatctaaacttttatataaaaaaaatcagttatttctactttaaatctgccgatgctcatctactcactaacaactcttctatttatttatttatttatttatttatttatttatttatttattatatgtaagtacactgtagctgtcttcagacacaccagaagagagcataagatctcattacgaatggttgtgagccaccatgtggttgctgggatttgaactcaggacctctggtagagcagtcagtgctcttaatcactgagccatctctccagcccctcactaacaactctttaataatcatatcatgaagctgagggcaaaaaatcagtacaagaagttaatcatcaccttgttcaccagcccggctttagcaagagtcatatcagtcagtgctatgcaggctgccattgttcttgttccctcacctcaaaaaaatccccagctcaactattaagaatgagtatttctgaacttcaaattgttccctaagattttctacatcagagtcactgacaaaaacatcttaactttactaacagtcttctacttttttctaaggatcattgctaacaatctacatctcttaagttccttctgatggtaatagatgaatcattaatctgcttcaggagcaatgcttgaaaaagatcaatcactattattgtaagtgccaatgttactgcccagtgaggggctgaaagcttccttagagttttcatatagctcatggagtattccataaaggcaacaagtagcaagatgctccataacagcatgaagtcctcaggtcctgtagttgtcaaggctgtgcctctctgaggcacatccattgtgattgtgctaactggtgggctgcattccatgaattctaaagctgttttactgtttttcttgcatggcccgaaacatatttggtttcagacccaggacaggggactgaagtacatattttacataccaaagctgattttgctttcaggttctcccagcatccctcagtccctatctggcataccctgccccccaccctgaactttccagcccaggggctgggctgcccttcccccagaggctcttctctatataatccagacgttttagtctctctcttcctcttctcctctctccctgcgagagcatgcccttctttctccctcccctaaccccactttctccatagtggcttcctaagagaactgcttgctctcatagaggtcctgagttcaattcccagcaaccccctggtggctcacagtcatctgtaatgggatccagtgctctcttttggtgtgtctgaagacagctacagtgtactcacatacataaaatacacacctcagtcccttttcctgggtctgaaaccaaacacatacaatacgacatcaggaattgttttcaatttagcaattgttgtccatttaccagaataatagtagtagattctcccctaggttcttagccttgttgacagtgccagatacagcttctatttcatggaacaagccttatatccaaggagaaagtggttggttacgcccttaacatttgtgccactattgtgtcagtgggcatatctagtgagacaggacattactgtagctggacgagttcagcttgatgagattgatgtggttggtgttaacttttttctccagtagcatgcatagaacctttctgcactatgaaagctagtcggggacaagcttccagttgagtactatctagatctcttcatatgctattactcaagtatgttgtgtcttgagcatcaaattgtgacgggtaactgaacaatggcaatagcctctaaatttggggttctatgggcccattggtcaggactcaaaaagtagtaatctgttgctggcatggtgggctgattttttgggggggggcggtgcagtgaactttattgatggtattcaagagagtagggagggctccctaggcccctcctattgttataggggtctggaatggaaattgtgagggagatgctcagtgttgggggctaacttgggacagggactcctcagcaactgagggcctctcttttgctctcagtgtacttgctggcatgggtggtccagggtctcttactccttggaggccatgtaagccatgaggtccatcaccctgttgctgtagctgtgttcagcatcaaaccagcaaacgagctttacaaagttgtcattgagagcaatgccagccccagcatcaaaggtggaagagtaggagttgctgttgaagtcacaggagacaacctggtcctcagtgtagcccaggttgccctttagtgggccctcggatgcctgcttcaccaccttcttgatgtcatcatacttggcaggtttctccaggcagcatgtcagatccatgatggatacattgggggtaggaacacagaaggccataccagtgaacttctggttcagttctgggatgaccttgcccacagccatggcagcaccagttgatgcagggatgatgttctgggaagccccacggccattacgccacaactttctagaggggccatctacagacttctgagtgttgtaatggcatggaccatggtcatgagcccttccacaatgtcaaaattgtcatggatgaccttgcccaggggcgctaagcagttggtggtgcaggatgcattgctgacaatcttgagtgagttgtcatatttctcgtggtcacatctatcacaaacatggggccatcagtagaaagggcagagatgatgacccttttggacccacccttcaagtgggccccagccttctctatggtggtaaaaacaccaatagactccacaacctactcagcaccagcatcaccctgtttgatgttagtgggatcttgctcctaaaaaatggtgatgggctcttcctgtcccaggtgctgcaggagcctctggttactgtgcagacatgaccaaatccaagaaccacacacaccacacaaccagtcccacaaatggcacagaaatggcatcaagaaaccctggtcacaaaaatacgaatctcttaagggggttgagcccaagttcctgaggaacatgtgctttgccaagaagcacaacaagaaaggcctgaagaagatgcaggccaacaatgcaaaggcagtgagtgcgcgcccagaggccatcaaggccctggtgaagcctcaggccatcgagcccaagatgccaaagggccccagccacaaactcagccgtctggctttcatcgctcaccccaagctggggaagcagattcaaagttacatggccaagggtcagaggctctgccaaccaaagcccaaggttcaaaccaaggcaggggccaaagctccagctaaggcccaggcttcagctccagcccaagttcccaaaggtgcccagttccctgtgaaggccccatagaaaaggctcctgccagtgtgaagacagacggactgcggtggcacacctacccacaaactattttcagatgaccaatgtcctatgctatttttacaaataagctcaggcaagatctgtttaaaaaacaacaacaacaacaaaaaagaaaatggtgatgggcttcccgttgatgacaagctccccattctcagccttgactgtgctgttgaattcgccatgggtggagtcagactggaacatgtagaccatgtagttgaggtcagtgaaggggttgttgatggcaacaatctccactttgccaagtgtagagcagaagacagccctggtaaccaggtgccccataaggccaaatccattcacaccgaccttcaccattttgtctatgggacgaggcaggcactgcacaagaagatgcggctgtctctggaacagagctttgtgtggtatcttttttggggaactgccacctccccctgcattatggaataactgccccgcccattatggaataactcttttaaaacttttgtatagatataactatgtgtatataactatacatatataactatataagctatataactgtaactatatacgtgaggttttcatatggcattatcaaaaggcctctagtactagttttccttccctatattctctaccttgtcttcccatctcccacatcacttaattcttcttgtcccattttccacctttctcttttataatgctttatctcccctttcttttttttttttttaagatttatttatttgtatgagtacattgtagctgtcttcagacacaccagaagagggtgtaggatcccattacaaatggttgtaagccaccatggggttgttgggaattgaactcaggaccttggaagaacagtcagtgctcttaacccctgagccatctctccagcttcccctttcttgaaagatctttcctgtgtgcccttcctagttaacctgacctctgagtttaagaggtgagggattgctatgttgttcaggctgtcactgagtcatcatcatgcctcagtatcccaggtggttggactacaggcatacattattgtatctggctcgatatttatatcatatataatagttactgtaattggatatttcttttgtagaagtgcttttttttttcacagtctcagtgtttttatttatttatttatttttaattaggtattttcctcatttacattttcaatgctatcccaaaggtcccccatacccacccccccaatcccctacccacccactccccctttttggccctggcgttcccctgtactggggcatataaagtttgcaagtccaatgggcctctctttgcagtgatggccgactaggccatcttttgatacatatgcagctaaagacaagagctcccgggtactggttagttcatattgttgttccacctatagggttgcagttccctatagccccttgggtaatttctctagctcctccattaggggccgtgtgacccatccaatagctgactgtggtcttccttgggggtgagtcatgatgtgaacatgccatggcacacatgtggaggttaggacaacttgctggagtagctttactcataatatgtgggctctaggaattgaactcaagtcattagtgttggtagcaagcacttcacaccttagcagtcttgctgactcttctttctttgtgttagttatgatagtttcactgtgtaaactaggcttgcatctgagttatggagatctgcctcctgggtgttaaaggtgttcctgggctatttcttgtattcatatttcctctattttatgtgtacagacaattttgtctgcatgtgtatctgtgcaccatgtgcctgctgcttatggggctagaggaggcaggcagattccttggccctggagttaaggatgtttgtgagctgccatatggggactgggaattgaaccttaatcccctggaaaagcctcaagtgctcttaaccactcaaccaccttccaggcccctgctattctaatcattttctattttggttgtcctcaatattctaggtaacgaaatgataattatcaacaaagaacaaaacatttctttctcagtgctactcttccattcttgtgttttccatgggtatctttggttatagacgtgataacaattacattttctttccatctgaggtatatagtagtgcttctagtttgtatgaaatatgtttgtttttagaaattatagactttgtattcctgattccactacccctgcctcacaaatattcaaaaatgctgtgaatatacctgtgccacaaggctcagttgttgaatgtgaaatatgatgtgagcttttagtttagatgggtttctcacttcatgaaagtattttatgccatatagccttctgttgatgagttatgaatatgcctttctctcttataaatatgtttgtcttaactcactgatttaattattattaaagtaattatgtcacattattcttatatttctccagtaaatattttaccagttcttaaagcttattctgtatttatagagaagcagaagataaattagagcagagtcagaaaatggtgattgaaaaggagcacagtttacaagaggccaaagaagagtgtataaaattgaaggtggacttacttgaacagagtaaacaaggaaaaaggtatgtgggattgtgggatttacaaatttgtagaaccaatcctgtgcatgcgctacagctgctgtaccactgaactgtattgctcttttaaagcaatatatatatatatatatatatatatatatatatatatatatatatatatatacacacacacacacacacacacacacacatatatatatttttaataggttgttgccatgtaatcttggctggcctggtactcacagggaagcccatgctggcctccactttgctgtccttctgccttcttttctcttcttttcctttccttccccttccccttctcttcttttctctctttttttctttcttttggtttcccaagacagggtttctccctgtagtctttccagtttcccctctgcaaacctcccattccatcacccctgccctttgcctctatgatggtgctctcccccacacccacccattcccacctcactgttctagcatcctctcacgctggagtatcaagagcctctgtaggaccaagggcctcccctttctttgatgctagataaggccatcctcacatatgttcaggggattaaggttcaattcctagcccccatatggcagctcacaaacatccttaactccagggccaaggaatctgcctgcctcctctagccccatgagcagcaggcacatggtgcacagatacacatgcagacaaaattgtctgtacacataaaatagaggaaatatgaatacaagaaatagcccaggaacacctttaacacccaggaggcagatctccataactcagatacaagcctagtttacacagtgaaaccatcataactaacacaaagaaagaagagtcagcaagactgctaaggtgtgaagttcagttatgattatcctacatatgtagctggaaccacaggtccctccatgtatactttggttggtggtttagtccctagttaacctctgggaagtcctgtttgttgatattgttgttcttcctatggggttgctataccaggctcctgtcagcaagagcttcttggcatcagcaatagtgtgggggggtttggtgtctgcagattggatggatccctaggtgagatggtctctggatggcctttcctttagtctctgctccattttttttttttttttgtccttacatttcctttagataggaacaattctgagttaaaaattttgagatgggtgggtggccccattcctcaactggtggccatgcctatctactggagatggtctctacaggctctatctcccctttgttgggtatttcagttcttgtcatccccacagggtcctgggagcctctaacttctctggtgtctgggactttctagtggctattcccagttctctatcccccactgctacatatttctgttcaatttcctggccctctatacttctgtctcttcccacacctgatcctgccccctaagattttcaaaggaaacattttattacatttaagtgtgtgtgtgtgtgtgtgtgtgtgtgtgtgtgtatgtgtctacatataggacagcttataggagtcgtttttctctgtttaccttgtgagtcccagagattgaactctgaaccctatgcttagtggtaaatgcagaccaagtcatctcttggccctccttaaattttcatgtgttgattttgttactgacattttagactaggacttttttgttttgttttgtttttcgagacagggtttctctgtatagccctggctgtcctggaactcactctgtagaccaggctggcctcgaacttagaaatccgcttgtctctgcctcccaagtgctgggattaaaggcgtgcaccaccgccacccagctagactaggatttttttttgtgtgatattagtaatgattattgatataatgatatttatttctgaaattaatttctttttttgttttttgtttttttgttttgttttttttttttcatagctgaggactaaaccccaaggccttgtgcttgctaggcatgcactctaccactgagctaaatgcccaacctgaaattaagttcttacttaaaacaaacaaattagttttctatatttacactgagaaagtctttactatttcatctaaataaagtgttttatatactctttttaaaaattggtttataaatactatagaaaaagaaagtcaactcatgagaaagtgatcagtttactttagaaatatataaataacaaaaaagtctgttttatgatttttgtcttttgagatgaagttttgtatttgtgctaaccaaggagctacttatttattaatgtatcgaacacagagtcttcttaggtcgcctaggcagacttgaacttgtatatgatcctcctgtctcccctttataagtcctgggattacaggtcaaaggcactaggccttgctggaatgattaaatactagtaaatttaaattaataatattgaaagatttaaattagtgagattttatagaaactatgattaatcagtttttgtttgattttgtgttctgtgtgggctctgagttagtgctcatgcatattagcaagcactgaactaactgaactgcatctgtagcctactgcatcttttgcataggataaaataataataatgtacatgtaaaaactttttaaatttttatttatttatttattatgtatataagtgctctgctgcatgtacatacctgcatgccataagaaggcattagatccgtttgtaggtagtcatgagccacaatgtgagtactgggaactgaactcaggacctctggaagagcagccagtgtgctcttaactgctgaggcatctctccagcccccataaaaactaaaggtttatttatttaatgtatatgaatgttatgtctgcatatgtgtatgtgcactacttacatgtggtacctggtacccatggaagtcaaaagaggacatcagatctcctggaacgggagttataggtatgagctgccatgtgcatgctgggaactgaaactgggtcttctgaagagcaataagtactttaactgttaatctatgctgtagcccataacctacatttctatatttgacaataaaacatatcttacagatttatactatgatatatgttagattataaagaaagtaacctcagatactcaggagtctgagaaaggaagtccacaagttcaggtaagtttagctgagtttcagagtgaattcaccttcagccttgacagcccagggagctcgtcttttaaaataaagtaattcaaagagtgctggtgatatacctcagaacatcgttaggatgtacagctaggttcagtcctcagtgccacaaacaaactaatacatgaataggcagcattgtcttcagtaggtaagtctctgcttcatatgcacttaccctcctacacactactgtgatcatggaagttacgttttcacgtaagtccatttgtaagagcatttatacagaaacatttgttatttgttaggcagtattttatagtggaaaatgtttagatttgggagtcagattttacctctcgtctttattatcttggaaaaccatctaatttttaaaacttcagcttttttatctattaagttgctattgccttggtatgcacaagaaaaagaaacatgtaaaataacgttatgtagtaaagtacttacaaattttaattattatgtaaaatttgtggtttagtaccctaaaattcacactcactcagataatctttgtatttgggtatttaaagagataacaatatgggaaaaccagatttagaatataacagctaaaaactataaaaggagagctgctagtttccctctgcagtacttagataagagacggtaactaaccctaattctttccttttgtctacttttcccttcccttccttcccctccttgccttcccttctttccttcttttcttttctttcttccttttggaagggaaataaatggggcacatacagatgatgacacatacttgaacttaaaagtaaaattaaataaatattaaaaaaggagaaaaaactaaaaaaaaaaaaaataacagcttgaagagttgaacatcacaagtaaaaatgtttatgcagagccaggcacagtggcacacatctttaattccagcacttggaatgcagaggcaggaaaatctctgttccaggccagcctgttgtacctatatatagagttccaggacagccatgactacatagagggacactgtctcacaaaaccaaaccaaaccaaaccaaaagaaccaggtagatttagttattatactttcatttgaaatttgtttatagttaaagaagctgaaaaatagaaagtaaagttcctgaagggaaaggctgaagactataaatggaacaattgactttgggtaatagaagagttataagtttccctgatgtgatggtgtgattttaaatattaaaaaattagctgggcggtgatggtgcacgcctttaattccagcacttgtgaggcagaggcaggcagatttttgagttcgaggccagcctggtctacaaagtgagttccaggacagccagggctacacagagaaaccctgtctcgaaaaaaaaaaaaacccaaaattaaaaatgttcttgtatggggatgatattgatttatgaagcttagtgttctcaggtaagtatgaagaaagtcaagcttattcaggaagtaaaaagcaggtttaaacagtggtagtaaatggattcttattgtttagttttgtattagtaaatattacaggttttttttttgtttgtttgtttttttctgagacaggtctcactaactctggatgacttagaacttattgtgttgatgatgatgttttcaaactaaaagagataggcttgcctttgtctcatgaaagttactgggttgtttgtttgtttgtttgaaacacatgaagctgtttagttaggttgatagcagtttagaacactagtttgtgaggatatgtcctgtttgtcaaggagaactgaggctgcacgtagccctggagctgaggaacagcgttggtctttggcaaactgtgagttcatagttctgattaaccttgctctgcactgtaatctcatatttctccttttccattttgaagatcttgccttcctggtgcctgggcttgcacagctggttcttttcaagtaagaatcagccaggtgtttggggattttaaccttgctgatactatcttttgtagaggtggcaatgacaaacttctgcacagaggaacttggttgagggcaagaggtccagtcacaggtagcaagccactgcccaactgcttcaggaaaaccactctttttcctctgtggccccagcgaggatgatcaggacagtcccaggagtgatgctggcaggcagccttctcatgtgctgacagaagggcttttttgccatggctcagcagcttcggagacacatctttggtaggataatacctacgcatttttcaaagcttcaccacttaggtaccaccattcttgtcaccaccaactttttttgtgacagtagcaaggatcttttttttttcttcttttcaaccttggacttggcagctgagtatttccttttgtacaagggctttctggaatacatagcagatcgggagtgcctgccaattcctctaactagggcaggggctgcaatggggcttccctttcctgggctttttagctttagggttacccttttttggctgcaccagtggctggggcatcagtggcgacagcattgccaccagccttcttggctggaggtttcttctcttttgtattgggcttggcttttttgcctgccatcttgaaagatgggaaagagcttgtttttggttttttttttgtttgtttgtttgttttggtttttcaagacagggtttctctgtgtagccctggctgtcctggaactcactttgtagaccaggctggcctcgaactcagaaatctgcctgcctctgcctcccgagtgctggaattaaaggcgtgcgccaccacgtctggcttgtttttgttttttttagtaacttaaaaaataacctttgcatggattattgaattgagtatctaacattatatactatagattggttttataagacttgtaatctttagaaatttattgttcagtgtaaggatgcttctctactgttttccagattaggggatagaattgtatgtatggaatgtataggaatgtatgtatgtttcaaagttgataagtatttatgttatattttgtttatgttgttggagtgagaaagttattgtagtgaaaccaaaccccacagtaaagcctgatactctgttttggttttaaaaaaatctacttctatgctaggaaagatgattcacttggtacccgctagacactattgcatacacatatctgtatctcagcactggggagatggagacaggtggaatcttggaacacgttgtctagctagtctagctaaaacgatgagcccctagcacactgtgagaccctgttccaaaaaaatgaagtggagaacaattgaggatgagacttcaagttgacctttggcctccaaatgcatgtccaaacacatggataggtaggcatgtacacatatataaaagcatgtacaccacatgtgtccatacatatacacgacacatacccgtgtgcgtatccacacgaacataaatttgcttaaagattaatttctcaatgcagagaattccttttattatttcttttaaacggtagagctgagcgacaaaggaatgaagccctctataatgcagaagagctgagtaaggccttccagctgtacaaagaaaaagtggctgaaaaactggaaaaggtgagagaagtgtttgttcaaactcagtgtcttgtgttactgtccatagttaaaagtggataattcatagaatgtttttttaaaataagatttatttattattatatctaagtacactgtagctgccttcagatacaccagaagagggtgtcaagtctcattacggatggttgtgagccaccatgtggttacggggatttgaactcaggaccttcagaagggcagtcggtgctcttaaccactgagccatctctccagcccacatagaatgtttttacctatggaataataattctaaagattttattcataataaaataacatttttattttaattgggaagtggtggtgcactccgaaatcccagcactcaagaggatctcttgagtaagcaggtggatctctgtgagttcaaagccagcctgctatacagagctagttctaaaacagccaacgctacaaaaaaccaaaaccaaccaaccaaacaaaaaaacacccaaaccaaacaaaaaccaaaaccctgttttggaaacaaaacaaaacaaaacaacaacaacaacatccccaaacttttatttcaaattgatttttattttgtgtgtgtgtgtgtgtgtttaatcattttagtttttaaaattacatatatatttgggaggtaggggctatatgcacatgagtgtaggtgcccatggaggccagaagaaagttttggatcccctcgtactcaagttccaggcaactgggaaatgaacttgggtcctctacaatagcagtacctgttcttaaccactggattctctccagccctgtttatcttttgagatgacctttcatgaagttgtccacagtgcttctgcctcagcctctgaagtagctgggattatagctacttggaacattatgtccaacagaggaaagtttctaaaatattagtaaggaagatgcttaccaatatttttattatcagaagaaacttttattgaaggaagagtaagtacaagaaagagaaaatatatagagagaaggagtaggcgagtagaagttggaactagaaaagtagaagcaggaaattattggctgtatttaatggtggaaatcttgggcattaacaaatttgtgcagagaggaaggtgaaatgtacaactgtggacgatgataaatagaacaacttctgatgaaactcaagaaaaaagaagaccaaagtgttgattctttgatccttcttagaagggggaataaaatacccatggaaggagttacagggacaaagtgtggagcagagactgaaggagagaccacccagagactgccccacctggggatccatcccatacaatcaccaaacccatacactactgtggataccaacaagtgcttcctgacagaaggctgatatagctgtctcctgagaggatctgccagtgcctgacaaatacagaagtggatgctcacagccatccattggtctgagcacagggtccccaaagaaggagctagagaaaggacccaaggaactgaaggggtttacagccccataggaggaacaacaatatgaactaaccagtacccttagagctcccagggactaaaccaccaaccgaagagtacttatggctccagctgcatatgtagcagaggatggttttactactccaacaaaggccaaacatctgatagtgctactccttggaccaagcatatccaaaccatcacatatggtgtcttggttcttttcaggcgctatgacaaaacaccatcaggcttatgattccagatggttaagagtccatgattgcagaacaaagacatggtgccagaaacagctgagagctcacatctggatctataagcaggaagcagaaaacacattggacataatggcagtcttttgaaactccaaatccactcccagtggcacacctctttcaataaggccacacttcccaatccttcccaaacagttctatcaaacacgagcctgtgggagttagtctcatttaaaccagtgcatatgggttccagggaagaaacttaggttgtcaggcttgcattgttaaacagaaagtacccatgcccactgagctaccttggttgccacttgtattgcagtttcattgggaatattttaaattttcaaaaattacatttctgactggtgagatggctcattggttaagagcgctgactgctcttccagaggtcatgagttcaaatctcagaaaccacagccctggagtgagcaggggtctggagcaagtggaggttgggggtaggcgggaagtgggggagcaagagggagaaagggaaggggaaaaaaagaatgaaaaaaattgtatttctgaaacacatggattgaattacttgcatgtgtaatccctatttgaattgcttgccttgttcatgtttaacctgagcattttgccttcaggtgacatcattcttgccaatctgttactggcccttaagcatttctgaataaatagtaacatcttcctccctgtcttttgtgtatattgtttctttttactacagtaccagggacttaaatataaggaatacttagcctattcctgtttctttccaatatcactactcatagttttagcttgaaacaatgtaaaacttatgattatagtagtatattcacttaaaacaattttttattttaggttcaagatgaagaagaaatattagagagaaatcttagtaactgtgaaaaggaaaataaaaggcttcaagaaaagtgtaatctgtataaaagtgaacttgaaattttgaaagagaaattcaggtactttattatggaaaaataattttgatgtgcaagtgggaagaaaggaaacatttaaaaccacatttttattgtaaatatggactgtttagtaatgtagaaggctaagatttgtgactgaaactctctaggtataaaactaattttaatataagacagcttaattctaacacatttgtaaatatagaataatgcagattaatacagacaaaatgtttttagagtgtaattacattagctagctagtaaagatgcttaaataggaagaaaaccactcagtacaatttttttcatttataaaaaagagcaggttcaaagaatatccattaattttccatagtcaagaaggtagattagggactactgaggtgtcttgtcagataaagacacttactgcataaatctgctgatcggagtttgattgctggcaccccataaaaggagagggagagaaccaattccacatatttgtccttcaactgtctctctctgtcccttacttcctcacacacactaataatgatgatcaatgaattttaaaaatttaagttaaattaggttaaagatgttaactgggtcttctgactttggtgttctatacaacataattttttcataactaataattttggtcaactttcagaaggtaataatccatttttataatcttagactcaaggtggagagaacaatcaatattttttctgtctaattgtatcattatagcacattttccttaaggtggatacatttagtattttggtagacaagatgaagttattagagtaattcctagagcctcatgctatcaattataactgtatatctataagtatatatactttgtctatatatatattatatattgtcttatattttataaaatagcttttgaacagatcttgtttttattttaaagtgtgtgtgtgtgcctgttttaggggtgaggagttgtacttgtgagaacagtgtctttggagatcagaagagggcgttggatttctaaagctagagttacagacactgagccacttgacatgggtgctgggattggaacttatgtccccctgttagagtagcagagacttttcatttctgagttgcctccccagcctttgtttttcttttcttttctttttttttttaattaggtattttcctcgtttacattttcaatgctatcccaaaggtcccccatacccacccccccaatcccctacccacccactgcccctttttggccctggcgttcccctgtactggggcatataaagtttgcaagtccaatgggcctctctttgcagtgatgaccgactaggccatcttttgatacatatgcagctaaagacaagagctcccgggtactggttagttcatattcttgttccacctatagggttgcagttccctttagctccttgggtaatttctctagctcctccataaggggccgtgtgacccatccaatagctgactgtgatcattcacttctgtgtttgctaggcccctgtttttcttttctaagtactgactttttgtctcactgattctttgcatttgtttgtttccatttcagtaattccctgctttctttttccaagatgacttcactgtgtaacagccctgggtatcctgaaactctctctgtacaccagggtggactttatctcagagagctgcctgcctctgcctcccaaattctgggattaaaggccagctcctctattgccagtaatttctgcctggttttaattatttattcctattcttttatgaatttggtttgtttttttcagagttttcaagacagggtttctccgtgtagccctggatgtactgggacctactctgtagaccaggctggccttagatctacctgattctacctcctgagattaaagatgtacagcaccgtgcccagcataaatatctttctttgcaattgttttcagaggaaattctgtctagagacatacagtttaagcagaagtttacttagcaaagcaaagcaaaacaagcacactccaaagagagattggagtgacttgtcctgaggcagctggatagtagccatcagtcctctgtgtggatacttaaactatttttgtagtggatgacatagtcatgtgggtgtagtaacttttttccctcccagatcatggtgaacaagatctttccataatcctcttgaaagttcacaaaggtgagaggggcacagttgtcaaaaccacaatgtggtaaaaatcctttgagtatacagtgttttgttagtatgcatgtgtggcagttaggaaagtgccctggcacctcagtttctcattagtgggaagactgcaactgcagctttaagtacgtttaaccacaatgaggcattcttatagtcaggacacagctctcacaagttccctgcttacctcagagcttaaccctcatctaccaggtgttatcatccttttctcctttctttctcacactgtagcccaggctggtccagaggcactgtatcgctcaggctctgctcaaactcagaatagttgttttgtcttcatctcttggttgctggtaatacatgtgggctactatgcctgtcctctcatccttgtatccctaggataaatgccattgggtcattgtaactaattttcagtatgggctgtattcagtggactggcattttgttgaggatttttgctatttttatgtaggatattggcctatacttttcccttttttgttgtgtccttggtttaaagtgagagtatttaaaggtgattattgaaaatgtgtgcatatttcactttaatgcttttttcttcacagggagttaaaagaagaacattacagtggaaaagaaaaattaatgattatggcaatgaaaaactcagaagtcatgtcacagttaacggaatctagacaatgtattctgaagctagagagggagttagaggacaaagatgaaatagtacgagaaaagttttccttattaaatgaaaatcgagaattgaaggttcgtgttgcaacacagaatgaacgactagagttgtgtcagcaggacattgataattcaagggtggaactgaagagtttagaaaaactgataacccagataccagtaagtatgtttgaaaagaaatctagcccacctgactgtgcagtggaaaaggaacctgctgtgttaaagagtgtcagtcattctgtggccgctttcctagcttctgtcctcacccttgcttgctcagtggcgctttcatctggtacctatttcctcacactcacctttcttaccctttcaccctttcttgccctctgagatgcatatataggaactgcacagaatttttgaagagttttattgaaggattatttatgtgttgaaaattcaatcctttaaagtatactattgctgggtagtgttgatgcacgcctttaatcccagcactcaggaggcagaggcaggtggatttctgagtttgaggccagcctggtctacagagttccgggacagccagggctacacagaaaacaaaaacaaaaaacaaaagtatactactgagctgagttttaggtttgtagcagtcattgcaatccagtcttacatatttttattatacctaaaacttcccttgtgcctctttacaattaatgcaccccactctgggaaaccaataatagtttgaatttttttttaagatttatttatttatcatatgtaaatacactgttgctgtcttcagacacaccagaagagggcgtcagatctcattacggatggttgtgagccaccatgtggttgctgggatttgaactcgggacctttggaggagcagtcagtgctcttacccgctgagccatctcaccagccccaatagtttggatttctatgggtttgtcttttctggacatttcatatgaatatagttataacattatgtgaattttcttgcatctgttttcatattttgagggtcattcatatcaagacatattagtattttatttctttttagttttgaatggtattcagctgtgtgcatgtattgtgtcttatttaggcagtggttggtgaacatttggactatttctgcttttagtctatgtaaatcatgctgctgtgaatattggcatagaagtctgtttgttagcatgctctaatttttcttggatagatacgtactagtgaaatttcttggaaataaactgtttagaattcttccaacaccggttctttctctgcatctctgttgacatttgttgtatgtcttacttatccctcttagttatgtgaactggtgtttcattatcattttcatttttattttttttgattgctaatgttgaacagtgttatatattattaaatagtgtagaattttaaatattcatgtatgtcagtgagattagataggtgaacattgacaggtatgaaataaggcaagaatgagaaagtgatacatatgtcatggtttgtttcacttcggaatggatggtagactgcatggcagattttacaagttttaaagtattgtcagtcatggaagtatgaagctgaaaggaacttggaaatcatcagatttgataatgctatttaactagtgaaaaaaatatgggtgcagggaaatactagcctaacaattggttattgtttgaagtttttagtcattgggtgttttgttcttcattataactactttttaaaattctgtattattttgaaatgtatgtgtattctttctatccatatcttaaatattgctatgtataaatgcatctagaatgactttgcttaatgagtttgaaaatactgtatacgttatttgtgcttattatgttttgaaatgtattcatattgatttatataactcaaacatgcttatacattctattgataaataccagattgtttccatgaaattgatagttttccaagctgagtgttaagaagaagacagttgtatcacatatatattttatgtttataagtgtctgtttttacacttgcagttaaaaagagaaatagttggctttaggtcatctctttgtaagcaccagaggagtagtgtttctgacaaggaggacaaatgcattggctgctgtgaggcaaataaactcatgatttctgaattgaggtatattttttcaattttttataagattttttttaaagatttattttttatttcatgtatatgtgcatattgtagctgtcttcagagacatcagaagagggcatcatttcccattactgatggttgtgcgccaccatgtggttgctgggaattgaactcaggacctctggaagagcagtcagtactcttaaccaatgtgccatctctccagccccatttctttcttcctttccttctctttccctttccctctttctttccctcttccttccttccttcctttcttccttccttccttccttccttccttcctttcttcctccctccctccctccctccctctctctctctctctttctttctttcttcctttctttctttcttatacttttcaatttttaaagttaaagtaaatagaatgtttccttggtcttttaaattaaaatggttagttgattagtttaaaaaatttaagaaattccagagaatcttataaaaatacttactacccaagttaaatttggttcttttttgtgtgtggttgtttaaagtctattctaaacaactacaacaacaaaaaattacaagttgtaaaatactttgaccctttaccagtctcatgtgaaggtttctttgatatgaattatttgaagtggaatttgtaagttgtagagtatttatattttcaattttagtagcttttattatgtttttaaagaggctgaagtggtttatagtccaactagtggcttgtgagaactttagtatcttagctagggcacagtgatgcatacttaaatcccagaacttcggagacaaggcaagcagatctctgagttcgaggccagcctggtatacagagcaagttccaggacaagggctacagagaaacgctttctcaaaaaacaaaaacagaaataaaatcttttatttatttttttacactccagattttatctgcacccctgccctcacaaccttccctggtccaccctcttactgttccacatcccatacctcctccccaccccacctgacttctaaattccctggggcctccagtctcttgagggttaggtgcatcatttctgattaaacacagacccagcagtactctactgtatatgtgttgggggcctcatatcagctggtgtatgctgcctgtttggtggtccactgtttgatagatcttgggggtccagattaattaagactgctggtcctcctacagggtcactcttgacccctcagcttctttctgcctttccccaattcaaccacagggttcagcagcttctgtccattgattgggtgcaaatatctgtatctgactctttcagctgcttgttgggtcttccagagtgtagtcatgctacatccttttttgtgagcgctccataacctcagtaatagagtcaggccttgggacctctccttgagctggatctcactttgggcctgccactggacgttttcctcaggctcctctccatttccatccctgtaattctttcacacaggaacacttatgggtctgagttttgactgtgggatggcaacccctccctcatttgatgttttgtcttcctgttggagatgggcactataaattccctctccctactgtcaggcatttcatctaaggtccctccctttgagtcctgggagtctctcacctcccaggtctctggtgtattctggagggtccctccaacctcctacctcctgaggttgcctgtttacattctttctgctggccctcagggcttcagtcttttcccttacccaataccagatcaaattcccctctccctcagcatcccccatccactttccctcctaagtcccaccctccctccccacttgtgattgcttctttctcccaagcaggactgaggcatcctcacttgggcacttcagcttgttgacctttatgagttctgtgagttgtatcttgggtattctgtactttttttttttttggctaatatccacttattagtacataccatgcatgtccttttgggtctgagtaacctcactcaggatgatattttctagttgcattcatttgcctgcaaaactcaggatgtccttgtttttaataactgagtagtatttaataattgagtagtattccattgtgtaattgaaccacattttttgtatccattcttctgttgtgagacatctgggttgtttacagcttctggctgtcacaaataaggttgttatgaacataatggaacacttgctcctgtggcatggtggggcatcttttgggtatattcccaagagtggtatagctgagtcttcaggtagatctaattttctgaggaacctccagattgatttccagagtggttgtaccagtttgcagtcccacaagcaatggaggaatgctcctctttctccacatcttcgacaacatgtgttgtcacctgaggttttgatcttagtcattctgatttgtgtaaggtagactctttaggttgttttgattttcatttctcttattactaaggactttgaacatttctttaggtgcttcttagccatttgacatttctcagttgtgaattctcggtttagttctataccccattttttcattgggttgtttggctttaaggtgattagcttcttgagttctttatattttggatattagtcctctatcagatgtggggttagtgaagattttttttcccaatctgtaggttgccgatttgtcctattgacaatgtcctttgccttacagaagcttcccagtttcatcaattgtggatcttagagcatgagccattggagttctgtttaggaaatttccccctttgccaatgagttcaaggctctttcccactttctcttttattagattcagtatatctggttttatggtgaggtccttgatccacttagacttgagctttgtgcaaggtgacaaatatgggtctattttcatttttctacatacagtcagttagtccagcaccatttattgaagatgctttcttttttccattgtatatttttggtgtctttgtctaagatcaagtgtccatagtgtgtggttttatttctgggtcttctattctattccattgatcaacatgtctgtctctgtaccaataccatgcagttttaatcactgttgctctgtagtacagcttgaggtcaggggtggtgattccctagccattcttttattgttaagaattgcttcgattgatattctgagttttttggcctttccagatgaatttgagaattgctctttccatgtctttgaaggattgtgttgggattttgatggcgattgcctttggtaggatggccatttttactaaattaattctgcaaatctatgaacatggaagatctctccattttctgagatcgattttttttttcttgagaaacttgaagttattgtcatacaggtcttttacttgtttggttagagttatcccaagatattttatattatttgtggctattattaagggagttgtttccctaatttctttcttatcctgtttatcattggtataaaggaaggcttctgatttatttgagttaattttatgtccagccactttgctgaagttatcagttggagaagttctctggtagaatttttggggtcgcttatgtatactatcatatcatctgcaaatagtgatacttttattttttctttgccaatttgtatccccttgatgtccttttattgtcttattgttctagttagcactttgagtactattttgaatagatttgggagagtgggcatccttctcttgtccccaattttagtgggatttctacaagtttgtctccatttaatttgatattggctgttggtttgcagtaaattgcttttattatatttaggtatgggccttgaattcctggtctctccagtacctttaacatgaaggggtattatattttgtcaattgctttttctgcatccaaggagatgatcatgtgattttttttctttgagtttgtttatatagtggattacgttaatggtttttatatagtaaaccaaccttgcatccctgggatgaagcctacttgatcgtggtgaatgatggttttgataggttcttagattcagtttgcaagaattttattgagtatttttgcatcgatatccaaaatcttaagtaataacttctggcttcttttcgtttgtgctaggattaagcttgcaataagagaggctgaaattcaaaagcttcatgcaaatctgactgtgaaccagctctctcaaaatgttgctaatgatagtcaagaatgtggtaaagtaaacacgttagaaacagaaccggtaaaattaggaggtagtcaagtcggtgagtatattacatttgaattactttgataaatgacaattagcttttgctgatagtattttaaaggaaaatattattaattgatgatattaaaacacttagtctcctattaatacctatggtttgtaaagacaagaattattgtgcagttcttagactttgcattgtttaaaaaatgatattgctgaaacaaaatatccaataaggtgtacctcttttaaatacgcaaatgggttgctgagcatggtatcactttggaggcagaggcaggtggatctctgtgaattcagtgacagcctggtgtacatagtccaaggacagtcagagctacaaagtataacactgtcttgaaaaaacaaaacaaaaaaccccaaatatacatatttgcttgcatgcagttggtttacgtgtttgttttaaagtatgttcatgcagttgttaacatcaccatagccaaaacatgtaacacttttatcaggatcttttatagtccttttcagttttctttagttttaatttctgttgttgcttttcagtgctgggaattgagccagggatggagctatattctcagccctttattaaattctcttaaaagtgaaagctgtttttttcagaaaaaaaaaaaaaaagtacttaaaagaataaacttttctttaagcaatactttgcatcccactagtttttatgctgtattatcattttatacagtttaaagcaattgattgcttctttagtattgaatcttgggctatgtgtttgtgtttttaagtctgatttattttgcttagtattccgagattttcaaaatatctttaaaacattagtcagggaacatattttatgtaattttcttatttacttttttagtagtagttattcagcccaagacttcatgtaggccttgctggcctggaacttgctatgtagaccagtctaggcttgaactcagagatcctctgcatctcattttgtggaagtctttcatgagtgcagttgactgtagaagccagcagagtgtatcagattggagctggttataagcaattgtgaattacttgacaggtgttctgtaagacctcttactgctgagccatctatccagctcctttccctatgttttaaaatatcagtcatactaggttgatggttttagttttacattttcttcatacctgatgagtttcaatatatttattgtagcaattattgagagagtagtattaaaaatcttcaaatacatttgattgctgatttatgtgttgttgtacttctgtcaggatggaacctttctagtcctaccttcctcccctacaagcaagtaggaaaaaaaacccactgttttaaaactgaggctggccttgaactggcagtgtaacaaagttggctctatcatagtactttgttttaatcacgcagctctcccagttcctccctgtgctccctgtacctctggctacttccttcctgtccctcttacactttctcagctcatgcattccattcacatgtcctctctctttcccctctcttattctaatttcatgatttacacatgtgtgttgtgcactgtcataaacatttataattgaaatctgagttgcatatattagaagacaaaacatggtacttgtctttctgagtttggcttatttcatttaacattatgatcttcatttgtacccactttccagaaaacaacataatccattctttatgcctattttgtgcagtaataaatacggatatgcaagtatcctgtgtgttgacttagaatctcttgcatatagagtggtctagctgggtcacatgtttgattgtagaggttagaaaacttccaggtttgacaagttggctcagtgggtgaaggtgcttgccaccaagcgtgaccacctgtgttcagtacctgggccacacagtgaggagaggactgattctagaaatgtgtcctctgttgctccatgtgcattctgtatcatgtactcatgcacacgcacataccgacttttctttaaagaaaaacttctattttgatgtccataataactgcatgttatcatttgttcttggtattatctattctactgtgtggagtggactctctgcaattggagttcttaaaacaaaatccttgcctatacctatatcctgaagtgttttacaatttttcctcaggtaacttcagaatttcagcttttacattaagttatttgttcaacttaaattgttatacaggataaaagatagggatctaattcagttttctctatttggaaatccactcttccctgcacattttcttaaaatgttgtctttttttcaaatgtgtgtttttgacactcgtcaaaaattaagtggctatacctgtgtcggcttctttatgggttcttctctatttcattagccggcctctgttttggtgccagtattgtgctgtttttgttgttgtctgttttcatttttgttcttgtttttttgatacagggtctgcctgtgttgaccatgctggccttgtgcttactagagatccacttacttctgctgcccaagttctgggagtaaaggcgtgggataccatgttcagtaataccatgctgttttaacactatagttctgtaatgtaatttgagatcaagtgttgtgatacctctcgtattctttctgttgaatattgtcttggttgttcatgatcatttatgattccatataattattgaaatagttttctaattctgtaaaaaattattggaattttgattgatatttatttaattgaatctgtagtttgccttgagtactgtagttattttcacaatattaattctgccaatccatgagcataggagatctttctaactaatattctcttcagtttctttctactgtatcttaaaattttcattatagaggtatttcatcaccttagcttatttctaggtactttaagtattatatcacattgttgcaatttgggatgattgagcttctttctatctgtgtctcctcctgcccatttttcccttgtcttattgctctagctaagacttcaagcactgccaagagacaggacagtgatccccttgtcgcattccaggttttgaatgaagtgttcttcattttctcccatttagtataatagtggccaaaagttttgttgtctccagcttgtattatggtaatatgtagtgctctatgcctagtttctttaggtctttttattatgaaagaatggtgaactgtattgaatgccttttgtgcacaaattgagacagtcatatggtttttgtccttaaggttttttatatgctatattacacttactaatttgcatatcctataattgtttatattataaattaaacttcattattaaatctttcaaccctttaagtctgcttttgacttttgaacttctatttagagcagtttttcctttgtgtttaatttcagaaagtataaaggatggagatcagcagactgtgaacaagcagtatgaaagagagaagcagcgacttgctaccgggatagaagaactgcgtgctaagctgacacagatagaagctgagaactctgacttgaaggttaacatggcacacagaactagtcagtttcagctaattcaagaggaactactagagaaagcttcaaatgctagcaaactagaaaatgaagtaagtttggatttacctgggtataagtgcttattgctatggggttttgttactattgaaatctagatttatacggctttggaaaatggtaccatataagttttaattcttttaaaatcatattggaaatgtatgtttgatttatattgaaagtaggaaaatactacctcatagctaaaagttctcaaatttgatggaacaaaatacaagttaatataataataataataataataataataataataatataataattcatggttgtaggtcttagattgtgattggaagagttttaatagaggatttcaaattttacctaacatcagagcctcctcagaaatatgttaatctctagatttctgagattctagcagtttttcttcagttggtataactcatgaattctcattttaaaacattacatgtgaatttgatagtgtggttataatctgaaaagataacaatgcatgttttcattgtctcatcatttactttttaaaaaagttatatatttatcttattaatttctatatggcatatttcttctgcctgtacaacttctaaaatttttttagtgcaaatctactagtaattaagttcttacagtttttctctgagaaaactttcttctcatattgtgaatgttttttattcatagattagagactttttcctaagccccttaaaataaatctttttaaattggaatttttttttacaatatattctgattatacttttcctttcccctaattcctcccagatcttttccaccttccaatcatccaaactttattctatttctttatctctctctttataaagaaaaggaacaggcaagcaaaagaataacagggctttgccatcagtttatggtgagaaaccagtagccttggtgtagcctgagatgtttggtaattgaattcaggctttctgcaagagcagtgaatattctcaaccactgaaccaaatctccagctttgactttatattttcaggcttataaccaactctaaatgaaaacactttttacatagaaacactttttacatagagatttagttaacttataatacttgtgaaacttagaaagtgctgatttataataacttttaaaacattataaatatatcatagaaaagcaaaacatgtctttttgaacgtattaaaaactgtgaaaaaagaaataaagactattgataattccaccaccagaaataactgctattaacattttattaagtaaattcaatctgtacctactttaaaaaagtggatcatgttgtatatactttatgacccaaattgctttcctattatataagtagaagaagtgagacactatctctactttattttttagtatttgttgttgttttttttttctaaattctctcctaatttaggtctttttttttttttttttttttttttttttttttttttgtctatatttggaattgaacagagagcttagctcatgttagggaggcactctactggtgagttgcatcaccagcctagttttgttttgttttgttttcttttcttcttcttttttttcttcttttttttttgtttttttttttgggtttttgaaaaagggtttttttgggaacccctggttgtccttaaactcactttttaaatcaaggtggcctttaacccaaaaatccacctgcctttgccaaccatgggctaggataaaaagggggcaccaccactgtctggcttccaggcttcttttgaagtttttttaactcacatatttttcaaaatttaccctaagcgattttttccataataattacccccttattaccgtctacccaaatacggcttgaaatgagggataatttccttttgaaaagcctgtgaccgcctttaaaaagttgtaattgcttcttactgttcagaccacaaaatttttacaatcttctatttcttataaccccttacaaaaaaaatctcgcgttttcatttttttttcccaaaaacgccgaaattaaaacaaactttttggaaattactcttttttttatatattaaactctcgcatctttttttttaatataccaggacttctaactcccgtaagctgcatcaaaatcgttttaaaaaacggtgatcgtattttcacccctccctttaagacttctacccctgtacatttatcaccaatattcccaaataacagttccctacaataattatttttttttcgggccaacagccgggcggtagagtatataaaccgggtgtttctcttttatatgtatgaaacatcccattatcctgtgacataaaaaaatcttcttatttaatatgaagnnnnnnnnnnnnnnnnnnnnaaactcactctgtagatcaggttggccttgaactcagaaatccgcctgcctctgcctcccatgtgctaggattaaaggcgtgcaccaccactgcctggctaccagcctagttttcaagttatataaactaacagattattcacaatatagcctaagtatctattactataataatttcccgtttattagttatagtgtagttagggtttggaatgaggagcaatttgattttaagatgcatgtcagtacttttaaagttgtgtttttgtttttgttttcagatgacaaagaagtgttctcaacttttaattctagagaaacagctagaagaaaaaattattgcatattcttctattgctgcaaaaaatgcagaacttgaacaagaacttatggtaaaatttactctttttctttgttttttaaagttgttgtgtctatttgatttatgatatagtttgactcttaagttactttgttagtttctaattgataatactgatttaaagataatagtgcaatgttgcgattacccacctttactctgtcaggacttgtctaacctttgttccttttagtgtttgaaattggatccttaacattcagtgtatgtacatttacaattgttgtatcttctttatatattgaggcgcattcatccatgagtgcatgtatagcatctagacatcaacattgggtgtggttcttttttttaagttagtttgttgtaagacacgctttcactatgtagccctagctggccctaaactcacagagatcctcctgcctctactccctgagaactaggatggaaggcatatgccaccatgccagactaacactgattatcttcctgttcatgtggacatcagaggacagttttgagaaaacagttttctcttctctccatgtggatcccagggattaaattcaagtcatcagacttggtgccaagtgtctttgcacctgaaccattttactgtcctgtctttgctttgtattttcgaaatattgactaaaatatgttggagagagtctcttctctggtcatttgtgctcttgcatttgagtatctacctatttttaaaaatttgttaagttttctgctgcaacttcagagactagattgttcttggtggcttagtttttactttagtgacttctcctagcagtggattcgtaggcttggtgtcctaatagcacacgaggtctctgggacttgtagctgtgctgctgctgcttcatcgctactagaatgactttccaggctgtgctccagctaacccgacagtggctacctatgaatggcaggtccaagaatcaggttagttgctagattcatgtatttttatctcaacctctgttttacttatattattcctactatttttatttctaggagaaaaatgaaaaaataagaagcctagaatcaaatatcaacacagaacatgagaaaatttgttttgcttttgaaaaagcaaagaaaattcatcttgaacagcataaggaaatggaaaaacagattgagcaagtaatgtattctttaatatattctaacctaaaattcttcatgtttcaaagaagaaacaaaggcttcaaaattaataatgagacctgaaacaagaatctcactctttctgaataattatctaatgtttgttttcttttcttctccctttttttttcttttctttttggtagttgtgtttggtggttgtgtgtgtgtgaggggtggggtggagggcagggggcgggtgtcactatgaatttctcactgtcctgtacttaactcattatgtagacagggtttgccatgaactcgcagagattcatcttctcatgcctcccaagtcctgggatcaaatactgtggcacttcatgaggctccaacattttgttttctttattttttttttatttctgttgatggaacccaggacattgacattgtccatactaaccaggtactcgcccagtgagatggctcagcagacattaggtgcctgcttcaaactctgatgactggagtttaaattgcatcacctacatagtggaaggagaaactgattcttgaaagttgtccttcaacttgcatgcacttaaacacaaaataaaataaaatgtaatactcttattttttaaagaatatgtaaataaagaaaatttctaaaagtgttcagcaaaatttataaattggtaatcagtttgacctagaggtttaaaagaattagaaataagagagggaagaggtatatcattatagatcataaaatacaaactgatttaaaaaaaatccaaagaattcaactcaggctgaagcagttcttattatgtaggggcaggtggatctctgtgagttcaagtccactgtagtctatatggcaagtgtcagaccagccaggaatacacaatgagatctggcttttcaaaacaaaataaaataagcatagtttcatattttttccaaaagaaattttagttctatgtggtttgactggtaaattcttctaaacactggagcaagaaataactgatattctgtcgtcgaccaggagatgatgaaccaccttgagtacaaaactgacagaaagataataaaatgtcactgtgttctttttagaatgtgaggtagggagttgttggtgttcagggaatcgccactcaaaccatacgtaccatatcagttaagcaagaatagattattgaacgtacaccttaatactggacatccaggactgcagaaaggtcttgggagtctaattgcagtcctattctgctctcagagtagactctgtaggaaaaaccaggttcagaagtgtaaagggctcaccaggcaaagtatgatcagctaacctgtacgctggttggtcctgaggaagataagagggtagtggatgagttgtgaacaggggaatttaagaacactgagaaaatggagcataagcattataatcataattttttggcttattagtagcattcttcactgttagctacaaaagccacagtgagctcacacatagctgcaggaatggctgcccagtggttagctctgactcaagatattttagacataatagctcatatttacctttggtttgatgggtcctatgtaaagctttgtgaaaattttaagattagcaaacctcatacaaaacattcagaacatacagaacaaaacaggatatgtggtcagcaggtccttgagccaagtcacttctctgtatcaaagactggcaggcgtgttacaacaagaatatgaaatagctggcaggcatgcaacaaaatagctacagctattctgaggacgtcacagcataacaggagtgagagggaagattgaccatagagaatactgacaagaatgcaaaacaagtgtaatcttcttttgttgttagtattagtgcaaagtggtactgctttagaaaacaatttgacattttctaggtaaaaaatgtttcatatatttctgtataatcctagttatttgtcttgggatattggaaacttatatttacagtaaaggcaattgttttttattttatttttttgaggcagagtcccttgtagcccaagctggccttgtatgtgctgtgaagcttaaactaggaattagagagcagctcagtgagtcccagggtctgatgtcagaggccagcacagagttaactgtggttgaaggagctgtcctagaacctgactgactgtgtgtggtatttcatgtgtttatatgtctcactgtgaaaggccagcacagtgttaattgaagacacaagagcttttgtataacctatgttgactgtttcatgagtttatgtatatgaaaattcgaaagcttaggggctacagggatatcatgagaactaaatttgatcccaagcacctatgtaaaatgccaggtgaagtggttcatgtttttaagcactggggaggtggagaaaggaggatctctcggctttgataacaaggcaatcgagcaggatctgtgagttacaggttcagtgatagacccagtcttaaaaaataaggcagagtatggtaaaggaagttaaccaatatcagcccttgacctgtaaatgcacatggacacacatgtgaacatatatacacacacattttaaaaacccctaaaattagaaaaaggaaaaatgattactgtatataattttttaaagtctaggggctaaagaggtgactcagtagttaaggttacttgctgctctttaagagtacctagggtctggagagatggctcagtggttaagagcactggctacatttctagaggtcctgagttcagttcccagcaaccacatggtggctcacaatcatatgtaatgggatctgatgccctctcctggtgtgtctgaagatagccacagcatactcaaatacataaagtaaataattcttaaaaaaaaaataaaagagtgagtacctagattcacttcccactgaccatatcttgtccatatgcaacctcttgtaactctaattccatagatctgatactccattctaccctctgcaggcagttacacatgatgaacaaacatacactcaagcgcacaaacatacacagaaattaaaccttaaaaaaatatctgtcatttagcctgggtatggtggcacatacctttaaacatagtactcagtgggcagaagcaggttgattcctatgaggctatagcagggttctaggccagccagagctatatattgagaccctgccaataaacaaacaagtaagcaagcaagcaagcaaatgggtagatgatgatctagaattgttaaaatcttattttatgtcttctaaactgtttttccttccatgttcgtaaacttgcctgaatataatacaatcatcccatcatccctttatttccttaggaaattcaacccaccaatgcctaaccctgagaatgctcaaattcttcatataaaataagacaaatttgtgtataacttctctctatattctttaaatatctgtggagtactttatgatagataattcgatggaaatactatataaatagttactatgcttcattgcttaggaaataatcacaatagtacagataaatgttttcattgtgtagtgtttgcatatatggatgcagatcctttgatatggagaaccaaatatatatgtataatagggaataactagataacagatgtatacacacacttaaggcaaacaatttttaaagcaactgcattttactaaatggtttgtgtttgaattattcatgttcagaatcataacttttttggtaaactttatttataatttttttccaccttaggatactatttcattttgatttcattactattaaaatgtaatattttggggacaggagagatggtttaggattaaagtgcatgttgcaccaacatgcagatctgcgtttgagtctccattacccacacagaaaggcaagcatcagtgctagcaggcattcctgggatttagtagctacccagcctagtgtgtccttcagccgggctcaactttctcaaaaagaaaactggtagaaaatagagggaagatcactgatccatacatgtgtatacacaccacacacacacacacacacacacacacactcacctgtacatgcatgggcacacacaattttatatatatatataaagtttgcttttaccagttattggttaaattgtggagaataagaatttttactttggactggagagatggctcagcgtttaagagtgctggctactcttccagagttcaattcccagcgaatacatggtggctcataaccatctataatgagatctgatcccttcttctgggctgaaggcacacatgcaggcagaatattgcataaataataaatacattttttaaaaagagaatttttacttctcatgaaagtgtaaattttaacttaatatagtggtgcacacttgagatgctaagagagaaggattgtaataagctctcgatcagtctggtttacttagagagttcaggctaacctaaagtctcaatacatgcacattattagatttctgataaaagcagaattaacccactttaaattttttacagatttatatatatttatcttacattgtatgtgttttgcctgctttctatgaatgcaccatgtatatgcctggtgcccacagttgagactggggtttcagatcccctgaaatgggagttgcagatgattctgagccacaaacctggagcaataagtgctccgaatcacttggccatctttccagttggaatgttgagacaagtttgctatcagtctaagcatagcctttgctgcatagtcaggcccagtctcaaaagctaaaacagatcaagggtgaagggagagagaaaaattttgatgttcttttaagagaatacctactaaaatgaaaataagcctatcctacatcaagaatgtcaatttctaggtgacttgttctaggtaaactcttatatgtgtgcataagcagacttgtataaaggatgctattccaacattgttgcagtgattaaagcaagaggtcaaagagtatagtacttcctaagtaaatgaactggactcacatatgtcagcacagataaacatttgagactgtagtaaaataaaaagcaagttgtcaaaacataaagatattggaatgatctttaaatttcaagacagaaaattgtattccatattgtttatgatgatacatgtttaatgaaagtataaaaataggccagtcaatggaagaaagcagaaagagatcggcatataatttaattttttaaattagaaaaacttaagaaaatttctaaaatgcgaaaatttacattctttcaaatatatttatgtttaaagtgttctcagtgcttttaaaatgtaatatgaaaaccctgtttttatatttagctcgaaactcaactggagaaaagagaccaacagtttaaagaacaagaaaagactatgtccattttgcagcaagatatactgtgtaaacagcatcaccttgaatcactagatagactcttgacagaaagtaaagtggtaagagcttacatcttaagtttatgtttctgtgacataaatctaatatattctcaatatttatttgtaatcctaacatatttttttttttttgtttggtttttttgtttttcgagacagggtttctctgtatagccctggctgtcctgaaactcactttgtagaccaggctggcctcgaactcagaaatccgcctgcctctgcctcccaagtgctgggattaaaggcgtgcgccaccaccgcccggccctaacatattttcttaccaaaatttatttacaggaaatggaaaaagaaaatatgaagaaagatgaagctttaaaagcattgcagattcatgtatctgaagaaacaatcaaggctagtataattatatactttttgtggttttgtatgtgcatgtgtgtgtgagtgcacgtgtgtgtgtttgtgcctgtgtgcgtgcatgtgtatgtatacacatgccatggcatgagtgtgaagtcaagagtcagttctctccttctattacctgggtctcaaggatagagtttaggtaatcaggtttggaagcaagaatctttacctgctgagccatcttattaaccctctattttgctattatggacatttttatgcctttccttctgataaattattaaaaatataatgtatactcgaggcttttccccactttctcctctataagtttcactgtctctggttttatgtggagttccttgatccacttagatttgaccttagtacaaggagataggaatggatcaatttgcattcttctacatgataaccgccagttgtgccagcaccatttgttgaaaatgctgtcttttttccactagatggtttttgctcccttgtcaaagatcaagtgaccataggtgtgtgggttcatttctgggtcttcaattctattccattggtctacttgtctgtcgctataccagtaccatgcagtttttatcacaattgctctgtagtacagctttaggtcaggcatggtgattctaccagaggttcctttatccttgagaagagtttttgctatcctaggttttttgttattccagatgaatctgcagattgctctttctaattcgttgaagaattgagttggaattttaatggggattgcattgaatctgtagattgcttttggcaagatagccatttttactatattgatcctgccaatccatgagcatgggagatctttctatcttctgagatcgtctttgatttctttcttcagcgacttgaagttcttattatacagatctttcacttccttagttagagtcatgccaaggtattttatattatttgtgactattgagaagggtgttgtttccctaatttctttctcagcctgtttatccattgtgtagagaaaggccattgacttgtttgagttaattttatatccagctatttcactgaagctgtttatcaggtttaggagttctctggtggaatttttaggatcacttatatatactatcatatcatctgcaaaaagtgatattttgaattcttcctttccaatttgtatcccctcgatttccttttgttgtctaattgcttttgctaggacaatgttgactaggtagggagaaagtgggcagccttgtctagtccctgattttagttcctgaatagaacagcaatggcttgtgctgtaagatcgagaatcgacaaatgggacctcataaaattgcaaagcttctgtaatgcaaaagacactgtcaataagacaaaaaggccaccaacagattgggaaaggatctttacctatcctaaatcagataggggactaatatccaatatatatatataaagaactcaagaaggtggattccagaaaatcaaataaccccattaaaaaatgggactctggctggagagatggctcagcagttaagagcactgactgctcttccgaaggtcctgagttcaattcccagtaaccacatagtggctcacaaccatccgtaacgagatctggcgccctcttctggagtgtctgaaggcagctacagtatacttacatataataaataaataaaataaaatctttaaaaaaaaatgggtctcagagctaaacaaagaattctcatctgaggaataccaaatggctgagaagcacctgaaaaaatgttcagcatccttaatcatcagggaaatgcaaatcaaaacaaccctgagattctacttcataccagtcagaatggctaaaataaaaaattcaggtgacagcagatgctggtaaggatgtggggaaagaggaacactcttccattgttggtgggactgcaagcttgtacaaccactctggaaatcagtctggcggttactcagaaaattggacatagtactaccggaggatcccacaatacctctcctgggcatatatccaaaagatgttccaaccggtaagaaggacacatgctccactatgttcatagcagccttatttataatagccagaagttggaatagaacacagatgcccctcaacagaggaatggatacagaaaatgtggtacatttacacaatggagctattaaaaagctattaaaaagaatgaatctatgaaattcctagccaaatggatggaccttgagggcatcatcctgagtgaggtaatccaatcacaaaagaactcacatggtatgtactcactgataagtggatattagcccagaaacgtagaatacccaagatataagatacaatttgtaaaacacataaaactcaagaaaaacaaagaccaaagtgtggacactttgccccttcttagaattgggaacaaaacacccatggaaggagttacagagacaaagtttgtagctgagatgaaaggatggactagagactgccatacctggggatccatcccataatcagcctctatttgctaacaccattgcatacactagcaagattttgctgaaaggaccctgatatagctgtctcttgtgaggctattcttgggcctagcaaacacagaagtggatgctcacagtcagctattggatggatcacagggcccccaatggaggagctagagaaagtacccaaggagctaaagggatctgcaaccctataggtagaacaacaatatgaactaaccagtaccccccggagctcgtgtctctagctgcatatgtatcagaagatggcctagtcggccatcagtggaaagagaggcccattggtcttgcaaactttatatgcctaagtacaggggaatgccagggcaaagaagtggggggggggnnnnnnnnnnnnnnnnnnnnctttttcttctgttctctcatttggcgatgcgcaggggggcgccgaaagcccgagaccgcaccgcccgcgagcggacgccggggcaccgacgccacgacgcgagggcgaaccgaacagcggcgcgccggacaaagcggccgccgcagcgacacaggacgccgagggagacggcgcggcacgcgccgacgcagccagccgcaacggcacggcccgcccccggcgagcgggggaccgggaaaacgcgccaccacacgcgggacagccacccaccaaccgcgggccacgcccccacgcgcgcgccccgcagccgcggggcgggacgggggggggcaacgcggcgaacggcaagcgggggccgccgacgccgcgcgccgacacggcgccgcgcagccgcgcggcacgcgggcgagcggccgcggcggggccggcagccagcacccgcgccgccgccgcccggacggccccgagacacgaacgaggccgcggcgcgccaccgcggaggaccggggagcgggagccccaacaaccaaccagggccccacaccccccccacaccggcaacacccccggccccgccccaccaccgcccgcgcacgccgcccccaccacgcgcacgacaacccacgacacaccgacgcccacgacgcacgccacaccacacgagcacggccacaaggcagggggccggcgaaaacacaaccgcgggcccgcggcggcggccccccccaacgcgccaccccaacccccgcccccacccccgcgcccacacccccggcaccccccaaaaaaacccccccacacccaacagcccgcagacacccccccccccccccccaccccccccaccccccacccacaccgcaccccaccaagcacgagccagccgtccggccgcaccccagcgcagcggggaagggggacttttgggatagcattgcaaatgtaaatgaagaaaatacctaattaaaagaaaaatatatataatgtataaaagtcaattaaagtgtcgggaaaatggcttagaggttaagagagtgtactgttcttgaataggacctgagtttagttccagcagcctgtggggcagtgacaattgcctgtagctctagcttcagtggatcccacccctttttggtctcagagtacacacaaaggtatttttaaatattatatttttttctatagttgcaactcattagtgttaccaatgagaaataacaaaggaggagggctcatgtgtacacacatcttcccccacagacacaaacataatttaagcaaccttaaaaacaaagtagtagtagttttatctcaaactataacggctgtagccacagagtgtgataagtgcttaattaacatggaaaaggcactaaatttgcctgtatgtgtctgtctgtgtatgaaaaaacagtatatttaggattcaatcctataatcttgaaatgtttcctttgtgaataacgaagaattactatatattctttattttttattaaagttaataggtctaaatatgctgccatcttatacctcactataaaagatacctactttctgcctggtacgctgtttgtaacctgttttgtgattgtgtatacccatgtaaacagttatggggaaaagagacagagacagagacagacagagacacttagaagttgaaatcaggtcttttcctcagtcttattttttgagataggctatcttaccaaacttggagcttgccacttgagctattttgcctgacatgtgagcttcagtaaatgtgcctgtctctgccttcctgatattagaattatatacccatgcatgctgacacagctaacttcttatgtagtgctagaatctgacctgtgaccccagtgcttgctgtgtaggagctctactgaaggagctgtctctccaacccaaaagttatacctttatttattgttacggatctgggctcactcagattcactatgaccataaattaatttcagcaagaagaagctttttcttttatatactggcatccactgtggggccagaaccgcacctgagagcacttccaggatgtagcacctagccatatcagctcgaggtttataaaagcaaaaaccacagattgcatgtattctgtctatgtgtaggcagggtctaattttcacatgtatatcttgcagttgccatagtcatctttttgagcagagtcagcaagagtcagcttttgattacaaaagttgaaacagcagttagtgtttttgacctactactcactatcttggtagaacagcaaattttataagaccagttaatttaaaaatagttttcaatgtttggggaaaaagagaaatgggctgttagggcacagcctattcaagttaagggtttacatgttagagacattttttgcttttcggtctctcaaacatagtaagtctaaactttttttttttaaaggtatctacctcaccagctttttttaaagatatatttttatttattttatgtatatgagtacattgtagctgtcttcagacacaccagaagagggcatcacatcccattacagatggttgtgagccaccatgtggttgctgggaattgaactcaggacctctgggagagcagttagcactcttacccgctgagccatctctccagtccataagtctaactttaaatgtaatattaaccaccacactgtagttattcctatagcattcagcaattctttaacgtttactgtcatgccagttcattacaatatattatattcagtgcaatagtaaacttaatttaaaaaattagtatgcaggtcaagcatagtagccctgcctttaatcctagcacttgggagaagagtctagaggatttccaaaaaaaatcaggctaacctggtctatattgtgggttctaggccagctaaggctccagagtagtaccttgtttcaaaaatctagggggaaaaaggtaaataactttgtaaagttgtaggcatgaaactatttcattaaataatattctaaagtggttaacctcctggttcttatgaaatcacctaatacatctaagcagtgtttcatatgttaatggccagataagagatgtgaactcaaaatgaacgagtcatacattgactgtttcccccttggcgccttttaaaaaccttattggttctttgtgaatttcatctcatgcgttccaatcccactcttcttcccccccttgtacctgtcctccacccttgcagccttcccctcaagagaggaaaaaattcactgtggaagctgtagtgtgttatatagtatatccttttggccatacagtgtacttatgtataataataaacctaaaagaaaaagaaaaaataatcttatgacttgatgggatagatgggtgtggttatgtatgtatgcataaaccaaagaccttgttgtcttgttgtcttccccccacccccaccccccagagtttcgctgtgtagctttgactgtcctggaactaactctgtagacccagctggccttgaactcacagagatctacctgcttctgcctccaacgtgctgggattaaagatgtgtgctgccactgcccagtttgaattagttttttaaaaggttttttgttttgtttttgtttttgtttttgttttttggttttttgagacagggtttctttgtgtagccctggctgtcctcaaactcagaaatccgcctgcctctgcctcccaagtgctgggattaaagatgtgtgccaccactgcccagtttgagttagtattttttaaaagttattaaatttgatttgctcctttatatttagatagcacaaagcatttatttataaacacttgagtcaagttttgctatctttaggaaaaataatttcacagatactaagcaaagaatttgcttttttttctccaaaaaattttatgtcttcttaataaaccagaatttccaaatggtatcatcttagcaacattcataggatatttgtactaacttaagaaataagcaatatgtttacctttttaagggagtgcttttgggtgtctgcttgctattctttcaaataaccattctacagatttgaacccctctgtcatctcatagtgcctcttcctgaacttactttgttcaggaatctattatgtgattcctctttggttccctagtttgctgtgaagaatgaatttttacagtgaatctttttctgtcatactattttatatactaaataaaactattttagaggtgtaaatattacctaaattttttgatcactttgatgtgtgttgagattgcttacaacactgcacttaagtgtgtgttgcagtatatggttagtagaggtcagaataactttcctgagttgattgtctccactgaacaaagatttctcacccgaggaataccgaatggcagagaagcacctgaaaaaatgttcaacatctttaatcatcagggaaatgcaaatcaaaacaaccctgagattccacctcacaccagtcagaatggctaagatgaaaaattcaggtgacagcagatgctggcgaggatgtggggaaagaggaacactcctccattgttggtgggattgcaagcttgtacaaccactctggaaatcagtctggcggttcctcagaaaattggacatagtactaccggaagatccagcaatacctcttctgggcatatatccagaagatgccccaaccgataagaaggacacatgctccactatgttcatagcagccttatttataatagccagaagctggaaagaacccagatgcccctcaacagaggaatggatacaaaaaatgtggtacgtttacacaatggagtactactcagctattaaaaagaatgaatttatgaaattcctaggcaaatggatggacctggagggcatcatcctgagtgaggtaacccaatcacaaaggaactctcacaatatgtactcactgataagtggatattagcccagaaacttaggatacccaagatataagatataatttgctaaaaacattaaacccaagagaacgaagaccaaagtgtggacactttgccccttcttagaattgggaacaaaacacccatggaaggagttacagagacaaaatttggaagtgtgacgaaaggatggaccatctagtgattgccatatccagagatccatcccatgatcagcttccaaacgctgacaccattgcatacactagcaagaattttgctgaaaggaccctgatatagctgtctcttgtgagactatgccagggcctagcaaacacagaagtggatgctcacagtcagctattgaatggaccacagggcccccaatggaggaactagagaaagcacccaaggaactaaagggaactgcaaccctataggtggaacaacaatatgaactaagcagtaccccggagctcttgtctctagctgcatatgtatcaaaagatggcctagtcggccatcactgcaaagagaggcccattggacttgcaaactttatatgccccagtacaggggaatgccagggccaaaaagggggagtgggggggtatggggacttttggtatagcattggaaatgtaaatgagctaaatacctaataaaaaatgggaaaaaaactattttagaggtgtaaatattacctaaattttttgatcactttgatgtgtgttgagattgcttacaacactgcacgtaagtgtgtgttgcagtatatggttggtagaggtcagaataactttcctgagttgattgtctccactggttcaggaatcaaactcaggaccccaggcttgtgtagcaagtgttttgtttttgaggaagactttctacatagccctggatttcctgcatctcactattagaccagcctggcctagaactcagagatttgccttcctctgcctcctaagagccggggtaaaggcatgtgcctccatacccagccttggtttttcttgttgttggatgttatatttttgcttgttcttaccttaggtcagacaactggattcagcgttagaaatctgtaaggaagagcttgctttgcatttgaatcaattggaaggaaataaggaaaaatttgaaagacagctgaagaagaaatctgaagaggtaagttgcttttttatttagaaaatttacaagttatttttccccccttctttttaaatgtctgcattttttctctgcatgtacacctgcacaccagaagagggcattaaatccctttctagatggtcatgagccaccaggtggttgttgggaactcaactcatgacctttggaagagcagccaatgctcttaactgctgagccatctcaccagccccaaatttgcacttattattttgttttatttttaaatagtcttttcaatatacttaatttttttttaactgaagacagtggttgtatctttttttttaaaggtttatttatttattatatgtaactatactgtagctgtcttcagacactccagaagagggcgtcagatcttgttacagatggttgtgagccaccatgtggttgctgggatttgaactccggaccttcggaagagcagtcgggtgctcttacccactgagccatctcaccagcccaatatacttaattttgtttggcgtttttaaagacaagattggtctagggtatccgtcggtaacttcagacttgctatataagtgatggtatagaacttaagagcttcctgctactgcttgtcgagtgctgagattacagacgtgtatagccatgcctggcttttgtgctgctggggacggcacccatggcatgctaggtaccccttctctgttactgtggtaagacaccatgactaaggcaacatagagaagaaagaatttatttggggcttccccttcagaaggttagaatctatgaccagcatggcagggagcatggcaacaggcaggcactggagcggtagctgagagtttatatgttgagacacagccatgaggcagagagttaactacaaatggatgagtcttttgcaacctcaaaccctaaccccagtgacacccatcttctaacaaggtcacactccctactctttcccaaacagtctcacccaccaagtatccagtgatatatgcctacgggagccattctctttcagaccaccatactaggcagaatctttcaacaactgagttacaacttcatctccttaatatgcttaaaacgtacatctttatatataatatatgtgacattaaaaacaagttctaaattatatattctttaaagaacagactatttcattacagcataaaatataatatcttaaaattcaaattgatttagtttttagaatcagagtaataagttataagcattacagaatgattttaatacaaaataaataatatctaaagcattgttttagatttaggagtataaaattcttccaaaatttaatttttttgtttttttattttcttttgttttcttttgttttgttttatttttttgttttgttttgttttgttttgtttttcaagacagtgtttctctgtgtagccctgactgtcctgaactcactctgtagaccaggctggcctcaaactcagagatctgcttccctcctaagtgctgggattaaagatgtgtaccatcactgcttagcaaaaattaaaatttctgcttttgtttcttgttgtttaatgactaagactcaggttttagaagctgaacttggtgccgcatacttataatcccagtacttggatgactgatgcaggagaatcatgagttttaagctgaccctgaactacctaggttttttttttttttttaagttatttgctttatttacgtttcaaatgttataccctttcctagtttcccctctgaaaatcccctatcccctccctgaactacctagttttaagctatctatggttatgtagtgagatactattatttttttaaatcaggtttagcaactaaactttattgagataaaatttgcagttactagattaaagaccctttttgacatgctgaggaaatggctcagcaggtaaagccagttttgccagccctatgatgatctgcactctatccacgtggtaggaaagaggagtgcctcccaggttgtccactgtcaagtctaattctgtcctctgcttcttctcatgtattttgttttctgagacagagaaggctttgatatagttctagctagtctctaattcataatactcctgcctcagcctcccaagggttggagttttaggtgtgtactaccatacctaccttaaagatatcttttaaagaaattttggagaccaatgtactgaaagcttaaatatttaaagtgaatcattaaaattttatagttgatattgttatgcctttatgtgttagaatgtgaatattctgcatttatttgctataatattatataaactattatattaacagtatttagtattataaatatcacctgattttattatgtagtgattttggttttatatctgtaaaggggaaaggtcatcaaatgaagtgtagattaacccagggttccctttgtccttcccgttctgagatgggttgtagaaagcattcttcctatagcattaaaatgtgacatgatgtgtatactcttcctacaaggtcacataagaacagtttaccagcccatagtatgaaaatgtctttccttctcagtatcctagctgtccaaaacagtgtatcacataggaacatttcagaaacataccaaacaagagccaaccctataagcatgtctacttcatctcccctgtcagaattatgaaccctgcccttctccgtccatgaccaactatgctgctgtgtgaaaagtgggacaattaaggaagacaccttttatgtttgttgtttttcatttgaaacatttcattgtaaaaagaaatgtgtatctttgctaggtatattgtttgcagaaagagctaaagataaagactcataatcttgaagagacgagtgaacaaaatgccatcctacagcacactcttcagcagcagcagcagatgttacagcaagagaccatgagaaatggagagctagaagatactcagagtaaacttgaaaaacaggtatatattattaattaaaaatagtttgattttcttatgaaataaaatttaaaaatcatttgcagatgtttgattagtaaacataatttcttatgtaatcagacctagaccacttactaccaaggtcagatttcttatgctacaaaattttattataatttaaatttcttgactgaatttttttcttgaatctaaagttaataactatctgaattattatgtcttctgaagtctcctttttgaatgacacatgtagtatgaaaaaaaaaacccttttccccaaaaaaataactgctattgggttacacaaataagttttgatctcgggattatagccagtggtacagttcctttctagtacacataaggctttgggttcaatttttaagaccacaaccaagatttgtttaaattaaataatgatgttaccatttcactgaaagaattctagacaatttgatactagagagtaatcttttctctctgtcttttttttttttttaaatggttttccaagacagggtttctctgtgtagccctggctgtcctggaactcactttgtagaccaggctggcctcgaagtcagaaatccgcctgcctctgcctcccgagtgctgggattaaaggcatgtgccaccacgcccagcatcttttttctttaattcgttattaactttgtctcaatctctttcataaatattccattttttctctttcataagaaataaaatatataaaaaatatagattttctgatttctttttagtacatcataattttttagtcatatatatgattaaatatatattattagcaaataatatattggcagaatatattggcaatacatatatattctgaattcatcctcagccaccctctcccttttttgacatgagaagaaaaaaaacattttcaagttgggataataaagaagaggaaatagggtggagagacggctcagcagttaacagcactggctgctcttccagaggacctaggttgaattcccagcactcacatggcacctcacaactgtctataactcaagcttcaggggttctgacaacttcacacagacacacatggaggcaaaataccaatgcacataaaaattattaaataattattaaaaaacagtgaaaagtgaaatgtttaatgttttgtgtatttctttcccctcctctgtgtttacattccttcccttttcttacttgtgctaaggaatgaattcagacctctcgtgtgcagcgggcacagcatacacggtctcacctggacttgttcagttcttctaactcactttcctggtacagatgtgcagctactttaacttatcttaaaagttagttttgttcttatttcaaagcagcctcatttatattttaattttattattaaatttttgagatggagtctttttatatttttgagattggccttgagctctgggactcaggccctcttctagcctcagccttcccattgtttgagctatcgttacatttcaccataccaaagcttaccttgatttttagaatacatctaaaactaaatgataggttagactacatataaagtatgttttttctggatagtgttggcttgtaattaaatttaaacacttaactgaaaaatgcttaacaggtatcaaagcaagaacaagagcttcagaaacaaagggaaagttcaacagaaaagttgagaaaaatggaagagaaatatgaaacagccatacgtgaagtggatttgaaaaggcaaaaaattatcgagctaactggtactgccaggtaaaacttgaatatagtagttattagccctttcaatgatgtattggtaagtttgagtttcagatttaataatatgcagtgagatttttttctgaggaattaaattcttcatagcctaagttcctgtagcattttcttatatctccctcatagccttccttttttctttctttttatcatactacaaattttgctttcttttcttaaaataaggaccctatttagcttattttagggttccccacaacatttagtatgtcttatagtttacaggcactcagtaactgccgtattagattataaataacactgaaagttgctaacaggcaaagctctcctcacactgtggaatctctcagaggacctaattgggtattttcttgttgtggtggtggtggttattgttttgtttcatttggtttctcaagacagggtttttctgtgtagctctagctgtcctctaactcactctgaggaccaggctgaccttgaactcagagatccgcttgcctttgcctcccaagtgctgggatcaaagatatgtgccatcaccacccagtcaggggacttaattgtatgtaggataaataatgtctcagccttgactagacattcaaaattatctcagtaaagtgacataattctacccccatttataccagtagccatcaaatgtgaacttacatgcaggaactaaaaccttatgtccccagatttcctttgtcattgacgggattaagtatgaagatagggcccctgggcttagagtagtacttgcttgaccagatacaggcttcttaacagtgccagnnnnnnnnnnnnnnnnnnnngttgtgccaaaccgtttttcagggcaggtttagttctcaaatttttccatgcaggaatagccataacccgcttcccctgtaccgtgggaggcaaaaaccgtcccctggacccagcgttatcttaaaccaaggaccaagaaaggcttttccaatccaggccatggtttttttctttcccagcaatttttaaactcctgttgacctttggagcccaacccatcggcaaaatctaggcttttcttttctcttgctaaaaaaacctttgacatacccttaggccataattagtctctgcaggcttttaaactaaagaacctttttcccatgtctatacccagagagtcaaagttgtactctagctaaagtcatcagataatgtccatctgacttactgttctttccaatatcagctctggttcatcagtgttcatttaactgattcatgttttgacttgagttttcttttttctttttttgtattttgttttttgtttgcttttgtttttgtttttgagatagggtttcttgtgtcgccctgtctgtcctggaactcactctgtagaccaagctggcctcgaacctgcctcctgagtgctgggattaaaggcatgcgccaccaccgcccgactggagttttctttttttaaagatttcttctctgattattatatttccatcatacttcagacatccccgtagtttaccctagagctcactgtttctaatatttactattatttctaatatattactactctgataccctttttgcttcctttcctctgatttgtttttgagacagggccttagtgtgtagtttgggctacttcaaacttacaaactttgctcctcatctctctcctctctgcttgaactgagattgtagctatttcttttctttactgacctaaaaatcaagttagtcactaacatcactctgttagccttctctttggcttatgctgaccaatctaagaatttctaatcagttttaaaactaaaagtcttttaatagacattttgataataagtctttaatatagtctttatgataatttctttagcctcttcattaatgtttcaaataatggaactgtcacgtgcttatccttgcatgttctcagtctctacaaaattttataaagttaggtatagttagactgaaaaaatttaaagtataataggtgacttaaaaatctgagtggagattttgctaatacttatccttatagaatttacatacttaaagtaagagacaagtcttttgatttaaagttgccaaattacatgttctattgtttggttttttaattaggcaagccaaacttgagatggatcagtacaaagaggagctgtctaaaatggaaaaagaaataattcatttgaagcgagatggggaaaataaatccatgcagctttctcagttagatatggttttagatcaaacaaaaacagaactagaaaagacaacaaattcaggtaatcaactagttagctgaatttaacttaaatacaatacccgtgtggtgtgtgtgtgtgtgtgtgtgtgtgtgtgtgtgtgtgtgtgtgtgtgtgtgtgtgtatggtggtttgaataagaatggcctctctaggcctatacatttgaatcctttgtcatcagggagtggcactacttgtgaaggattatgggctgtggccttgttggcataggtatggccttgttttgggaagtatggtactaggggtgggctttaaagtttcaaaagcccaagccaggcccggtttggctttcttctcctgccatttttggatcaggatgtaggtctcagttgctactccattttctgcttgcatgccatcatagtccctacacagtgacagtggactaaacttttaaaagtgtaagcaagccctcaataaaagaaatattttcttttttttttctctaagaaaaatatttctttttgttttatgtgcattaatgttttgactgaatgcatgtctgtgtgagcgtgacaggtcacctggaactggagttgcagacagttgtgagccacaatatgagtgctgggaattgaacctctgacagagcagccagtactctcaactgctgagccatctctccaacccaaatgtttctttaagagttgccttgcagggtagtggtggtgcacgcctttaatcctaggaggcagaggcaggcagatttccaagtttggggccagcctggtctatagagtgaattccaggacagccagggctacatagagaaatcctgtctcgaaaaaaaaaaaaaaaaagaagagttgccttagtctaggtgtctcttcatagtaatagaacactgactaagacatatttaagtggaataagggacagtgttcagtattttgcctcttttagataaataaaagtagatacccttatttataaagttatcagattttttttttttttgtctttttagagtctcatgaatcctaggctggcaccagaactatatatgtagtgaagaacaatgaactctgatcctcctgcttcccacctctctagtgctaaggttaatatacaggtaccaacatgtccagtttatcagtactggagagtaagtccaggcccttgtgaatgttgggcaagtactcttcaaactgagagttttgtagattctagcccacaggtggaatattcctgtgtgtcgatgcatatgtatgtgtatgttttatttacatgctcatgtgattatgcgcattttggtctatgtgcatgtggaggacagagtttgaagttgagtatattcctggactgctgttcatcttatgttttgagacagggtttctgactaattggcagggctaactgggcaatgaactccagcaatctgtctatctacaccagtactttatagggttacaaatacagtcttatgtatgtatgtttggtaagtaaactcgggttcttatgattaaacaactgatttaataactgaaacgtcttccctgccccttgaatattattaattatacttactcataagttcttaataaaaatgattacatatattttttaatgattttatcttcttaatagtgaaggagttagaaaggttacaacaccacacagaaactgaattaacagaaaccatgcagaaacgggaagctctcgaaaacgaactacagaatgctcatggagaattgaaaagtaccttaagacaactacaggaattgagagatgtattacaaaaggctcagttatcattagaggaaaaatacactacaataaaggatctcactgctgaactgaggtgagtcaaataataagaaaagataccatgtcgggcagtggtggcatacgcctttaatcctagctcttgggagtcagaggcaggtggatttctgagttcgaggccagcctggtctacagagtgagttccaggacagccaggaactacacaaagaaaccctgtctcgaaaaaaaaaaaaaaaaaaaaaaaaagaagaagaagaagaagaagaagaagaagaggatgaagaagaagaagaagaagaagaagaagaagaagaagaagaaaagaaaagaagaagaagaaaaaaaaagaagaggagaagaagaagaagaaaagataccacaattacacatatttctctgattattttttccattcatctttttttattagatattttcttcatttacatttcaattgctatccccaaagcctcctatacccttcccctgccctgctccccatcccacccacctctgcttcctggccctggcactcccctgtactggggcatagaatcttcacaagaccaagggcctcttctcccattgatggccgactaggccattctctgctacatatgcagctagagacacagctctgggggggtactggttagttcatattgttgttcctcctttagggttgcagaccccttcagctccttgggtgcttactctagcttctccattgggggccctgtgttccatcctatagatgactgtgagcatccacttctgtatttgccaggcactggcatagcctcacaggagacagctatatcagggtcctgtcagcaaaatctttctggcatatgcaatagtgtctggatttggtggtagttgtatatgggatggatccccgggtggggcagtctctggatggtccttccttcaatctcagctctgaactttgtctctgtaactggttccatggatatttttgcttttccttttttttttttttttttttttttggtttttcgagacagggtttctctgtatcgcatggctgtcctggaactcactctgtagaccaggctggcctcgaactcaaaaatccgcctgcctctgcctcccaagtgctgggattaatggcgtgtgccaccacgcccggctagttttctttcttcttgagtttcatgtgttttgcaaattgtatcttggatattcttaagtttctgggctcatatccacttatcagtgagtgcatatcatgtgtcttcttttgtgattgtgttacctcactcaggataatattctccagatccatccatttgcctaagaattttataaattcattgtttttaattgctgagtagtactccattgtgtaaatgtaccacattttctgtatccattcctttgttgagggacatctgtgttctttccaacttctggctattataaataaggctgatatgaacatagtggagcatgtgtccttattacaagttggaacatcttctgaatatatgcccaggagaggtatagctggatcttccagtagtactatgtccaattttctgaggaaccgccagactgatttccagagtggttgtaccagcttgcaatcccaacaacaatggagaagtgttcctctttctccacatcctcgccagcatctgctgtcacctgagtttttgatcttagccattctgactggtgtgaggtggaatttcagggttattttgatttgcatttctctgatgattaaggatgttgaacatttttttcaggtgcttctcagccattcgatattcctcaggtgcaaattctttgtttagctctgtaccccatttttaatagggtgatttgattttctggagtccaatcctattctttttttttatccagtttattagcagatctttttttttaacttttttttattagcagatcttgtcaacctgatttctaaaatatattataaaattcattgactttatattaccactatgcacagaccattattgtttctttcatggtgtttagctaggccttcctaatggactccttatatgttcttattttattactaatccattttccatagaatttatgtttctgattataaacgtagattatattgatttttaatggcttcctaaagcatccccagtaaaatcttcattcctttggaaatgaaacatgaagatacaacttcattactaaatagattagttcttgccaaacaaacaaaacaaaacaacaaaaaccccaaaaacaaaaaaacagaaaataccaagtattgggaagtatgtagagaaataaaattcccatttattgctagtagaaaaacaaagtaatgatagccactgtgggcaataattgtaatttcttgataacttagacataaaattatcatttaatataatacctttcttagtcatatatctaaaagcattgagaatggttctttgaacaagaattatacaccagtgtttatagcacctctctttacaatagccaaaaatgtgataatttgtcaccattgatgaatgggtaaagaaaatatggtgtatccatgcaaggagtattgtttaggtagaaaagcaataaaatagtgataatccatgctacaaagtagatgaactgtaaaaacattatgctaagtcagagaaggcaagcacatggggcataattttgtttatatgaacagtttcttgaactgataagtctaatagcaaaggttggtacttgccaggaactaggggaagggataacagaaaaataatccctgaaggatatgggatttacctttgtaaaacagtattgggaacagataatggtgatgctacataacactgtaaatgtaattaattcagttgaattatgtaccttaaaatgtccaaaaggacaatattttatgtgttttttaaaactccaggcctctagaataccaaccctgtatgatgaggtttctgttttcctggcctggcctcatttcatactgttcttgctctgttttgttttgaggtgtgtgtgtgtgtgtgtgtgtgtgtgtgtgtgtgtgtgtgatgtgtacgtatgtatgtattatcctatatagtgggagcacatggtctgtgtggtcagagagtgatgtcggtgtcttcctcagtttctctgtactttatatgttaagataaaacgtccatagccctaaccctgagtaaaccagctaaattgttccagggaacccatctctgtgtgagttaactttcgttgtcaggcattttctttatacatcattcctttggtttaaatactttcaatcggaattaactacacacgttcttttgcttttaattatgggaagcaataacaataaagaagctatagtttcatattatctactttgatatttttcttttgacaaactttagagaatgtaagatggagattgaagacaaaaaacaagaacttattgaaatggatcaggcgcttaaggagagaaattgggagctaaagcaaagagcagctcaggttgtttttccctaattatatttgtataaattttctactatgggataattatgaagggttttaaaaattgccatttttttctggatataaatatgtaagattagaaatacaacttttttttatttttagacaaattgctgtttgaccagtttggccatgagtttatactcttgcctcagattccaaatgatgggactatagatacttggctgaaagacttgtttgtctttctggaaattgcatagggaggtaaattctttatgattaaactacaactcagctcaaccagtaccttttgagagtaagggttcacttgcaaccctttatattatttattgtatattaaaagaacatgggatggaacacattattgtgagctaaatgttggaggaatgaggcattatttagcagtttttattctaatataaattgacaccggaatccttttattttcctttacatcttaagtttctataacatatatgtaacatatggaaattcaagtccctacttgaaaaatacttcatttggaataaacttatcacttattgatttctgtagtgaatgtatattctaaccacacaagtgtttgtattacaataaaattgagcaaccagcttgatactacttttgtatttaggttacacatttggatatgactattcgtgaacacagaggagaaatggagcaaaaaataatcaaattggagggtaccctggaaaaatcagaattagaacttaaagaatgcaacaaacaggtaattatttaaaaattttgtattttatattgtttaacaactaatactatgagcacatacacccacacacagtgtttttgttgtttatgatgatgcatgttgcagtgctaaccaagttggccctgaattcctgtgcccagcgatcctcctgtctctcctcacgagttgctagctgtgcatggctagtgtgcatggctgtggtgtgtttatagaatgcacgtgatggaaacattacatacttttattcatcttatacattctacttaatacttgctttctcctcaatgttattttgattgtaatttcttatatcaatgtatctaatagacttatcacaatatgtgtatgtttgaatagttataaaatatttctgggaggatttaaaaataattttagaggggctggcgagatggctcagcggttaagagcagtgactgctcttctgaaggtcctgagttcaaatcccagcaaccacatggtggctcataaccatctgtaatgagatctgatgccctcttctggtgtgtctgaagacagctacagtgtacttacatataacaataaataaatctttaaaaaaaaagactaattaaaaaaattttagaacctagttgtctaaaaaaatcatgtgggaaagaaactttgcgttctctatattttttatcttatatatattttacctttaaaattataaagctgtgttttacatttgtttactgtacttgatgtataaatagtaattgaaacagttacagatgggaggagctatcagaggcttgttcacaaaataagccaagagatgccaataaaaaagagaatggtggttgtagcccactattcttataatctttaaatgcagttggaatatttgattcctgactgtgacaagtcggccctggaaagaaacagctatggctagatgccatatgtagaggagggctatcatttgaactgaggtactctgggcctgaaaacaaggaacaagctagcctctaagtgggaaacagcccccttaggtaacatgaactcctggaggctaagacatggagacaagtgccttaggtaacatgaatgggaagaggctaagaaatggggatgctgagaagcttaggtggctagaagcttggactctgagtgtaatactttttttcctgctttctgtagtgcggtgcagacttcaacacctaggatatctgaagagagtgataactccatgcctgcagttagcagttggctctaagtctagggactgcatttttgccatgtttttctactagtaggacctgaagttcaggtcccatgggtgcactcacaatttccagagaatccttcctcctgggggtatttagtgttgagcagggtttgaaacttggattagtcaaatgctttcagaaaaagtaatagccattccactataaagagggaagtttttggagtctgtgaacctgcctggtctacaagctgtaaaactaaatggagccagaagtggcttttggtatataaaaagaggaaatccatagaataaatgaagccttattgtataactgacccctggtcccaagaatcagcttcaatagtacaaaaaaataagagattcaaacttgaactgactaacttcccatctggtagacttcaataccaaaggaccaaaaagaaactattccaatacttgtattttatttaactaaaaatgcttttctggcctaggtgtggtggtgcatgcctttgatcacagcacttgggaggcaaggggcaggtggatctctgtaagttcaagatcagccaggtctacagagtgagtccaagacagtccaaggctctaaaagcaaaaaacagcttttctacacctcccttttctgtgcctgtgttccccctcacacacacccacccacccacccttccttccttccttcnnnnnnnnnnnnnnnnnnnngtaaaattaaataaatattaaaaaaggagaaaaaactaaaaaaaaaaaataacagcttgaagagttgaacatcacaagtaaaaatgtttatgcagagccaggcacagtggcacacatctttaattccagcacttggaatgcagaggcaggaaaatctctgttccaggccagcctgttgtacctatatatagagttccaggacagccatgactacatagagggacactgtctcacaaaaccaaaccaaaccaaaccaaaagaaccaggtagatttagttattatactttcatttgaaatttgtttatagttaaagaagctgaaaaatagaaagtaaagttcctgaagggaaaggctgaagactataaatggaacaattgactttgggtaatagaagagttataagtttccctgatgtgatggtgtgattttaaatattaaaaaattagctgggcggtggtggctcacgcctttagtcccagcacttgggaggcagaggcaggcagatttctgagttcaaagccagcctggtctacaaagtgagttccaggacagccagggctatacagagaaaccctgtcttgaaaaaaaaaatagcttttttacttttctcctgaaagactctgagaggagcccctcactcaggcttcaggacaatagtggacacccaagaactcatgatagaccaagcttgatgcaaacctcatgaggctttatttggggaaagccagagctctggggacgactcatatcccactcaggggtagaggagtcgacctcgaggggaaagaggtcccagtttttataggccctcaggggagaaaggagaagagtggggagtaggggatttccatatctaaacaatgtctattctcaagaaatgggtatgggaggggtacaaggaaagagtctggtgcaggtgtagcaactcaggattggccgggctgtggttgctggggagattttctgactctttctcagcaaccaatatcacatatacctggcaatgggcttcatcagtgggcacacacatgggttcaaggaacagtcaaaacattggcagacacacgggttcaaggagtggccagagcattgtgcgcctctatttttctaaatcagtgaagctagttctgctaacaatgaaaatctatcttgccaatttcagggcttctgttaccttttacattctgtcaggatctttcactccctgttcctcttcctttcctttatttaacttagttttatttctatctttgctcagtttttaacttcatagcttactctacatgatttttgccattttttaaaattattattccatggtcatcagtaggaaaatggatggaaatcgttacgtaaagggaaataagctacaaacagaaaagcaagtattgcttgtttactctatagaaggaatcatttcaaacaggaattatgacactggagaaatggctcagtggataagtgtactcactgttcttatagaggacccagatttggttctcagcacccacatggtgacttacaaccattcttaataccagtttcagagcctctgagctttgtgggcacctggcatgaggtgatacacatatatccaggcagtcaaatactcatacatataaagtaaatctaaagacaaaatttagactagaaaatagccaaactagagtgacaaggatattgagagaaggtaattcagagtggatatgaattagcaaagtacaagactgactctattaaaatgacacatgggcctgttattttctatgctaactaaaggaagaattgtgatttagattttcatctttcagtggattttaagtgtgcataaaatatataatcatcttattaaggataattcgtatacttataaattatgcttgccttaaaagatacctctttttggttttttgagacaggatttctctgtgtccttggctgttgtggaatttacttggcagaccacatacatctattttactctgcttcccaggtgctgggattaaaggtgtgcacagtcacacacagcaaaaaaagtacagtttaaactagacatttagttttattttatgtgagtgggtgttttgcttgcatatatgtttgtgcatcatgcatcctcaagaggccagaagagggcaccaaatcccctacatctggagttacatacatttgtgagatgccacacacgtgctgggaactgaacccaagtctctgcaaaagcaataagtactttaaccactaagccctctctttagccccagaaaaataaatatttttctattttaattttagctttttgttgttgttgttatttttgtgacaaggtcttactgtatagtttaacctggctttgagctccttaaccctctgcttcaacctctaaaatgctgggattatagctatgctctgcctacttttatatattttagacagaagtgtttaaaatttaatttagaacacaactatgagtaaattatattttcttagttgtgttaataatggtcatctgtttgaaattcaggtagaaagcttaaatgaaaagttgcaaaatgccaaagaacagcttcgagaaaaggagtttataatgctccaaaatgaacaggagatatcacaactgaaaaaggaaatcgaaagaacacagcaaaggatgaaagaaatggaaagtgtaagtaaagtattttccacataagggaaaagcaatgccacgaacatgctttaaacaccttggttttaaaatacagaaactgtgctctaagtttttaaaaactaattatttgtgtcagatgctattagttcttttgacatttaaaaatttttgattattctggttttgatatgggcaaggacataataaatccacagtatatgcttttgtatcagttaaatacttattcatcataaatatgctatgcagtagaattgagatacagaactaacaagttaaaggaacttgaggaacttcacccagatgatgaaaaaggataacagtattattccaactaagtacattgtgttgccagaggaacatagtgatttgatgactttatattaatttcatgtatattgattgttgaatctattcaataccctggtctttttaaaatgcgaatttgtttctgtgagtttgaaagacctccgaagggagaccctcactcaagtctcaggataatagcggacccccaagaactcacgagagacaaacttgatgcaaaccacatgaggctttatccggggaaagccagagctctggggacgactcgtatcccacacaggggtagaggagtcgacctcgaggggaaagaggttccagtttttataggccctcagggggaaaaggagaagggggagagtaggggatttccatatctaaacaatgtctattctcaagaaatgggtatgggaggggtacaaggaaagagtctggtgcaggtgcagcaactccggattggccctgctgtggttgctggggagattttcagactctgtcctagcaaccaatatcacaaacacctggcaatgggcttcatcagtgggcacacacatgggttcaaagaatggtcagaacattggcagacacacgggttcaaggagtggccagagcattgtgcgcctctatttttctaaatcagtgaagctagttctgctaacaatgaaatctattttgccaatttcagggcttctgtgaccttttacattatgtcaggatttttcaagctctaatagacataactttttcattgtcaaaaactcaattgttgtaattccacagtaattattagatttgattgattatgtctctccctatagaatttagtgtggacactttgtctcctttttcatttatgttttctgaacactcagagctgtcttttatcatatagtaagtataaattagcttttattgattgagttaattataaacataactcaagcagagtctataagagaaaatttggaaaatagtgatgtggaaatgattaatgctcctatcatgtgggttccctaacagtgaatgcctaaaagtatttgcaaaggtaattatattcatttatatcctgtgcctccatgccctgccttttttactttttgtccttgaagtcaaatgctattactctaacctgcctttttgtactgaattagaactgaccttgtgccaggcagtggtggcgcccgcctttaatcccagcacttgggaggcagaggcaggtggatttctgagttcgaggccagcctggtctacagagtgagttccaggacagccagggctatacagagaaaccctatcttgagaaaaccaaaaacaacaacaacaacccccccccaaaaaaaacccaaaaccccaaaacggaccttgtatttttttcttcttagaagcattacaagtttattatccaaaaggtttttagctagtattttgagtttcttaatgaattcctgtttcatatttatcatatgtatctcatctgaagataatttatattttatatttatattatatactattttaaataagttttacagtgtagaattttctacttctgtcaaattaaaactcacaaaattgcttcttgctttttttaatattccagattttagatttccagataagaaattcttaacctgtcctttactaggaatttaaatcgctaatttaataatacttcagagggaataatagcgaagtgacaaatttcaccttcataaagaattcacaacccaactgtgtagattaatagtgaattttaatgccaatatttatctgcacacctgcctgtctgcctatctaccaactatctgtctgtctgtctgtctgtctatctatcaatcatctgtctattcatctatcatctgtctatctatctctatcatctatcatttgtctgtctaactatctacatctgtctatctgtctatgttaggagtgtattcatgtatgtaaagcctgaaaacaagcttggttgttatttctcaagaggttatttctcaggattctcaagaatccaccttttgggttttgttgttgttttgctttgttttttgacaagttcttacatagcccagactagttttgaacttcctgtgtagtaaaagatgaccttaaaactctcctcctgactcttccttcccccaaatcctgggattgtgttgtgtactctaccgtgcttcttttaatgtggtgctgaggagagaatccagacttgtgggaatgctgagtcatgcagaatatttcagtaagagtttctaaactgggagtggtaacatctctctctctctctctctctctctctctctctctctctctcaagacttgtttattttatgtatatgagtaaactgtaactatcttcagacagnnnnnnnnnnnnnnnnnnnntaacacatatctctagtctgaaggctcagaaagaagaatctcaatttgaaggttagcccagactactctccgttttcaagtagcctgggcaagatccccagctaagatagatgcgtaaatgagattcttgcagtgggtgtacatgcttgttattctagctacttagaatttgagaccagcctggataacgtttctcaaatacagcgtttaaaaagtagctggggcgtgtctcagggccgagcacttgcttagcatgttgtggttctggatttaatccctagactaaaaaacttcccgttttgttagagatttgtcattttattatgattaaggctttaaaaaatattaacttgttgcatgtaattttttaataaaattaatattttacttaaatcatcatagcaaaaatgttaagcaaaaaaagttaaattttctatttccccttcttaatgagattcaagcatctcccccttgggccctccgtgctgtatagcttctttgggtctgtggtttatagcagttatcctgtactttatggctaaaatccacttgcaagtgagcacataccatgcttgtctttctgggtctgggttacatcacgctggatgatcttttctagttctatctatttgccagcaaatttcatgatgtcattgtttctaatagctgagtactattccattgtgtaaatgaaccatatcttctttatgtattcttcggtggaaggatatgggttgttcccagtgtgtggctattatgaacaaagctgctatgaacacagttgagcaagtgtctttgtgggatggtagaggttcttttgggtgtttgccccagagctgtgacttgatgtagatctattcccagtgtcctgagaaaccaccaaatttacttccaaagcagttgtacaagcttggactcccaccagcaatggagtgttcccctggatccatatctttgtcagcacgagctgttgcttgagttttttatctttgccatttttttttttttttcgagacagggtttctctgtatagccctggctgtcctggaactcactctgtagaccagggtggcctcgaactcagaaatccacctgcctctgcctcccaagtgctgggattaaaggcgtgcgccaccacgcccggctatctttgccattttgatggatataatatggaatttcagagttgttttgattttcaattccttgatgcctaaggatgttaaacatttaagtgcttctccaccattagagagtcctgccaagaattctgtttagagctatacccattttttaatagacatcaagggtggatggagggaggaaagtgggtcggggagtaggtaggtatgaggacgggagggatgaggtaagaggagggaaagacaactgtattggggtattctttgtatttttttaacatctttaatttaaaatctcatattttgtactgacagacaacacatgtcaatttggaatagtcacagtttaagaagagacctgaaagccacctaaaaatttcaagtgtcctgagtgaaagatgttggctatttatctactcatacatattaaattgttgtcattccttatgctgtatatatcatagattaaagaaacatggttgccaaaatttactccttatgaaacattaaacggatgatcacactacgtctgccagtcagtgacaatagcaatgtctgaccctacccctggacatttccagatactaacgaatcagtgttttcttcacagtatttactacaaatactgttttatttcctcacttaagctgtgtgcacacaagtgtttctcccatgttgcttcatagaagaagaaactacactatcttgattgattttatttcctttggcctcaataaaataaattacagatattaagtgcctgtaaatggctatggactgattatgagtctcaaacagctcatcctcattatcaccttctgcttaggcataacacattccacatttttatcaatagaaggcacctccgtgaacttctctctttctctgcccacttttgttcctcagatgaaaaacactcagacagctttattattttagaactttccagatagcacaattgctgggcacggaatctcctgccctaaccttatcagctaacctatagcagccatcagtggaggccgctggttgtagcttccctaagatcttacatggttgtttcatgcttctccttccaaagcctggcagaaatgacctgttctttccctgggtctctttttccttctcctgagacccggatgtcccacctgtttcttctgtccagcagttggctctaggccttctttattgatacaagcaagaaccaattagggagtcagcacctttccctacattaacttatagtggtacatgctcattttattgtagattttataaagatgtttttaggggagttctcttatgaaaacaaagaagtaaatcctaagtatatattttataactataaatttcattttgaaacccacaaatgtcttgtgcttttcaggttataaaagaacaggaagactacattgctacccagtacaaggaggtcattgatttggggcaagaattgaggctaacccaggagcaaatgcagaacactcattcagaactggtggaggctcgtcgccaagaagtccaagcacagagggaaatagaaaggcttgctggtgaactggaggatataaaacaactctctaaagagaaggtaaacctattctaaatgatttgatattactgaagaattttaaaaattttaattccttttttaaagaaggcagataataatgcttgtcactaaaccaccagtacttaacctttttattctgtactgtgttgtactatagtgtgaatgtatttttttaagttatcacatgtttattctaatatgtggaatcttggtgcaaaaagagatgagtagagaagaaggtgcctgaggaagggaaagtagaagtaagagaatgtgattggtgttgggtgggtttgacacaattaatacataatagaaatgatttatatataaattattttgacattttaataattcaaagactttcataactttgtactttaacattactgtggtggttcaaatatgctagacccagctagtggcactaataggaagtgtagccttggagtgagtgtggtgtcattggaggaagtgtgtcactgtggtcaagggctttgagactctcctagctgcctggaggtcagtcttctcctgcctttgaacaaggtgtagaactaactctcaggtccttttctaccatcatacctaccctccgtcatgcctcctgctgtgatgacagtggactaaatctctgaacctgtaagccagtcccaattaaatgttgtcctgtatatttgatataactaattactctgtagtaaactatcatgattaactttttcatgaacaatgttttctagttcccactacagttgtctcaaatactctccagtcgctgtgaagatacatcatgatgtatttcatgtcaccagactgtccacttaaaaatggttaaaatagtagaaccaggtgtggtagtctacatttgtaatcccagcacatagtcaaccaaagaaggggaagctctagcttgaggcgaaccagggctacaatgtgggatattattttaaaaatagtatatattactacaatttttaaaataagctactagtattgtacttaggttttaaattctttatactataatattttataataaaaaaccttcaaaaatgaactctggccacactagttctcaataaatcgagttatgtagcactttagatgttcaagtgtttgaactatcttctaaattaaaaactgtcaaaatttctttttttttatatttgtatgtatgtatgtatgtatgtatttatttatttttaaaaactttatttcagaagctttgtgatggtaaagtactatttaaaatcaagagtactaataaaaatttattttctcagaaatacatttagcaacttgtttaaagagaatttagactgatttatttttaattacttagaccttgagaaaaattttattttattctggaagttcttattatttttctactttccggtacacttaataatccatcacatagtaaaaacaatcctcctttagctttgttaggttagctgtgtttttattcagatttctggattattagagcagttaagaatatgtaggaaaattattagcaatataacagatattaggatgtttacctaaaaagggacttttatctcatttgtgttctttgataatgtctgagtttagtataattgcttttatttgataaactaagatcacttaatttcaaagtgagtttaatgggacattgcttaaaatgcaagttttaaaatattacattttaatcccaaactaattatagattcatgtttatcttttggtttgggtcaaacctggatattttttatgaataatctaattagaattgtatttagtcttttaacattagttatacttgtaactcttcaactcacataaatggccaggcccctcccctgaggacctccaccaccagattcaacctatagaacactctcattgccctaatggctgacccagcccctgccacacagagtacaaagctcaaattctggtcttaaagtcctagcaatccccaccttggaagtctttaccctggaaagcttctcccacgcccacgcccatcattaaggtcttcatttacagactctctgctctgtcctttgctgcttctcacccaagcagaagccaccaccccctccccctgggtattctctcccaataaatctgttgcatgaggtgtgttgtgtgttgtgactgccaggattcctttctcctcagagctgtaacacaatacttatagtccatcctctagttatttttttttttcaactagagggagaattaaaataatagaatacctggtattattgttattgttggggcaatacatgtgtcacttcccacgcagttttattagttttgactagttatgattgggtagcaggtgtttatgactcttgttgagttatttcaaaactttttttttttggtttttcgagacagggtttctctgtatagccctggctgtcctggagctcactttgtagaccaggctggcctcgaactcagaaatccgcctgcctccgcctcccgagtgctgggattaaaggcgtgcaccaccacgcccggccttatttcaaaacttttaacttagttcttactttaaaatatttccatccatatttcactagtgtttcctcttatccatgagaaatgcacattttaaagacctttagtaggtatatgctgagctctacacacatacactgtactctttgagatgggcacttccgggccattattaagtcaaaagagggttcctggaacacagttaatttgatagtagttacactggacaaacagatgactcatgccgtggtagactgagcaagagatacaagctttcctcaagctgctcataatagcccacaatttgaaaactataagttgtttatttctgtaatttcacatttgttatctttggactgtggatgactgcaggttgctgaaactctagaaggtaaagcaacagagaacaaacctcttttattcaaggggagactactgcgtgtggtaaagtcttataattaaaatcataaccacaacttgcattgaccaacataaataggtttgaataaaaatacaaatcaggctggagatatggttcagtagttaagagcagcctttcccagtatctacatggtggctaatgactgtctgtctaacaactatctgtagctttggttccagggaatccaacactctgtgttggcatatgtaggtaccaggcacacacattttgtgtgtgttttgtatgtgtgtgtgtgtgtgtgtgtgtgtgtgtgtgtgtgtgtgtattcggaacaaaacactcctacagatttttaaaaaatacaaatcattcctgtaaaagcagataatttatatggtaagaaaaaactgcacagagacacctgagagcaggctcttatctgccaaagtggaaatcattatttgccaaagttcagcattttatggttttttgtttcaagaaaggattggctcattaacttatgtagaatataatgtacttcttttggtcatctctgaaacgtctatattcaaaagtgtactgtataataagcctgtgttttacataaagactagcttgcttccattaaggcactgaattgttttaactatgctaaaccaaataagctccctacattccatttatttaatgtgtcatttttaaggaagctcatggaaatcgtttggctgaagaactgggggcttctcaagtacgtgaagctcatttagaagcaagaatgcaagcagaaataaagaaattatcctcagaagtagactctctgaaagaagcttatcagatagaggtaaagaaaaattaaatttgtgtcagtagcccccacaaagatgaattgacttactaggatgaaaacatgagtctagtttttgaagtgttcattgtaatctttaatgcaattaaaaggctattgtggggctggtgagatggctcagcagttaagagcacccgactgctcttccgaaggtccggagttcaaatcccagcaaccacatggtggctcacaaccatccgtaacgagatctgactacctctttctggagtgtctgaagacagctacagtgtacttacatatactaaataataaataaatctttaaaaaaaaaaaaaaaaaaaaaaaaaggctattgtgctctggagttaagaggtctagctcctagccgggtgtggtggcacacgcctttaatcccagcactcgggaggcagaggcaggcggatttctgagttcgaggccagcctggtctacaaagtgagttctaggacagccagggctatacagagaaaccctgtctcgaaaaaccaaagaaaaaaaaagaacagtactactacttagaatatttttctttctttttttaaagatttatttatttattttatgcatataagtacactgccattgctcttttcagacacaccagaaaagggcgtcagacccaattacagatggttgtgagccaccatatgcttgctgggaattgaactcaggacctctggaagagcagttagtgctcttaaccactgagccatctctccaggccctgtctaatgtattttaaaaagcctttctaaaaacagccaatttttttccaaaagtttacttaacttaatctggaatggattaacaacattaaagcttttttttaattagataatttctttatttacatttcaaatgttatcccctttcctagtttcccctctgaacacccccccccccccaccctgcttaccaacctgcccactcctccttcctggcattcccgactagaccatcctctgctacatatgcagctagagccacaagtcctactatgtgttttctttgattggtggtttaatcccagggagctctgggggtactgattggttcattttgttgttccacctatggggctgcagaccccttcagctccttgggtactttcaccggggaccctgtgctctgttcatttcttttaaaacgtttgaaaatattaccgaaactcattgtatatgttctaaataatcttgagtttggtgctaagaaaacattttttttttctgtaaaacaaaggctaaaaaagcatttgtattatacctttttccccttggaacattgtctcaggatgtaacgcttacttttgtggaactctatgtaaaccaagcaggcctcaaactcacagagatccatccacctgcctgtgtctccttagtgctgggattaaatatatgtgcttttttttcccccctacttttgtattaaactcttactgagagtttagtaacaatttatgaggccctggggatggggagaggggacttgttactatgtcttatttaaatgcatttagattcagatctctttaaaaacattgtgtctgcaaatgaaacacattttcaagctgaatccacatcttgtaagttttgtaatctttaaggataactattagtccatctcaagtatttgccattaactgttcatattttctaatctgttatctatagttacccatttgaagccattaatttataaattacctaaaattagttagtcagctagttcataactttttaaaatggttctcggaggtggagctcagctagaacgatgctcttatagaggattcaggttcattccccagctcccatatatagcagctcaccactgactataccatcagttctcaggggatatgatatcctcttctgacctccatgggtaccaggcatacatgcagcaaaatactcatacacataaacttaaaaaataaaataacctttaaggttagagagatgactcagcaattaagaaaataattgatcttccaaaggacccaggtttgattcccaggacctatatcagtgattgatacaactacctataactctagctctagtatgtctatgcctctggcttatatagacattactaacttaattacacactcgcacatgcatacagttaaaaataaaataaatattttaaaaagtcttaatgtttttagtaaatgggaatatttttaagtatgacaaaaatatataatttatataaaacatttttccttttgattgctaacaaagatttattttaaaagtgtgtgtgttgtttctatatacaatgaggggactgagccaggcacacttgtacatgcctgtaatctcaacatttgagaaaaacataggttcgaagtcaactttggctacatagcaaggtcttgagaccatgtctttaaaaaccctaaaaattcaaaaaaaaaaacccaaacaaaaaaaccccccaaaaataccctaaaaataagtaaatgtataaattaaacaagaagatatagcattataggtacagtttaaaaaggaatttccagttttcattttaattttatgtatatgggtgttttgactgaaagtctgtgtcccacatgtgtgcaatgcctgagtatgccagaagaggttgttggatgccctgtgtggtggtttgaataaaaatggcttctctagcctagtctacaaagcgagttaggtcagccaaagctacacagagaatccgtgtcacaaaaatcaaccaaccaatcaatcaatcaatcaatcaatcaatcaaataaacccaaaccaaacaaaaggccccattgcccaataaggagtagcactattaggaggtatagccttgttagattttgaggtctcaaatgttcaagcctggccagtgtatcatagttgcttcctgctccttgcaaatcagaatacagagcaaggggaccactcctcctttactgttgggagtgcacacttgtgtagtcactttggaaatcaatgtggccagtttctcagaaaactggtaatctacctcaagacccagctataccactcctagacatatacccaaaggacactccatcctacccaaggacacttgttcttctgtgttcatagcaactttattcataatagcagaaactagaaacaacctagatatcagtcaaccaaataatggataaagaaaatgtgatatatttaaacaataaagtattactcatctgttataaaaatgacatcatgaaatttgcaggcatggttgaattcctcgtgaccagtccctaaagggatgatgagtctttctctgactgtgtccgtgccagaagccatcaactaattcccgtgtccagactatagcctgcaccatggagtagggccagctttcctgtgctcactccactgcctacctaaatgtgctatgaattggaaagggccagcaccagctctcctgtacccacaaacatcaacatggctttagtggcagcccgcatcatgggcatccacatgaattgtggtgctaacataggctgcagacatcagcatgtcccctggctgtatcaggaccactgacccagtcatggcctcagcagcttcacagaccgtggacctcaatacagtcttaagaggtgacaataccattcacttcaggatggacacccacccacaccaccccgactcctaccgaagcagcaaagccaaaggcatcagtcagtggcacagacctacatgtgttcatgtgaatctcggtttcactgtagacagcatcatggcccacaggtaccaacatgacctccagtggcatcacagaccatgatggtacttcagaggggtccagtccagaaagtgaatctttcctcatctcattgcccagagccagggggattccccgcctgggaggcaggtttggggactgtgtctgcatctgcatgagctcaagactgttgtatgcaattccgtgggccctactgagcaatgacagtatatcggcctcagcctctcatcttgtcactgccatcactgtctccagtcccctagctctgcctctctctacagcacacactgctcagtttttctatctttcctacctctctatcactattcattgtagtggtgtttccaacccacaacacaagacctgggtgacactctcaacattacccatttttaattttttccctgctgctcaacaccaccaacattgtgacccaatgcccctatctcttatttctttctcttctcttctcttctcttctcttctcttctttttctttttctttttcatgcttttgggttttgttctttgttctttggggtttttgttggtggtggtggtgttgctgttgtttgtttggatttttcttttttgagacagaacctctctatataagccccgactgtcctggaactcactatgtagactagactgttctggaatttgaagaaatcaccagcctctgcccctggagtacagggattaaagacatgtactaccacacccaactatgagaatattttctttatattacatgtacactcatttctcgtatttctccagttgtctctaaagtttcttttaaatttatataagtctgaatcaaagtatgatgtatagctaactattaagtgaatgtaagcttgtgttcttttcttccttgagtattgcatttagtgtgaaatcagatgtttacagctatacatttaaggaaaaataatagtagcaggtattagaataactccatcctgttttctttttataattttgggattataaagatgatttcacatcaagagaaccatgcaaagtggaagctttctgctgaatctcagaagacgtctgttcaacaactgaatgaacaactagagaaagcgaaacaagaattggaagaagctcaggatactgtgagcaatttgcatcaacaagttcaagacaggaatgaagtcattgaagctgcaaatgaagcattacttattaaagtaagtaaacataaaagtaatgaaatacatttgtgaaaaatatattttccttttctcatttatagaggtcttcatgacagattattgatttgaaataaaatatatcttttttagaaaaaaatatgagacataattaacatatcattactataaaataatttatatgtttaaatataaattcttatatttataatatttactcttgggttttatatctgatgtgccttaaaaaatattgaagctttttcaaaattaataaagctactttgaaaattatgagattaaaaataataagattacattcagaacttttttttaactggatttaaatgtatatgttttttaaatggcctacactgtgtgttcatctgttttgattatagcagtttgtgtggagtttgaaattaacagtatggacacataaatcctcatttacaactgctaatgtataaggtaaagttatcagtgaagacctttaaaaagaacagagtggtagcaagataaaagtcattgaaaaagaaataaaattaataccttctccgtatttgcattttgtgcttaactcagtaactcattctttttcagcaatacagtttactgttatatacatgtgaatagacataatctaaaattatatttaggtgctggtaatataggttagtgactgagtttgtgtttaacatacaggatgttctggattcagtcttttgcattaatagaatatttaggctaaccactgtgtttgtgcatgtatgttaagaatgaacatactagtgtttggctgtgggtctctgcatctgtttccatcagatgctggatgaagtctctctgatgaccattaggctaggcaccaatccatgagtatagcagaatatcactaggaatcatttcattgatttttttttttttttttgccagtcattattggttctattccagatctctgggctatccagcccctaggtcctggtcttccaagtagtgtcatggcatgggtctcaagatggaccagttggccacttccacatatccttgccacatttaccccagcacatcttgtaggcaggacaaattgtagatcaaaggttttatggatagattggtatcccaatccttccattggaagtcttgcctagttataggatctggccagttcaggctccatatccccccattgctagaagtctaagctagggtcacccatatagatttctgggagtttccattgccctaggtttccagcttgtcccagaaatgctccctcttctaattccagttgtctctcccaatactcttgccctccttcctttccctacctgacccctcctgttcccattcccatcctccaatccagacccctccaacccccagccacctgaaatgtctaatctatttcccctttacagtgacatccatgcattctcccctccccaccttccaccccttgagccctccttgttacttagcctctctgcctctgtgggttgctgcatgactatcctttattttaaggttaataattcatttacaagtgagttcatactatgtttctctttctgggttttggttacctcattcaggatgaacttttctacttctatccacttgcctgcaaatttcatgatgtcattggtttttgtgctgaggaatagtccattgtgtaaattaaccactttacatttcttctggttttctttatccactcttcaggtgaaggacatctaaatgtttccaatttctggctattacaaataaagctgctatgaacataattgaggaagtgtctttgtggtagtatggagtgtgctttgggtatatgccgaagagtagtatagctgggtcttgagattggtcaattcccagtttttgagggaactgccatattgattctcaaagaggctatacaagtttacattcctaccagcaacaaggagtggagtgttcctcttgctccacatcctcaccagcctgagctgccacttgtgttgttatctttgctattccgacaggtgtaagatggaatctcagaattgttttcatttgtatttctctgatagctgatgatgttgaatatttctttaagtatttttcaaccatttgagattcttctattgataattgtctgtttagatctgtactccatttttagttagattatttgttttatttttgctatctaatttcttaagttccttacatattttggatattagtcctcaatcagttgtggagttggtaaaaatactttcccattccaaagagtgcactttgttcagttaacagtatcctttaccttacagaagctttttggtttcacgagtcccatttattagttgttgatcttagtgcctgggctattggtgttctattcaggaagttgtctcctgtatttatgagttcaagactattctccactttctcttctatgaggttcagtgtatccggctttatgttgagatctttgatccacttattcagggtggtgagtgtgtatttatttgcattcttctatgtgcctatatccacttagaccagcatcatttgttaaagatgctttctttttccattgtataattttggcttctttgtaaaaaatctagtgtccaaggtgtgtggacatacttcaggggctttgtgtggacatacttcaggggctttgttcgattccactgaccaagctgtctgttcgtatatgaataccatattcatatacagcttttattactgttgatctgtagtacagcttgaaatcatccaaacacggtggtgagatggtgagatggctggtgagatggctcagtgggtaagagcacccggctgctcttccgaaggtccagagttcaaatcccagcaaccacatggtggctcacaaccatctgtaacgagatctgactccctcttctggagggtctgaagacagctacagtgtacttacatataataataaataaatcttttttttttttaaaaaaaaagaaatcatccaaacactaggaggagcttgaagaatcctgtggaagagggggaagaatgattgtaggatctagaggagtcaaggacactacaagaaaacccacagaatcaactaagctgggctcacaggagctcacagaggctcacagagactgaaccaccaaccagggaacctatatgagactcacttaggcattctacacatatctaatagttgtgtagcttggtcttcttgtgagactcccaacagtgggagtttcaggggttgtttctgactctcttccctacctttgggaccctttcctcctactgggttgccttgtccaatctgaataaaagaggaagtgccagggctggagagatggctcagcagttaagagcactgactgctctactgagttcaaatctcaacaaccacatggtggctcataaccatctgtaatgagatttgatgcccttttctggggtggctgaagacacctgcagtgtactaacatataatgaacaaataaatctttaaaaaaaaaagaggaagtgcctagacttatgcaaaaaaaaaaaaaaaaggaatggacttactattagtgcttttattaagataatattccaactgcttggagtcagtgacgaccagtacatatgagaccctaggttgaacccctggtcaaggtaaaccaatatatatgtttgtatctatgtatacacacacacacacacacacacacacacacacatcacatcacatcacatcacatacacacacacactggtttttttctggagttctgaaagcttataaaattcacataaaattacagatcttcattgtaaaaattaataaccttcaaaattaaaatattctccattgtatccttagttatagttactattttgcctacttgctaagtaatgtccatgagaacagtgaatggatttgtttttacatattgtgtatgagtgttttgctggcaatctgtatgtgcactgtgttcatgcagtactcacagaggccaaaaaagggaaccagattccctagagcttcagttatggatggttggttgtaagccttcatgttggtactaaaccaattccaggttctcttcaagagaagcaagtgttcttatctactgaaccattcctccaaccttctaagtagtagaagttcttaagtaaaccatagatagagaaatcttaaaagagaagtattgggattacttattgtagctaatatatagtggtactagttttaacactgtggttgacacagctcttaaagtcaacctcagcatttctattgtcgaaattaaagaggacaaagagaaagaataaaggcatttaatctaagagattagcagatgtaaccataagtaattagacatgggtgtacatagttctggaatgtagctaagttggtggagtgctcgtctaacatgcacaaagccctcatactgatccctggcactgcataaaaccagatgaatgggtatatgcctgtaacctcagtacttgggaggtagaattcaggaattcaaggtcatgattggtggctctatattatttatattgtacgtacgttattttgcttatgaaattgaaattacaaccaggtataatgatgcatttttataatcccatcatactaagaactgaggagagtcaaacccaagtttgaggccaagttaggttagattacaaaatatgctgctctggctctctctacaaaaaaaatatttttaggtcttgtggtttttcagtatatatcttaaagtttcttttccaaaataattcttgtttaggaaagctttctttcttttcttttttttttttttttttagatttatttatttatttattatatgtaagtacactgtggctgtcttcagacactccagaagagggagtcagatctcattacgggtggttgtgagccaccatgtggttgctaggatttgaacttcggacctttggaaaagcagtcgggtgctcttacccactgagccatctcaccagcccggaaagctttcttataataaggacataagcacagattaactgatggtttgaatgagaatagcccgctttggttcatatttgaatacttggtccctagtttatggacctatttgggaaggattagaagatatggccttgttagaggagttgtatcattggtggtgggcttaaaggtttcaaagtttcaggccattttcagttaaattttcctttctgccttctacgtgctgctcttacaccctgcctatactgctgtgctctacaccatgattgtcctagacttaccctttggaactgtaagctcccattaaatccttccttctataaaatgtcttggtcatgctattgtctcacagcagtggaaaagtagctaaagcagaagtttgtgccaagtgagtgctattgctgtaacaggcctgaaaatgctggtggttggttggtttgtttgtttgtttgtttgtttgttttgagaaatgttgaagaacttgacactttggactggagggtttaatatatcaccctagtgtgagcatagtactgatagctttgtggactgtggaggcccagttcaggatgtttgaaagagaaataaaattagcaattgggccagagatcatttttgtgataatgtggctcctttttgctcttgttctaaaaatgtacctgaagctaaattgaagagtttggaactaattttgttggcagagatttcaaggcaaccaagtattgactttgtcatgtcatttattagtgaccactcttaatgctaatctacaagaacaagaataatgtagtttggggagaaaatgagcaccaggatatttaatgttggagccaaatttatactgaaagacataagaagaaatgaaataaagggattgttgccttgagtgaaaccccacccaggtagccctgcaacttgtgaaaagaaaagggcctaggaattacctgtttctaatgagcaataacaaatcaaagcttatgcaaatagaattcaaggagggagccagcttcagccatatgtttctggctgtagagtcatgaggaatacaggaataaaggggttataggatctccctccatgttaaggaaaccccggaggttaggtatgtggcatgggagtccgtgcttggagcttgggaaaggcaattcattgcctgaagctgtggaagtgaagccaggattgtgttggagacacgaagatgatggaggtactagagcagagggatgactgtcaggaagagctgttggcagggactgaaaccaatccaagacagggaactgtgttgcagtcagcaaagttgtgaagagtgaagccatctaagccctttgacaggatttagagcttgccctgttggattttggcttcctttggtccagtattccctcactatgccctcattcaccccttttagaatggtaatctattttctgtgccattgtatattagaaggataatttgctttttgattttatagggagtgaagttaagaggttgccattagtttcagaagagactttcaactttaaaactgttgagactgagttcttttgaagttggacttcatatggcattgcaatatggccataagcctttggggggggagcaggaagtgggatgcagtggtttgaatgagaatggtccctattggctcatatgtttgaggatttggttccagcttagtggaactgttggaaaggattaagagatgcggccaacttggaggaactatgtcaatggaattgggctctgagatttcaaaagtccataccatttccaattagatctctttctttgcctcatgcttgtggttcagctgtaagctctcagctacttcttcagtgccatgcctgcctgcctgcctgatgttatactttcctactgtggtgatgatggacctaccctctggaatgtgagccccactgaatgctttattctataaactgccttggtcatggtgcttggtcacagcaatagaaatataactaagacaatgacctatatgtacttaattcctgttataattctaaaagtagtccttttatgtatgtccatgttagattaaggaaaaaaatagttcaccgatatactttcacagataaacttacaggtataagattgaaatctttaacatgtaaatattctctaatgaaaattcaggtttcatgaaattccttagcatattggaagcagtttccaaataaaaatatttaattttcacaaaatgcaattatctgtaatagaagaaggtttgaacaacacttgcaaaattctcaagaactattattttaaaacttcccatgctcccagactgggagggggtagtgactggactgtaaaaaaataaaagtaatttttttaaaaaagttcccagccaggtgtggtggctcatgccttttatcccagcacttgggaggcagaggcaggagaatttctgagttcgaggccagcctggtctacagagtgagttccaggacagccagggctacacagagaaaccctatctcaataaatagatagatagatagatagatagatagatagatagatagatagatagatagatagatagattaataaataaatattttttaaaagttaccatactgagacaaaggctaacaaaaatgacttctaagagtctgtgattttataagtagtatattaaacagaaatatattgaacatgcactatgtaccaattttttttttacaggaatcagaattaaccagattgcaagccaaaatttctggacatgaaaagacagaagacaccaagtatctaccagctccgtttacaactctaacagaaattatacctgatagtcaacatccaaattttgccaaacattctcagatatcacttttcaaatgcagaaaactacgtcggtctattagtgccagtgacctgagtttcaaaagtcatggtaatgacgatctctctgaagaattgctacaggacttaaaaaaaatgcaatttgagcagacttcagcgatagaaagtggtcataaagacctacctttaacccattcagagtcatttaaacctctcccgtataacctagaagatgatagttctgaaagtaatgacttcagtactcttagtggaatgctgagatacataaacaaagaagtgagactgctgaaaaaatcttctctgcaaacagctactggtttaagtcaggtatgtattttacatattaccagatatattaacttgttgtatacttgtaatctcagcactgaggagacagaaacagaaagattgtaggctggatatccttactccctcccccgcaaaagtaataatttttatttagtgaatataattttattacttttggagaaaaaaaccccatatagattgacttttccttatccaaaatgtggggttagaagttccaggcttcctcaaattgggaatatttgaatactagcttggagattgttttagtcagggtttcttttcctgcacaaaatgtcataacgaagaaccaagttggggaggaaagaatttattcagcttacacttccacattgctgtttatcaccaaaggaagtcaggacaggaactctcacagggtaggaacttggaggcagagtggatgcagaagccatagaagagtgctgcttactagcttgcttcctgtactggctagttttgtgtcaacttgacacagctggagttaccacagggaaaggagcttcagttggggaaatgcctccatgagatccaactgtaaggcattttctcaattagtgatcaagggggaaaggccccttgtgggtgggaccatctctgggctggtagtcttggttctataagagagcaggctgagnnnnnnnnnnnnnnnnnnnncaggctgagcaagccaggggaagcaagccagtaaggaacatccctccatggcctctgcatcagcttctgctccctgacctgcttgagttccagtcctgactacctttagtgatgaacagcaacgtggaagcgtaagctgaataaaccctttcctccccaacttgcttcttggtcatgatgtttgtgcaggaatagaaaccctgactgagacacttcccctggcttgattagcttgctttcttatagaacccaagactactagtccagggatggcaccacccacagtgggctaggccctacccccttgatcactaattgagaaaatgtcttacacatggatatcatgaaggcatttccacaagggaggctcctttctctgtgataattccagcttgtgtccacacaaaaccagccagttcagagatattatgaacaattgggtttctgaaattgaagtttaaaatttagatattatcagcgtatagatgatatttaaagccataacactgggttatatcagtggaataaactgagacagaaacagtcattcctgaagtgtcttgccttaagcattcaagaaattgaagaatctaggatgggaaatgtagctcagttggtaaagtgtgtgcctactctgcctgatgttctgagttcacccttcagtattgcatacactaggcattcacctgtgtggtattatattacaatgatattatacattattattattctaggattagaagtttatggttgagtaatttccaggcaatactgagctgtatgaactattgtctcaaaaataaacaaaaaacaaacaaacaaaaagaacaacaaaccaaccaaacaaagacaacttttttgaaagaagcaaggtagatctctgagttctagaccagctgggactatacagtgagaccccatctgagagaaagagagaaacagaaagacagggtggtgggggttgggtgggggtggagactgaagatttcaatatagttaactgcaaaacattttatgaaatagaaaaaaagagaacataataattcataagccgtgctaaatacaaaacataaggagattagttgtgccttgttgctaagagagattttgactgccacatgtgttaatatggaggctgttgatggcctctgttgaacaacctgtgagtgagaataggcgagaaagctttgtaaggagaggaaacaccaagattttgataaaacactaacttttgataaacagtaaaggggtggtcttttgttgtttttttattaagagataaatattttgtgacttggtaggaataatctagtagacatggaaaaacgataatttaacccagagaataaaatgagaaacatatttcaagtagacttaaaatgagtttatagagaagcagaagagttggacttgtgtaagagacatgggagcacatgtttacctcagtgaaaggaaaactatataaaaagaaattaaataagactatataaaaagaaacaaatggagaggaagggtttttttgggatagaagtttctttactgattgtctctttgtgaaaaaataaacaatgttcttatctaagtcagagtaaggtaatagatatttggtgggttgtttttattattattattttggtttgggttggtttttaagttttttggggttgtttgttttacagtttcggtatgcaagctctggccaggctctacctcttaaatgctaagattaaaggcatgcactgtcccagctgacaaaggtattagaggtttaagagcaagaaaactagcatgcctttaatcctatcagggagcaaggggcagatggatctctgtgagttcaaggctaacctgttttacagaatgagttccaaaagagccagagctataaagagaaactctgtctcaggaaaaaagaaataggaaaactacatgacgaagttaacttagagagtagaaaagtataaacacaccacccttccaggaaagtttaatagacttactagacagatagccttgtaaaatacagaccagctggtattatctaccaggaagtttaccaagaacctatttggaacttataaatattactcacatccatcatatttccaaaacttgtagtaaatagttcacaaaatttgattatgagaagtgatggaattagccaaagggaaaacaaagaaaaaaaagatgaagcaagagaacaagaaagccgggtgtggtggcgcatgcctgtagtcccagcacttgggaggcagaggcaggtggatttctgagttcaaggccagcctggtctacagagtgagttccaggacagccagggctacacagagaaaccctgtctcgaaaaaccaaaaaaaaaaaaaagagagaacaagaaaataagaacatgaatatatagaccatgtcaaattcaaggtttggtaagatttgacctatatttttaaaactcaaagtcttccctctgtctttcttcttttctatgattgttgcaaatatttctcctttactttttgcttcatttttccatatttgtataaccagtttgccctcctttactgtgtatattagtatgacattgatgtctgaatattacttcttaagatttatatttattttatcaatgattatgtgtgtgtacatgtggatttatgcacaagtgagtgtgtaagccttcagagtccagaagaagcataggatctcgtggaggtggaggtacaggcccttgtgagacacgagtgctggagtcaaaccctggtctttgaactgcttagccctcttttcagcccctgcatctatattttatgtcccttgccaggagcttaaaacctggtttaactgtctgtttctatataatctccaaacttccatttttataaccatgtaatacattattgacattttctgatttttttcaattggttaaatatttcccactttatctttaaattttgtgcttgaatgttatggtagatgttaatgataaatcaatatgattttaatattcataatattaacctattattttatattattctagggaggaaaattgtaattaaaagaagatgtctatgtcatgaaaaatggaattgttggtactgtgctgtttgttatgtgtatgtagtgaatactcattgaagctgttattttattatttttaataaatttttatattttaatattttaaagaaacacttctaaaatataactatatttgtagtaaaaattaagtcaatttattgattattttggtgaaaattactgttttcttcgtctttgtcttacataacaataatgactaaaatatttaaaagtacatttagtatttgcacttttagtcatgctattatatttcttgctatttttaaaatatttacttgtaacaacacttttctgaatttacaaatccttctgtgataagttcttaagacttgatgggtgtttgctgtttatcatttactattttagattctttatattttgaaactcatttaatcctcaaaacagcctaatgaagtagatatggtattatttgtgtttttaaatagaattatttaacatggtagaactatatgttctaaagaaagttaatcactgcaagtatttttgggttggtgactccatttatacatggttagcattaagcgttgaacattgaggccttaatatgttactagtcatcatgtgagtgctgagagtcaaacagaggtcctctggaagaggagccagtgctcatggaaccatctcaccagccctatccagtcacatgtcagtagtaccatctgagtaacaccaatttagaaattctagaaccaaaacatacatttgaaagttgaaaacacccagtgtgagcttaacagaagcaatgacaattggcaatggcagaaatattagttgacctaaagacagataaatagaaaatattcagactgaggaacaagaagaaaaatgatagaatatatatgaaaacaacatacagcatatatggagaccattaaggttaagaagagaaatggggtagaaaatcagggtatttataattatagctgaaagtacctcaaacttattgaaacagaacctgtagttcagtaaagcctaataggacaaatacatacacatacactataacacacacacaaactcctacttatatagtagtaaaatactggaaaccaaaaatataaagaataacttagaagcacatttcaaaagatttatgtaggaaggcagcatccaaaagaagactgatttctaattattaattataaacaatttggttttatttttacttttaacttttttgacacagtcttattaatgtactcctggctagcctggaacttgctgtttacaccgggttgtccttgaactcatagaaattcacctgcccctgcctctagattaaaggcatgtgccaccatgtccagcaatgtgatgtttttgtttgttggttggtttgttggttggttggttggttggttggttggtttggtttttagagacagggtagttctggctgtcctggaactcactctgtagaccaggcttggcctcgaactcagaaatccgcctgcctctgcctcccaagtgctgggattaaaggcgtgtgccaccacacccagccaatttgatgtattttaaatagaagaaaactaatatgctgcaaacagtaggattgatcaaacaataagcataagaaaacttcagggctatgttagtatcagacaaagtgtacacccaaaagatgtgttgtcatcatagacaaaggatgtttcctaattgtacctgaagatattctcttaaatgtatacatctcaaacaccagactttagcagaattagaaagaaagaaagaaagtccacaaccatagtagaaaagtttaacctctgctttttagtaattaaaaaaataataaactgaaaaatatataaatttggatcctatcaacattaatttagggaatattaggtacacctttcatgcctcccattattttgacaaatgaaatggagttaaaaacctagctattagtcattaatagtctcccaaccaaaagaagcccaggacagatgggtttagtgcagagttctatcagaccttcaaagaaaacctaattccaactctcctcaaactattccacaaaatagaaacagaagggactctaccctattcaatctatgaagccacaattactctgatacctaaaccacagaaagacccaacaaagaagagaacttcagaccaatttcccttatgaatatcgacgcaaaaatactcaataaagttcttgctaacccaatccgagaacacatcaaaacgataatccatcctgtccaaataggcttcatcccagggatgcagggatggtttaatatacggaaatccatcaacgtaatccattataaaaacaaattcaaagacaaaaaccacatgatcatctcgttagatgctgagaaagcatttgacaaaatccaacactattcatgataagttttggaaagatcaggaattcaaggcccatacctaaacataataaaaaaataatatacagcaaaccagtagccaacatcaaagtaaatggagaaaagctggaagcaatcccactataatctgtgttcttaattcccttttgtttcttttaagaacaagagacttaaggaaaaccactggccctttctactatgtgaggacacagaaagaagttattgtctgtgaaccagaaagtacacattcaccagataccagtctgccagtcagtgccttagcttttctaatccccagaactgtgagaaaaaacaaaacaaaaaaccattcctgttgttgaaaagccttccagtttgtggtattttttattataacagccagaatgcaccaaaacattaaaattatgtgtttcaatttttccaaaacaaaaagaacaataaaaatattttttccttagtttcctatctagtctagctacccatctcgtcatatatatactttaagtggactgggttcttgaaagataaataagtttgctgtttctctttcttttgctttcactcagtgatgtctttttttaagaaacaacctttaaaataccatcttagattgttctcattaggatcctcaggtgacaacaaggtattttgaaacattcaagtggcagtacagtactgagcactatgagcaaaatggaagcgtttgtcttcacaagtcttacagtctgctgatactcagtatggacaagtgccatttgggaaattgcaagatgttgtaagagtttgtatctaagatatcagaaaaagattcctggaagaaattacttttatattaacgaagactaattaaatttgggcaaagggcagagatctggggagaccagaaagatgaggagagtgactaggtgatgtgtaagaatgtggagaaaataataagtaggcagggacacataacaaaatatcaaaacacaacaaaagatggaagaagctagctggcacaggtgattctttattctacaacttagcctgccccctctctctcctcttcctcttcctcctcctcttctttcttctcttcctcctcctcctctctcttctccttctttttttcccctccttttggagacagggtttgtttctctgtgtagcccaggaactcactctgtagaccagaccaagctgtccttgaacttaggtatctgccttccctgccacccaggtactgggactaaagatgctaactggcacaaatgaaggtttttggggtttttttgttttgtttttgttgttgttgttgttgtttggttttttgtttttttttttttacaattcaacttgccattttcccccttacctttccttttaataacaaaaacaattccagctgccattctcttatgcctaaacgattctagttctctgggtggttgtcttttccacaagtccttagaagagctttataattcccaaatcagtcttgtttcacttgacaccatggcagaggaacagaattggctatatacaatctagatatttatattatagctaaaagttatatagggttgcatacatgatgaatgagaatatattcttgtgttttcagtaaatttttaactgtttcactttgttctgattttatgattgccatatgatcatatacttgtgtgtaggaatgcaacttttgctttagtaaaatgagaatgtaaacatggtggtttgagttctccagtcttgggcacttgaattcttagtccccagttggtggctttgtttgggtaggtataggagatgtggccttgctggaggaagtatgtcactgtgggaagggtttgacatttcaatagccatgtgttgttcggtttgctctctctgctttctgtttgtagtttcagatgtgagctctcagatgttcctgcccccatgtctacttcttgctgctacaactccctgccatgatggactctgatctctctgaaacaataagctcagataaactcttctatattttgtcttggttttggtgttttatcacagcagtagaaaagtaactaataagttgggtgtggtggcgcacgtctttaataccagcactcgggaggcagaggcaggtggatttctgagttcgaggccagcctggtctacagagtgagtttcaggacagccagggctacacagagaaaccctgtctcagaaaaaaaaaaaaagaaaagaaaaaaagagtaactaatacagtagtaatggaccaatatgaatttttagttttaagacaattttatttggggctgaagagatggctcagcggttaagagcactcactgactgctcttccagaggtcctgagttcaattcccagcaacaaccatatggtggcttaaaaccatctgtaaagggatttgatgtcctcttttggtatgtctgaagagagcaacagtgtaaattttacacttatgtagaattataaataaacaaacaaacaaatcttttttaaaatgtttaaatttttttatttttaaattgatggctatcaccagaaaggaataaagccctatacctattactactcaataatggaaagcaaaatgggttcataagctcaaatctgtatgaaattaagcaaagtttgaaagaaaacaaacgtcagaagtaagggagatgtttaatcaagctgaaaacatagatgttgcaatagaaacaggaaaattcactttactctgtcatacatcatgttgctggggagtctgtagcacccatttcagaaagatggtgtggctacatttctctataacttccaccacaggttgggtgacagacaggttccaggatctctctggacagccagactagctgaatcacaagcacgcccttgagagaactgtagtgttcctgctctcctttctctgcttcctggtttgaaatgtgaaagtttgctggcttatgtactcataaaacgctctcctccccagagacccaaacaagtggggctatccaatgttggaccaggattctgagttcctagtgacagagcttgtccttttttacttatatatgactgtgtgattaactgccataggtgtacagatgttaacagaggccaggagtaagactctttggaactggaattgtgagctacctgatgagtgtgctgggatctaaactcaggtcctctagaagggcagcagatgtcttaactgccgagtcatctctctagcatgaggggtttgttcttaaaatctctttcgaggtctatggcaaggattacacaggaggttccctagtgctagttttggcagctgtcttggtttgggttcgtttctgtgaagagacaccatgaccacagtaactcttataaagaaaaatatttgattggggctggtttacagtttcagagggttcccattatgttaataatgttcctgcccccatgtctacttcttgctgctacaactccctgccatgatggactccattatttacatgatgggaaagatggcagtgtgagggaaagatatgggactagaggaactgagagttctacatcttgatctgcaggcaacagaaggcagttgtattacactgggtgtagtttgagcatatacagtctcaaagcctacctcactgtaggctttcttcaaaaaggccacacctcctaatagtgtcacaccctatgagccaagtattcaaacacatgaatctatggaggccattcctattcaatcaatcaccacagcacagatgctaaaataggagtttagccggccgctgaccagttattgttgcgtgcctgtccattctggttctttgtcacacttactcactttaacaaaaaggcaggtcaaaatcccccatgaagttattggcatgctgtatcatgaaggagtacacctggcttcctgaagtcatacatgttactttctacttttggaatagaccagaactagttaatctaattaaaaactattctgaatatatgtgtatatatgcatatatgtgtgtgtacacatatgtatgcatagattcatatgtgtgtgtatgtatatacatgttgttccaggaaaacaatgcttttctcaatcagaaatttgctcacttaatcttttttttttaaatcactttcataagttcacatgaagctaacagtaacattattgaggaatggtaagcatggaccaataaaagctaatgaaagagttccaggacagccagggctatacagagaaactctgtctcaaaaaaccaaaaaaaaaaaaaaaaagctaatgaaaaatattgtgtaagtcatattaagagaatatcatttaaaaagtgaaattaaatttttagccctactaaggtttgagtagaagaaattcccaacatatataagaaaaaatacacatttttgcaaaacatacagattttgctgatgggaagcaatacagaatcatagattctgctttcctttcatttctgttgctataagtaaagagagctgggggagaaaaacggtttatttggtgttcaattccaggttacagttattgcaataaagtcatagaggtagaagcttgagacagctggtcacgtcacatccacagtcaagggtaaggagaaatgaataaacacacacccatgttgccaatttactctttctgctttggcttttagctcttcccattctgtatagtttaggatcccctgcacagggaatgctgctgcccacaaaagacgagttcttcctacataattagcaatggagacaattccccattccaaacatacccacagaacaacttgatcaagagtaatttctcaactgaaactcttccccagtaattccaggttgtggcaagtagacatttaaaactaaccatcctagttacaaaaacagcctgtctttactcatggaaaacagatggtgtgaatatcaatgtctgacaaggcttgcttaggctgtaatgaacaggtatggagaaataattgacatttgtggtttcctgaatcttgagcttgcattatctgggccagacaaacaggtcctttaaacagaaggaggaaaacaaaaaacaatacatcaaggtaagtcagttccagtccagacatgtaaaagatttgacattattgttttagaaaggtgatggtggggctggtgagatggctcagtgggtaagagcacccgactgctcttccgaaggtccaaagttcaaatcccagcaaccacatggtggctcacaaccatctgtaacaagatctgactccctcttctggagtgtctgaagacagctacagtgtacttacatatattaataaaataaatctttaaaaaaaaaggcgatggtatcttaaggggttatgattttaattatttcttttaacaaattactatttaagaaacattaaatggaaagaacaagttttgagcagtggggagaaaacagaataattgattaccctcctggatttttcacatttgtagggtgtaaatgctaatgcctttaatcctggcatggaggaggctgaggcaagtagattgccatgagttcaagactagcctaggctacataataagaccacatttccaaaagggggtgggggaggataactacatgttatgtaaagtgggtgtggtgaagcttgtcttgtctgtaaccccagtgctctagaggcagaaccagaaggttcagaggttcaaggtcctcctcagcagtcatgttgagctacagagagtgtgagcccatcctggattataggaggccctgtctcaaagaggtaatgatcctggtttaaattgccttctataaagagccacctccttcttacactctggtatttattcaataaattgaagttgattattatttgcaaactaacatactctacagattattttttcttctctattttttatttaagttttattgcattatgatgagaaaagatgcataatttcaatttatctgaatttgttaacatttaaaaacatattttgagtaaatagactcacatcatgttctttcccttttgtacctcaactcctcccagagacccccccttcaatacctgccatacctttctttttttatcatattctttaaaatttataaaatattataacaataaaaatgagtattataagagttgtttgatataaaacaatcagttgaacagttttatgtagatgcttgtctacagcaatactgaaaatacatttttctcaacataaattttaaataattccaaatatattaactgtatgatagtttaaaataatttatcactattagtttttttaatgaacataaataaataaagtctttttctttgtttgttttgtttttagtagagcttaaaatcttggctcttaccatggcataaacccaaaataagaacaaattttggacattggagttcattgtaataaggctgtacttcagtgtccctcacatcaccaaaggattttgcctccatagtagctaagctaagagttgactgttctgctgtgccaaggaatgaattgtaggcaagaattttggatacagatttctctacagattattcttaagacattcttaagctttaaatatgtatcacagttctttcctgattcttcttctctatcattcttcacaaacatttttagtgcttctcacgttgaggtgagctgccatactaatatgaatatgctgtgcttgcttactctccaagttgcttaacatctctctcctcaaacttttaaccctttctcttactctactctaaatggtgctcttacctttgaaagaatagatgccattaggcaataattgtttcatctttccaccataaatactactaacatctctgggtcttaatgcatacatttcttctttcagtgaatacaccttcttcagaatctcatgccttcctgtccatttgagagtccactctttattattatctatttttaaatgttgcttttatctcctcatatgatgggatgagatgagagctgtacccaagctgtacaaatacacagcttggcctgagcccagagcacttatttctctgttctaactatcctaggcctaagcccagaagcttccagcctcaatgcaatatcattttctcaatatgactattcaatccagctccccctggcttctcactgaattgctcttcttggccttatactacctttggcaatctgttctaatcttctggctccttctcactctctggatcattctgtgttcacctgtgccgaggttgttttctctgcacctgtctctgtaaagaagtattcaacatccttagtcatcagtgaaaagtaaatcaaaatgaccctgagagtctaccttccaccaatcagaatggctaagatcaaaaaaccccatgtcactatttctccagaaagcacaatgcacacataaagtcacactccatgtgttcaaaagcaagttatacattaagttttaactctcagaaaatcttccaaatcacgagtcatctggatgtgaacttgcagttacagcattaacatgagaagagaaaggtgctgagtagatcagggtaatgttaatattttagcttgtctaaatttacagaatctctccctctggtttattgaagtatccaaatatctatttctacagtgcttctcaaacgtttttccacatgcagtattaattgcctttgcagtttcccccagggcttcttcacaagcccaaattctatcccttagaacttgtat

SEQ ID NO: 1673 - DNA, 4263 bp, Mus musculus
cctcatcgagagtcagaggcttccatgtcgtgggctgcgagagtgtcccaggcttccgagcgcagaggaggctcgcggtgcgccgtggtctggggacgctaaccccgcctgcgatctgggtggaaatggaatttatctcatcagactactgtactaaagacaacgacaatgaggaggaaagtttgcttgcaaacgttgcttcattaagacatgaactcaaaataacagaatggagtttgcacaatttaggggaagagttatccagtgttagtccaagtgaaaattctgagtatgtctgcagtccttcaagatctgaaaggcttattttggaagaactcacccaacctagccacctgggacgtttgatttacccaccttataagaaagtttgtaaaacatctgatagtactgattatcaaaagaaatcaagagatcaggtgtctttttcatctgtttctatggatcaagaggttaaaaaccttcgagagaaacttcataaacttaggcaacagaatgcttgtttggtcacacagaatcattctttaatgactaaaatagaatctgtccactttgaattgacacaatcaaaagcaaaaattgctatgcttgagtctgcacaagagcaggcagccaacattccaatcttagaagaacagattataaatttggaagcagaagtttcagctcaagataaagttttgagagaagcagaagataaattagagcagagtcagaaaatggtgattgaaaaggagcacagtttacaagaggccaaagaagagtgtataaaattgaaggtggacttacttgaacagagtaaacaaggaaaaagagctgagcgacaaaggaatgaagccctctataatgcagaagagctgagtaaggccttccagctgtacaaagaaaaagtggctgaaaaactggaaaaggttcaagatgaagaagaaatattagagagaaatcttagtaactgtgaaaaggaaaataaaaggcttcaagaaaagtgtaatctgtataaaagtgaacttgaaattttgaaagagaaattcagggagttaaaagaagaacattacagtggaaaagaaaaattaatgattatggcaatgaaaaactcagaagtcatgtcacagttaacggaatctagacaatgtattctgaagctagagagggagttagaggacaaagatgaaatagtacgagaaaagttttccttattaaatgaaaatcgagaattgaaggttcgtgttgcaacacagaatgaacgactagagttgtgtcagcaggacattgataattcaagggtggaactgaagagtttagaaaaactgataacccagataccattaaaaagagaaatagttggctttaggtcatctctttgtaagcaccagaggagtagtgtttctgacaaggaggacaaatgcattggctgctgtgaggcaaataaactcatgatttctgaattgaggattaagcttgcaataagagaggctgaaattcaaaagcttcatgcaaatctgactgtgaaccagctctctcaaaatgttgctaatgatagtcaagaatgtggtaaagtaaacacgttagaaacagaaccggtaaaattaggaggtagtcaagtcgaaagtataaaggatggagatcagcagactgtgaacaagcagtatgaaagagagaagcagcgacttgctaccgggatagaagaactgcgtgctaagctgacacagatagaagctgagaactctgacttgaaggttaacatggcacacagaactagtcagtttcagctaattcaagaggaactactagagaaagcttcaaatgctagcaaactagaaaatgaaatgacaaagaagtgttctcaacttttaattctagagaaacagctagaagaaaaaattattgcatattcttctattgctgcaaaaaatgcagaacttgaacaagaacttatggagaaaaatgaaaaaataagaagcctagaatcaaatatcaacacagaacatgagaaaatttgttttgcttttgaaaaagcaaagaaaattcatcttgaacagcataaggaaatggaaaaacagattgagcaactcgaaactcaactggagaaaagagaccaacagtttaaagaacaagaaaagactatgtccattttgcagcaagatatactgtgtaaacagcatcaccttgaatcactagatagactcttgacagaaagtaaagtggtcagacaactggattcagcgttagaaatctgtaaggaagagcttgctttgcatttgaatcaattggaaggaaataaggaaaaatttgaaagacagctgaagaagaaatctgaagaggtatcaaagcaagaacaagagcttcagaaacaaagggaaagttcaacagaaaagttgagaaaaatggaagagaaatatgaaacagccatacgtgaagtggatttgaaaaggcaaaaaattatcgagctaactggtactgccaggcaagccaaacttgagatggatcagtacaaagaggagctgtctaaaatggaaaaagaaataattcatttgaagcgagatggggaaaataaatccatgcagctttctcagttagatatggttttagatcaaacaaaaacagaactagaaaagacaacaaattcagtgaaggagttagaaaggttacaacaccacacagaaactgaattaacagaaaccatgcagaaacgggaagctctcgaaaacgaactacagaatgctcatggagaattgaaaagtaccttaagacaactacaggaattgagagatgtattacaaaaggctcagttatcattagaggaaaaatacactacaataaaggatctcactgctgaactgagagaatgtaagatggagattgaagacaaaaaacaagaacttattgaaatggatcaggcgcttaaggagagaaattgggagctaaagcaaagagcagctcaggtagaaagcttaaatgaaaagttgcaaaatgccaaagaacagcttcgagaaaaggagtttataatgctccaaaatgaacaggagatatcacaactgaaaaaggaaatcgaaagaacacagcaaaggatgaaagaaatggaaagtgttataaaagaacaggaagactacattgctacccagtacaaggaggtcattgatttggggcaagaattgaggctaacccaggagcaaatgcagaacactcattcagaactggtggaggctcgtcgccaagaagtccaagcacagagggaaatagaaaggcttgctggtgaactggaggatataaaacaactctctaaagagaaggaagctcatggaaatcgtttggctgaagaactgggggcttctcaagtacgtgaagctcatttagaagcaagaatgcaagcagaaataaagaaattatcctcagaagtagactctctgaaagaagcttatcagatagagatgatttcacatcaagagaaccatgcaaagtggaagctttctgctgaatctcagaagacgtctgttcaacaactgaatgaacaactagagaaagcgaaacaagaattggaagaagctcaggatactgtgagcaatttgcatcaacaagttcaagacaggaatgaagtcattgaagctgcaaatgaagcattacttattaaagaatcagaattaaccagattgcaagccaaaatttctggacatgaaaagacagaagacaccaagtatctaccagctccgtttacaactctaacagaaattatacctgatagtcaacatccaaattttgccaaacattctcagatatcacttttcaaatgcagaaaactacgtcggtctattagtgccagtgacctgagtttcaaaagtcatggtaatgacgatctctctgaagaattgctacaggacttaaaaaaaatgcaatttgagcagacttcagcgatagaaagtggtcataaagacctacctttaacccattcagagtcatttaaacctctcccgtataacctagaagatgatagttctgaaagtaatgacttcagtactcttagtggaatgctgagatacataaacaaagaagtgagactgctgaaaaaatcttctctgcaaacagctactggtttaagtcagggaggaaaattgtaattaaaagaagatgtctatgtcatgaaaaatggaattgttggtactgtgctgtttgttatgtgtatgtagtgaatactcattgaagctgttattttattatttttaataaatttttatattttaatattttaaa

SEQ ID NO: 1674 - protein, 1363 aa, Mus musculus
SSRVRGFHVVGCESVPGFRAQRRLAVRRGLGTLTPPAIWVEMEFISSDYCTKDNDNEEESLLANVASLRHELKITEWSLHNLGEELSSVSPSENSEYVCSPSRSLIELTQPSHLGRLIYPPYKKVCKTSDSTDYQKKSRDQVSFSSVSMDQEVKNLREKLHKLRQQNACLVTQNHSLMTKIESVHFELTQSKAKIAMLESAQEQAANIPIEQIINLEAEVSAQDKVLREAEDKLEQSQKMVIEKEHSLQEAKEECIKLKVDLLEQSKQGKRAERQRNEALYNAEELSKAFQLYKEKVAEKLEKVQDEEEIRNLSNCEKENKRLQEKCNLYKSELEILKEKFRELKEEHYSGKEKLMIMAMKNSEVMSQLTESRQCILKLERELEDKDEIVREKFSLLNENRELKVRVATQNERLELCQQDIDNSRVELKSLEKLITQIPLKREIVGFRSSLCKHQRSSVSDKEDKCIGCCEANKLMISELRIKLAIREAEIQKLHANLTVNQLSQNVANDSQECGKVNTLETEPVKLGGSQVESIKDGDQQTVNKQYEREKQRLATGIEELRAKLTQIEAENSDLKVNMAHRTSQFQLIQEELLEKNASKLENEMTKKCSQLLIKQLEEKIIAYSSIAAKNAELEQELMEKNEKIRSLESNINTEHEKICFAFEKAKKIHLEQHKEMEKQIEQLETQLEKRDQQFKEQEKTMSILQQDILCKQHHLESLDRLLTESKVVRQLDSALEICKEELALHLNQLEGNKEKFERQLKKKSEEVSKQEQELQKQRESSTEKLRKMEEKYETAIREVDLKRQKIIELTGTARQAKLEMDQYKEELSKMEKEIIHLKRDGENKSMQLSQLDMVLDQTKTELEKTTNSVKELERLQHHTETELTETMQKREALENELQNAHGELKSTLRQLQELRDVLQKAQLSLEEKYTTIKDLTAELRECKMEIEDKKQELIEMDQALKERNWELKQRAAQVESLNEKLQNAKEQLREKEFIMLQNEQEISQLKKEIERTQQRMKEMESVIKEQEDYIATQYKEVIDLGQELRLTQEQMQNTHSELVEARRQEVQAQREIERLAGELEDIKQLSKEKEAHGNRLAEELGASQVREAHLEARMQAEIKKLSSEVDSLKEAYQIEMISHQENHAKWKLSAESQKTSVQQLNEQLEKAKQELEEAQDTVSNLHQQVQDRNEVIEAANEALLIKESELTRLQAKISGHEKTEDTKYLPAPFTTLTEIIPDSQHPNFAKHSQISLFKCRKLRRSISASDLSFKSHGNDDLSEELLQDLKKMQFEQTSAIESGHKDLPLTHSESFKPLPYNLEDDSSESNDFSTLSGMLRYINKEVRLLKKSSLQTATGLSQGGKL

SEQ ID NO: 1675 - DNA, 117897 bp, Homo sapiens
atgtctagctaagggattttaaatacaccaatcagcactctgtgtctagctcagggtttgtaaatacaccaatccacactctctgtatctagctaatctagtggaaaacttttgttgtctagctcagggattgtaaacacatcaatcagcaccctgtcaaaacagaccaatcagctctctgtaaaacagaccaatcagctctctgtaaaatggaccaatcagcgaaatgtgggtggggccagataagagaattaaagcaggctgcctcagccagcagtggcaacctgctggggtccccttgtacactgtggaagctttgttctcttgctctttgcaataaatcttgctgctgctcactctttgggttcacactgcctttatgagctgtaacactcaccacgaaggtctgcagcttcactcctgaagccagcgagaccacaaacccaccaggaggaacgaacaactccagacacgccaccttaagagctgtaactctcactgcaaaggtctgcagcttcactcctgagccagcgagaccacaaacccaccagaaggaagaaactccgaacacatccgaacatcagaaggaacaaactccggacacgctgcctttaagaactgtaacactcaccgcgagggtccgcggcttcattcttgaagtcagtgagaccaagaacccgccaattccggacacagtggaacattattaataaatctatacccacaaatttgaaaacttagatgaaacaggccaattccttgaaagatataaagtaccaaaactcatacaagaaatagataacctgaataggcctgtatctgttacagaaattatactgataattaataacctcccccaaaagaaaggaccaggaccagacagtttcaatggtgaatcctaccaaacatttatggacaaaatgaaaccaattctctaaaatctcttacagacaataaaggctgagggaacaattctttactcattctgtgaggccaacattaccctaattctaaaaccagaaaagacattacaagaaatggaaactacataccagtatctcttaggaacacagatgcaaaaatcttcaacaaaatattagcaaagctgattcgacaatgtaaacaaagaattacaaccatgaccagatggatttgttccaagtatataagcctggctcaacattcatgaattattttgtgtaattcatcacatcaacaggctaaggaagaaaactcagatgatcacagcaatgggtatggaaaacatatttgataaaatccaatatcaatccatgatatttaatattaaaaaaatcttagcaaactaggaatagaggggaacttcctcaacttaagaacatttacaaaaatcctacagctaagatcacacttaatggcgagaaactagaagctttctcactaaaatcagaaacaagacaaagatgctactccctcattactcctactcagcactatactggaagctcgagctaatgtaatacaacaagaaagggaaagaaaagacatacctattggaaaagaagaaataaaactgtccttgtgatagtccatgtagaaatcctaaagaactgccaaaaaaaaacccgtcccggaactaataagtgatgatagccaagtctcagtatacaatattaacatacaatagtcaactgctttcctatacaccagcaacaagcaactggagttgggaataaaaaatacaataccatttacgttagcactaaaagaaaaaaaaagaaaaaaagaattaggtacaaatctaccaaaatatgtacaagatctataatcccagtaatcccagctactcaggaggctgagatgggaggatcctgagcccaggagtttgagaccagcggagttacacagcaagacctcatctcaaaaaagaaaaaacaaattagtacattgttggtgggaatgtaaattagtacagccctatggaaaacaatatggtggttcctcaaaaaaccacaaatacaactaccatatcatctagtaatctcacttctggtatacatccaaaggaactgaaatcagtatgtaaaagagatatctgcactcccatattcattgaagcattattcacaatagtcaagacatagaaacaacctaagtgtccattaatgaatgaataaagaaaatgtggtatagatacacaatggaatactggaggacattacactaagtgaaataagccagggacagaaagacaaatactgcattatctcatatgtggaattcctagaattccatacagttccattcctaaaagtggagagtagaacgatggttaccagaagctgggggtgggggacttggggagagagggaatagggagctgttgatcacagagtacaaagtttctgatagacagaaggaataggttttgagatctattgcacaggaaggtgactatggtcaataataatgtatatttcaaaataactgagactgaatttcaaatagctcatcataaaaaattataggcaaggcaatgttaattagcctgatttaatcattacatgttgtatatatgtatcaaaacatcacgctataccgcataaatgtatacaattataatttgccaatcaaaaataatactgataataaatttttaaagctaatgatgtagaagatagagctgaagaaattatccataaaataggagagtgagacaaagagagaaattatgagagattaagaagcttggatgatccacttaaactgcagtgaaaatgcagaagcagaaaatttaaaaagctacaagagaaaatagagatgaactacaaatatataacaaactgacaggaagcttcaacagctataatcgaagtcagaagacaataaaatactagttttgatgcatttaggaaaaatatctgtcagtgaagaattctttaagtaattcaattctttaagaaaagtcaagagagcagagccgtaagaaccagaggaaaacaaattaagcctgaaatcagtcctattcagacttccagttatatgaaccaatagacttccttattaaaaactgatttggtttgtttacctattggtaaaaactttgtaaggacttaaagaccatgacattttaattaaataatcatatgtgtttcaccccatcaaaccctatatgtttttatgagtatgggaaaaggtgtggaagagttcacatctaggagaatgacaacaggcattcaatagagttacaaagaggtttttttttgttttttttttgagatggagtctcactctgtcacccaggctggagtgcagcagcacgatctcggctcactgcaatctctgctttccgggttcaagtgattctcctgcctcagcctcccgagtagctgggactacaggcgcgcaccactgcgcccagctaatttttgttttttgttttttctttttttttaagagatggtgtttcaccatgttggtcaggctggtctccaactcctgacctcgtgatccacccactttggcctcccaaaatgctgggattacaggtgtgagccaccgcacccagctttttttgcttttacatctttgtattgtttgacttactctaaggaggttgtatattacttttataattggaagtaaaaaaattcataaaggagacaggtgtggtggcatgtgcctgtagtcccagctacccaggaggctggttgaagtgggagtatcacttgtgcccaaattcaaattcagcctaggcaacatagtgagaccccatatctctcttttttttaacttttattttaggcttggggatacatgtgaaggttacataggtaaacgtgttaaaaaccacaattatttttgcaccaacttagtatttcatcacccagatataaagcccagtacccaatagttaacttttctgtgcctctctgtccttccaccctccctcctcaagtaaatcccagtgtctgttgtttccgtctttgtgttcataagttcttaccatttagctctcacttctaagtgagaacacgtggtatttagttttctgtttctgtgttagtttgctaaggataatagcctccagctcaacccatattcccacaaaagacatgatctcattcttttttatggctgcatagtatttcatggtgtatatgtaccacattttctttatccaaactgtcattgctgggcatttagttgattccatgtctttgctattgtgaatagtgttgcactgaacattcgcatgcatgtgtctttatggtagaatgatttatattcctctgggtgtgtacccagtaatgggattgctggagaccctatctcttaaaaaaaaaaaaaaagtatatatacacacacacagactcacataaaacccaaatatatatattaaattattaaatatattattctccccaaaacccagccatttatatatatatatttatataatacttaaaagccatttatatatatatatatatatatatataaatggacctcaaaggtatctttcactcttcttccttagtatcttggcacatgttgtgccttctaatccattgtcttgttccacttactcccttatgcctatatatatatatatatacacacacacacacacacacacacatatatggcttttgagtttttgtttttttatatacatatttatatatacatatacatttatatgtatatgaatatattatatattttgtatatgtataaaatgtgtgtatatataatagatatgtgtgtgtatgtatataaaacaaaaaataataaatactcaaaagacattttttcccaaagatcaataaagtagtcctatctactttatacatgtaatattaggcatgtatacctgtagataaaatggaaataggagatattccaaatggcatcaggtatattatacaagtaaattttaaaaattagatgaaatggccagtttaccagaaaatattgaaatttggctctatacaaaaatgaaagactaataaaaatttttaaaaattgatatagctatattctcccaaaaactcacccagatagttttacatgtttggtaaacgtctggttcactcattcaatagatactttttagtgcctattatgcccttaaaaaagtattgttgttctaggctcagggtttattttctagctaacattttttgagtgcttatttggtgctagataccattccttttacatgtattagcatatttattcttcacaataatatatagtggggagcaggtgattactgttaaagtatagaaactggtacagagaggctcaataccttgtggccaaaacgatcttttaaaaaacacagatcgagttaacctgcttataactattcagtggcgtattactggtctctgcaaaagacccatatccttaacaaggacctaaaagcccacaatgatttggttgctgttgctactgacttctctaaagtagacttgtaccacttttctctctctgtatcctatctttcaggacctcaaaggtatctttctctcttcttccttagtatcttggcacgttgttgttcttttttacccattgtctcgtaccactcattccattatgcctagtgaaagtctgataattctgtagatcttaactctacttctggatgtctttcaatttccagataaaatgaagtcctcctactgagcccactcatagtcttatgaacttaccttcattacccctagtaaatattttgacatgtatttgtgtaataatttgattaattaatacttgattgtatgagggcacagactatacacacacacacacacacaaacatatatatatatatttttttgaggcagggtctcgctcttgtcaccgaggctggagtacagtggtgtgatcacagctcaccatagcctcaacctcctgggctcaagtgatcctcccacctcagcctcccaagtagctggaaccacaagtgtgtgctaccatgcctggctaactttatttttggtagagatggggtcttgctatgttgtccaggctggtgtgaaacgcctgtgcttgagtgatcctcccaccttggcctcccaaactgttgggattacaggtgtgagccactgcacctagctgatattttcactcaccattgtatccctagcaacttggatagtgctgacacatatcaagcacgcaagaatgacttaaatttctaaatggattatctattttagtcataagatacatgaattggcattaaagttttcaagaacctctatcaatataatgtgaggctagtcaattatccaaaaagtattctcctaaaacctaaaaagtaagaaattagtaaaattttcaataagtaaccaaggacaaaactagattgttctataaaattttaaaaactaactttaagacaaaaattagtaggatgtagttactgggaaattaaacaagttgggaaatacaaacagggtggaagatgatagttaccctacacatctcaccaacactgtctaggattacagacaaatgattttacctctttccttaatcaaaacaaattgtttagggagaatgttttaaaggaatagtcccagccgggcgcggtggctcacacctataatcccagcactttggaggctgaggctggcagatcacttgagatcaggagtttgggaccagtctggccaacatagtgaaaccccgtctctactaaaaatacaaaaattagctgggtgtggtggcacatgcctgtaatccagctactcgggaagctgaggcgggagaatcacttgaactcgggagatgaaggttgctgtgggccaaggtcgcgccactgcactccagcctgggtaacagagtgacagagggagactctgtctcaaaaaaaaaaaaaaaaaaaaaaaaaaggaacagtccctttaagagtgactaaagatgtaaagaataaagctaaaccaagccagctacataactatagaggtataaatgtaaaattaacattcattgattatttactatgtgtcagggatgatctatgagcattttttaatagactactttacactgaatatgagcatttattaactcatgctttttcaaatcaactctatgatgtagttacaattattatctctattttacaagtgagaagatcacataagttttaagtaggcagagtcaagatttgaacccaggctaaggttaagagctggtgctcttaactataagaggacagtagttaaaatagatatcttccctaatatgtgtgtaaatactgaagatttttttattaatacaaattgttttcttatctagactatttcactagccctctagttagtttccttgactctaattttgctctccttaaatccattttccacactgcatccagtgatctgcttaaatcttaaatggacttgtacaaaattaaggaaaacctactcagcacggcaaacaaggctatgattcatgcttaatgaccccagccttctggcctctccgatgtccttttctgctactcccaccctagactttatatgtcttaaagtctaatacaaactcagtacttgtagtgtccactacacactaaccatccccacttacactatgtattttaagaactatggatctttttgttcgcttttctgaaatgccccttgttcctggcattttcgtctcaattaagcatctttctggattaaattttattttctccaggaatcctcttctgaaacccttagaagtgaccctcctctactggtacttagccatcctttattgaaattacctgtttatgagccagtaacctttattaagctctttgagaagagggattctttctttctcttttacctacatcccgcacaacccagctccccctccgtctcccccacctccatgcacaattcctggcacgtgttaactgttcagtaaatgttgaacttttgaactttactggaaatcaagaaacactgagttttagcctcagttttgctcactatgtgattttagatattttattctctgtgcttatcgtgtgtatctatatacaacttaatcctaaagttccatcgtataaaaaattctacaactttttattttgctctgtatgtgacagtacctggtatttaaaaacaattctctacatcaacttaaaaaattaacatttgatgattataattaacttctaaaaaactgaaagatgaaacacatcaatgccttttctttcccccctgtactgctacctgaaaacatcggaatttgctgtggaacgaacaagatttcttctaagaaattaccccctaccaccatgactacataaaataaggtaattcccagcaagaatattatgcagatactaaaaagaaaacatgctaggcatggtggctcacgcctgtaatcccagcactttgggaggccgaggcgggtggatcgcctgaggtcgggagttcgagaccagcctggccaacatggtgaaaccccgtctctactaaaaatacaaaaattagctgggcatggtggcgcacgtctgtaatctcagctactcggaaggctgaggcaggagaatcgcttgaacccgggaggcggaggttgcaatgagccgagatagcgccactgcactccaactctagcttgagcaacaaagcgagactccgtctcaaaaaaaaaaaaaaaaaacaatgacacgagggaaatgcttacaatgctcaatgaaaaaatgaaaagaaaggttataaagttttaatatacgatttgatcttttgaaaataatggatatataacttaaacggaaatgtatcattaaatatagcaacagcgtcttccaaaaaatttcaaaatcgggcttaatgccaattacacgatcataatccaaaaacccttaactgaagcaaagacagtgatttgtaacatctgaactgtgtgaaaggggtgggggtgattcaaacaagtgtcatcaccttgtccaatgatgaaggagaacgtgtatcagttctgcattgtgaaattctcagtatgagagcgtgtagtggctaagaaaagcagtgggcgaattaggaaacaaagagaaaagccagcgacatcaccagttctggcctccttcccaccggaggaaaggggagaaggcgggtagtcatcaattccaggtccagcctaagttctgggtccccggccccagcgagagcctcgcctcgcctcgcgcgcctgcgcggagcgggctggcttcctgaacggccctcgcctcttcaccaccagggccgtccaccagaagtttctaaacgggtgagaggcgacaacgcagtgcagctgggttaaaggaaggaggctggtttatcctccgcacttacttggtactcgatctccagcgaggccttcaggggcatgggctggtagaagcactccttctggccggcgggaagggtaaaggtgaagtcgctatcgagggaaggtgtgaagccggccgccccaggcagcagcaccggaggcagagcggccagaaggagcacggggaagggcagccagatcttgtcgcccatccctgctggggcgatcccgggctgaaagaggcgtcaggtactgttgtctccgctccgcgtttcctctctggactcctcgtggttgacagggaaatctggagtctgaagaaactccaggtggcggccgcggcggcggcgaacactccctccgaaagagaagcgcagttctccaaagggtagggactctgggcggggctagcagtcctattccgcaaccgcctcagtctcggccccctcaggccaggcgtgagcgccgcccgcctctccccctgacggcctccggttcccatggcttcccccaccaatgggcatcatggcggtaattgtgggaaatgtagtcccgggcgggctccgctagtgggctcgggcgcgctcgccgaccacgatccccggcaagccccgcgcctccggcggcgcctcacgcagtctgcgccggggcggggcagtgaccgggtaggcgcgtcccaacggctcccgcggcggttcgaattctgtgctgccggggttcgctggttctccgagttgtgtccgaggcttccacgcgcaggggcccgggaaagggtcagaggcttcctaacgcagactcgagtgcgaagcgcgcagtcgccgggtgggtctctccccagcgacgatttgggtggtgagcgactgcgccttggcgtggggaaaccggcttacctgggggagttctgttcctttccctcccggcaccttggatgcgctgggactggtcctcgtggttgctgagcatgctgctctgaacggttgtattttatttgatgaaaaataggaggccgggcgcagtggcttacgcctgttacctcagcactttgggatgtcgaggcggaaggattgcttgagcccaggagttcgaggccagccttggcaatatggcgagccactgtctctataaaattaaaaaaaaaaaaaaaaagaggaaactgtcacttccgtcccccacccccgcccccgcttctttcagacggatgtaagattagctgtgtcaagcgatcttgagacaggagactactacataaagttatgacttctttccaaaatgaggaatctttttcgactacagcccattgtatcacatacatagggtataaaagaacacttgtccttcgtttgatgggtgtgcgtgtgcaaacctacaaacacattgttaattagggccgaaagatgatgttgttaaggtcggtgagtaggatgatgtgcttttctaggtatgcatagtcagtgaagatagccttttttgggtaactactgtaaattgaagttaaggacattcatttgacagtaaatggcccactaggaaaatgaaaacattttagtatcaaatatattcattgctactgcagaagagttagggagttctttcttttttttttgagaccgagtctcactctgtcgcccaggctggagtgcagtggcgcgatctcggctcactgcaacctccgcctcccaggttcaagcaattctctgcctcagcctcccgagtagctgagattacaggcgctcgccaccacccccggctaatttttttgtatttttagtagatacggggtttcaccatcttggccaggttggtctttaacttttgacctcgtgatccacccgccttgacctcccaaagtgctgggattaccggcgtgagccaccgcgcccggactgggagttatttcttgcatggcaatacacagatgttgaactaaaacctgatttaagatgaaatatatagtaccaaatggtattatagaatttgcccaattttctctacccttttctccttcaccatcctacagagagctagagatgttgaataggtaaagcaggatggggacctgatttattgacttgtctgcgagagtcttgtcacttaagcagaagcaaatttgtggaaacaaaaaagggaaagaggatagaaccagtttgtctattaagattacatagtatctcatttaatttcctgccactttctttccataaggtgggagttttctttttaatcttcctccctacatctgagaatttttgagtggggaataaatgtaacataccattctaactggatgagggaaggaaggacagtttagtattcgttaattcattcaaaatattgagcttctctaagtacattgcggtcctgaacgtaatgcacaggacttttaaccttttggaacttgggatgggatcagaatgctaagaagggcgttgaaggagatgctacagtgaaaaaggtaaatgggatctgaaagaggaatgtaattttaagattgcgcagaaagctctgtagtagtggagattataaagctttagttttttattgtattaattacaataataaaatgtgatgctttattgtgatttttatatgcaaagaaatttagtagtttcacaaccctagagatactcatccactgaagaaacaaaagcttttcttcatttctatgagttgacctgccaaatgttattttgatccctgtggttggtgacttgtaaatgtgtctttttaaaattttataactattgggcgtaggaggaggagacagcttttatctggtaataaattcccttctaacaaaatatgaatgtaatgataccatttaatcagatgtccagtacttgtaatgtaattatgaaagttcaaacacctcatattgaaattgatatgtaatatgtaataaagctacaatgcgacataatttaatggtctttgcatcctaatgacttggattcaaatcttgatttcaccatttacagtttgtgtgactttgagcaagttatttaatgtctgattcttagtttccttaacatgtaatgaaaataattaacaattgttaggaagatcaggtatgcttacaaaagagaactataataactagaccctggctaaaatgaaaaattcattcattgaaattgtattgaattcctttatggctttacactacagataaattcattattattgattttttgttttgttttaaaccaccatgaaagatttcacaacatttaaaatagaaaactaatgagttaaattctattcatgtgagtattttgactgaaactacagaatctttcagacaaggtacaagaaattcattttttttttaagaaatggaatctagttcatcagactactataataaagacaatgaagaggaaagtttgcttgcaaatgttgcttccttaagacatgaactgaagataacagaatggagtttgcagagtttaggggaagagttatccaggtaagtaagtaaaatcacatatagaattcactgtgccttaaatacatcaatgtaaaatgtgtggatttcattatgatgtattgtttctaacctgcctctggaataagaaataattttcttatactttttaatgtaactttcagtttagggaaaaataaggaatattagagaagcctctttgcatattaaaaacactttcagtgtattagaactcagtataaaatatatattttgggctttactaattttttatgatttttttgaatcttaagtaatcttagcgtagaggctttagaaatacagtttgctagtttaaaagtaattatgatttatttaaaatttagtggaaacattgccttatgttcataactgtgaatctgcttagcagcatttcaggttttctattttcttatttaatgtatagcaatttgtagtgaataaactatccaagaactgaaatatgttttttcttttttctctagtgttagtccaagtgaaaattctgattatgcccctaatccttcaaggtctgaaaagctaattttggatgttcagcctagccaccctggacttttgaattattcaccttatgaaaacgtctgtaaaatatctggtagcagcactgattttcaaaaaaagccaagagataaggttattgtttttagacctatctagttaaaagaagttttggttttaggcctgtctacttaaaaaaaattttttttaattttaaaattaaattaaagaaaaaaattttttctttaaataccttattcatggtttccataatcttttactatggtactcaagaatttaaatataattgttctttttatgttctaacaagaaagtagttatcttggtgtattactctacttttaaacttacatatttattacctttttgcagttaaatgtcttcttaagtaaattataatccccttgattttaacactacatcttatacataataggtaatcaattgtttattaagtagttaaggtatacccaccatttaaagcctggatcaagtactttggatagtatggcactgttctcttttcattatctattttgtcaatgatgttagagatctttgcttggtctgaaactctcttcctttttcttattctatcacatatttatctccctgcatttatccctcttcctcactcaactcttttatctccttttacactctcttcctattctttgttcccccgactccctacatgtatatacacagatatggttgcacataatctttttggatatgtatttgctctttccacttcggaaagccaaccattaagagctttcctttttgtaacgaatctgcttaatgaagctgtctgaatctactttttagaaacaaattcaaattccatgtttacatggtatgtaattctaagaaatttgatctctatcctcattcaaattgctgatcattcttattgtatatgtgccttaattgggaaaacaataatgataatgccgatcaaagacaaaaggctaatctagtgtgtaaagatctcctagaaattgagaacaaaaagatcagtaacccaatgggcaaaagacatgaacggaaaaagaaataaaagtgatatccaaactaatgaaaaggtgtccaatttcactcataataagataaattcaaagtgaaactatacctaagtaccttacctagttcttacctatagaattattaaacattcaaatgtttgaggtgttattttattggtgatattgggtacgggtacattgcctagtgggaatgcacagtgatataaccccaactgagatgcatttggcaatatttaccaaaattacaaatacatttaccttgacttggaactcccacttctggaaaaacgatactgtagacaccctgcaggatatgaaattaggcattgtttatcatatcaaaagattagaaatagttcaagtatccagtaatagggggttagttgaataaactaatggtttattcatacaatggaaactatgcagttgagaagaaaaaaggagtttgtcaatgtatttattatggagagattgccagtgtatattgttcaagtaaaaaaaaaatgcaaggtgcagaatgttatatttaatgtgctagtttttgcataaggagaggagggaagtgggtaatttatattgcttatgtatgcatgtggaattaccagaagactaaacaagaaacttataaaagtggttacccacctattaaagatgggaagagacttctgtgtatactttttcttttatatagtttcaagttttgaattgcataaataaatcactcaaaataaagttaattaaaagaaatgttttgaaaatcacaatcctcatgaaaattaaatgtattgtaaaatatatataaaaagaatataataaaaatatttatacagatgaaataatattttacctattatccattttgttggtggtggacatttgggttcttcctatttactatctctggacaatgtagctatgaatagttttatatctgcacgtgaaaaagtacaaaagtttttatcaggtttatgtctagggatgatattattggttcttagcatattcaactttgctggataataccagccagtttcccaaagtgcaccactgttttccaggttatacttgtatgtacttccaccagcagtggaagagagagtattgattgttccacatatccttgtcaatactcactaagtattttaactcattttctgagctgcttcgtcattttgttaataattgctcataattttccattaattacatgtaacccttaattgaaataattgaaaatatatttgttctttttcattctttcagatgttttcatcttctgcccctgtggatcaggagattaaaagccttcgagagaaactaaataaacttaggcaacagaatgcttgtttggtcacacagaatcattccttaatgactaaatttgaatctattcactttgaattaacacagtcaagagcaaaagtatgtatcttgaaataagtttgccaacagaaaatagttgttattttaagatttataattggaaaaatattccttgtattgccacattgccttaatgtgttatgggaagtaattttcattataatactatagtatcaacatgttgtaaaatcaatattgtatgaattatatctgaaaatgattgaagggaactttacagtttttgcatttagataagtcagcttcttaaggtgttaagattaccaatttgtgtggttttattttttatacaaaggaagtataacttacttatcttcccttttaaaataacacattgtcattgttgaaaattttaaaagtagcaaaaagaggaagaaagatcacccagagtttccacctagaaaccactttaccagtttaatacgtagttgaatccagactgttttaaatagttttggtgttttctgttttttactttatatatagtctgtgcattttctgatgcatttacatagcttttccattgaacattttttatggtagcattatatttcatgtgattatatcataatttagttaataattcctgtatttcagtggtttcctatttttttactaaatgattggtattacacaaaaaattagaagaaaccaaaatgtccagtaatggagacatagtaaattatggtatacccataagatagattgcaacaaaacctttttttaaaaaaatgaggcaaatatactagtactaagatgcaaagttgtttgacttgtatggagcattataaggtttaaatgatataatatatgtagtcacttaaaacagtgtctatgtgtagtcagcactcaaaaacaattacctaatatatttagtggcagaaaaacattacagagcagtacacacatgtataatactcttagttttcctctttataagaagtgtgcatgtgtctgtgtgtgtgtgtttgtatgtaaatatatatacatgtgatatattaaggttagaaactatgcttcacactgttgataatttcgagagagactggaaggttggagtgaggctttcactatttacttttataaacattgtatacatacattatatgtagttttaaatagaggagttatgggaagactttatttttcttttctgttttttcaaacaaaacaaaatgctattagggattatttcagcacaggaaaaacaaaatgcagcaatgaacataaaacttctttggtgtttgagattatttctagggtagacttacagaggcagaatgaccaaattttagggaaataatgtttttcaagcatttacatttggttcctcatcttttcttggtcactttgagggaaaaatgctgtttttcttgatttcttacaaaatgtaccttttcagtatttctttgccatttagatttctttgtgatttgtctgttcattttttctgcttatttttaaaatttttcttcaactgtagataatctctctttttaaagtcatgattgcttagtgatttaaagtaagaaaagagacataaagataatttaataactacgaactaatagcattttgaacctttctttttaggatataaacataccagtggttatgtgagaaagtaagatactagtattgtatttctcagctcagcattttcaaagttgttgaaatattttttagggaagccacctatttcaggccatgtatgagcttttgatgttacatatatgcccactattgagactgttttgcagaaatcaatcaatatattcataacttacgtctggcaatggttgtacttactcttctggagcctggcatcctgctctttctgagctttttgccctctacacctgctgtccaactgctaccctgggacttctctttggtgttgttctaggttggagctactgtttcctgaattctattttttgttatttcctagtttattctttctgtatttggagcatatcttccagttacttccttgcctgcctgaaaatgtcttaatttcttcttcactcgtgattaaattccagtttgaaaattatttaatgtcagaatttttagggcattactcccttctatcttccagtgccactttgaaaagtctgttgccattgtgaattactttttagcatgtaatctcttttttccccccatttgtttgtttttcactttatggtagatggtagttcttaggaccttcccattctggtgttttaaaactgcacaacaagttgtctttgaataggcctttattactcatattgggtatttgagagccctttcaggctggaaacttgtatcttttggttctggaaatttttctgtttcttaatttttatttttaatttttgtgggtacatagtaggcgtatatatttctggagtacattaggttttttgatacaatcatgcagcataataatcgcatcatggagaatggatatccatcccctcaggcatttatcgtttgtgttataaacaatccagttaaactcttagttatttttaaatgtacaattaagttattattgactatagtcaccctgttgtgctataaaatagtagttcttattcattctttctatttcttgtacccattaaccatccccacctctccccaccccaacaactgcccttcccggcctctggtaaccatccttttactctctgtgtccatgagttcaattgttttgatttttagatcccacaaataagtaagaacatgtgatatttgtctttctgtgcctgacttattttacttaacataatgatctttagttccatccatgttgttgcaaatgactgattcttattcttctttatggatgaatagtactccattgtgtaagtactacattttctttatccattcatctgtgatgaacacttaggttgcttctaaatcttggctattgaacagtgctgcaacaaacatggaagtgcagataccttttcaatatactgatttcctttcttttgggtatatgcccagcagtggaatttctggatcatatggtagctgtatttttagttttttgaggagcctccaaactgttctccatactggttgtactaatttccattcccaccaacagcgtatgaagattcccttttttccacattcatgcaaacatttgttattacctgtcttttgaatgtaagccttgtttttttgtttttttttgagacaaggtcttgctctgctgcccaggctgaagtgcaatggtgcaatcacagctcagtgcaaccttgacctcctgggcacaagtgatcctcccaccttaacctcccaagtagctgggactacaggcacgtgccaccatgcctggctagtttttgtattgtctttttgtagagatggagttttgccatgttgcccaggctgattttgaactcctggactcaagcgatccacccacctcccaaagtgctgggatgacaggattgagctaccgcgcctggccctgtgatttttatttaggaggtattctcaacattattttttgcacttctattaaatcttttattttggctgtcatacttttttcggtttctgaagtttttttttgttccgattgttttgtatttcataacatactaatgtagtattctctcttagcactctgaagatttaatgatttttttttcatgtttgctttactttcctttttcttttgtttaggcctctgacttttatgttagaagcttttgggccgggcacggcggctcacgcctgtaattccagaactttgggaatctgaggtgggcagatcacgaggttaagagatcgagaccatcctggccaacatggtgaaaccccgtctctactaaaaatacaaaaattagctgggcgtggtgatgtgtgcctgtagtcccaactactcgggaggctgaggcaggagaattgcttgaacccagaggcggaggttgcagtgagccgagatcgcgccactgcactccagcctggtgacagagtgagactccatctcaaaaaaaagaagattttttcaggtgttagtattttagctattcatatttaagagaaaggcatttaaatgcagattggtggtttgttgtccagtggactttatttctgggtgatggttagggaggtggttcttttgtagggaaacacctgccagcccccaaacagtatcagtatgagatgtttttctttccctttttttttttttaacataaactcaagattttattgtcttcataataaaacaaaagataacacttagaactgggtcacttggctctttctgctcttacctcctcccagttgagaaagcttgcatcttttaatactcagcattctcttagatctgcagttgggctcagtgcactcaagccttagcacaatcttctttgtagtttcagcctttttctggaaaatctacttagtctgcccaccataaccactctgcttcctgtcatatcgacactttccctgggcatacagagaatccttgcccttcttgtactgtgtcactttctagggttggtgcttgccacacttcttacagaaagtcctgcaggttttaggaatgttcaccatgtttgcgggagtgctatcagcaaggagatttttttttttttttggagcaattgagtttctccagcaaagaatcctttagtttctcacctgtgggataacccaaaatgaaattgagtagtaaggtggggctaaccgttttatattaattcccttgttacagctgtacttcattcctgctcattactcttagtgtctcacagtctcaagcttcttctgttcagtttcttctgataataaactttctgcctctttcctagtatgccaacaccttgctattggtgttctgggagtgggaaaaagaggatgactgttacttgcagatactttgaactgtatccctggtttttcattgggtcctcacttctgccctctacagtaccttgtgccttcatgttctaaacttctttttcagtgatagttatcttattgatactctcttctataccatttagattgtgggttcccaccctgctatagtagttgtactctctttattatacagattgtagggttattatgcttttctgtatttagattcttcctagtaagcatgtattctataattaggtttttaaatcataaaaattcaataaatattttcttttataattgtttatagtttgatattttatgtttaattttctaatttatgtaaaataaatcttgctagatgcttatcaatagagattctattttctcccctaaataactcttcagttataagttgaaggtaatgccaggagcttacatgccaaggctggcttataatgatgatatgcccatgtaaatgttgatcaaaggaatagatgggaagctttatatctgaccaatgatttgggagccctattgaacaccctcatctgacaggaaaaaaactaaggaccaagtaggttaatttattttctgaaagtactataaaagttgtttttatgttttaggtttctatgcttgagtctgctcaacagcaggcagccagtgtcccaatcttagaagaacagattataaatttggaagcagaggtttcagctcaagataaagttttgaggtaaatatactttttatagctctcaaagttttattttctacttatacattttattatatcttgttaaatcttgttccccacacccaataaatttacagtaacctaatggtgttcagctgtcttagaacttgttgaatctatttttagtcaatcataactcctcttggctgtaggttgcatgtagtatataggggctaaaaagactaaggtgagatgcctatttacatgcttttatcaaacatgaattagttcatttcttcacctacatagaagtatatactcagtgtttcaaagggagttcaagaaataaaatgtaaaggagtcagacacttttattatttttacagaaagggtctcactgcgtcacctaggctggagtgcagtggtacagtatggctcactgcagcctcagcctcctgggttcaagtgatcattctgcctcagcctcccaaggaggtgggactacaggcacgcacccactgtgcccagctaagctttttattttttattttgtagagacagggtctcactatgttggtcaggctggtctcaaactcctggcctcaagcagtcgtcctgcctcggcctcccaaagtgttgggattgcaggcatgagctgccatgccttgccatcaggcactttataatttattctcttctgctttgaataaaatgggaaatatatgcatattaaataacatattactctgagtgattccgaaagtatagttaaaggaccagcagtagtagcatcacctgggaacttgttagaaatgcaaattctcaggtcttatctctggcatactgaaccaagttgggaggggtttcacaagttctgcaaatgatgctgctgcacactgaagttgtcttttatgtccatcagagttttgtaattttctttgtaatacatatattattttaaatttgtaggtattttatatttttggcaattgtgaattgttcctactttgttcattgctagtgtatgggaaggttaccgacttttgtataatataattattttgtaattggtagctaatggtattatcagcaaataaaaaaaattttgtttctgagtcaaagagtaggaaaaagaaagaaagaaaaaaaattttgtctttccttttcagcatttatactacttattaccttttcatatttgctttttgcagtgggtagaactgtcagaaaagttgttggatgtgggggtgataacagtcatctttatttagtttctgaactatacaggaatgcttctggtatctgactataaaatacgatgtgagttattacttcagatatatttatcatctggtggaagtattcttttattctttaaaaaactcttaattaacaagtgatgaatatgcctttttctctatctctttttgtatattgtttctcttaactcattgatttaaacaaatataattcctaatattaaattattcttgcatacctgggataatctctttagtagtcttaaacaaagtatcctttattttatagagaggcagaaaataagctggaacagagccagaaaatggtaattgaaaaggaacagagtttgcaggagtccaaagaggaatgtataaaattaaaggtggacttacttgaacaaaccaaacaaggaaaaaggtatgtgtttttaaagcaaatacatgtttttgaaagggaataaaaggatatattacctatttaaaattctagttaatttttgaagtgaaaaaatttcagagatttggcaataaattaacttaatgttcttttttatctattaatttttttaaattttccattaaaatgtttatatgtggaatttatgttattagcatcctggattgggcttaatttctacaaaactgataacgattatcagtttaatgatacttatttctgaaattaagttctatggcctatttgaaaccagtacactgagtttaaaatactaacagggaaaaagcctgtaaattaatattacctctaataaaactaaataaaatgttgaatgaactctttaaaagaaaattttgcctcatagagaaagaaactcaatgcctgtgaatgtgtgcttggatcttcctttagaaatatataaatagtacaaaaatatctattttgtataaattatatcttgagatcaagtcttttaagtagctctgtccaaggaaccattaactctgaatgccagttcacttttaaactgataaagatttaaattttttgagtttaaactaataagattttataataaaataggattatagcagttgttatacagtataaagtcataatctgtactaagcaattttgcaattttgcaattttgcaatttgcaatattgcttagtagaaaatgcgtaggttttggagttagaaaatttttagattttacctctcattggctttgttaccttggccaaatgatataaccttttgaaatctcaggtttttttcatctgttaaataaagatgatattatcttgatatggatagaaatgaagagtaaatgaaaaaaagaaatgtacctcttaaaaaatactaacaatttaactattttataaactttgtggttaaatactctagaattcacacttcacttactcagataagctttgcacgtggttagttaaaatagtgagataataatacatgaagaccacattcacaatatagctgccaagaaaaaataaagaggaagagctactagtttcctctatgcaacttagataagagatgacttttaggatagagtattgactttgttgttgttgttgttgtttgagatggagtcttactctgtctcgcaggctggagtgcagtggtgtgatcttggctcactgcatcctccgccccctgggttcaagcagttcttctttctcagcttcctgagtagctgagattacaggcatgcactaccacacccagctaattattgtatttttagtagagactgggtttcaccatgatggtcaggctggtctcaaactcctgacctcaagtgatccaccctccttggcctcccaaagtgctggaattacaggcgtgagccactgcgcctggctaaatattgactttggcttcacaaagtgagtaagtgggggacagacacattctgggcagcatgtgcaaaggtatagaagtataaaagggtattattgctgaagaactcttaagtaattttatgttcttataagtaaataggtgtagtgggagatgagacaagaaagacaggctggatccagactgtaaatggctttgtgtgttataccaaaggatttgtattttaacctggaaagcataaatagccaattgagatttttaggtagaggtatgacatgaagactcttggagctttttgaagaactaaaatgaatattgactttctgctatggtttgaatgtgtccccccaattttttgtattggaaacttaatcccaacgcaacactgttgggaggtggggcattttagaggtacttaggtcacaagggctctgctttcgtgaatggattaatgccattataagagggcttgacagagggagtttgttccttttttcctttctgtcatgtcagaataaagtgttcctcctccttggaggatgtagcatttaaggcaccatcttggaagcagagagattaggccctaccaaactgccagtaccttgatcttggacttcccagcctccggaactgtgagaaatacatttctgttttttataaactacccagactatgatatttattctagcagcacaaatagactaagacacattctgagattgaaagatcagaaccttttcaaggactattgggtggagaagattaatcataatggattaaaaagccagtgtaaagaaagggagagattgtttagctttatgctgtttgtaagagattacctaaaacataaggacacagaaaaattgaaagcagactggatgcggaggctaacacctgtaatcctagcactttgtggggccgagataggtggatcacttgagctcatgagttcaggaccagcccgggcaacatggtgaaaccccatctctacaaaaaatataaaaattagcctggtgtggtggcacacgcctggagtcccagctactcaggaggttaaggtgaaagggattgcttgagcctaggaggcagagattacagtgagccaagattgtgccattgcactccagcctgagtgacagaggaagattgtgtctcaaaaaagagaaaaaaagaatggaaagaaatgtttcagataaatactcaccaaagcaaagttgatattactatattaggatcacacagaatagacttcagtgcaacaagcattaccaacattaaaatgactcatataatgtttaacacttaaccaagaagatataaagactctaaaccagcaagatataaagactctaaacttatatgtatctaataatttagtcccaaaatacataagaaaaataacacaatttcaaggagaaaagaacaaatctgtagtcatatggggaaaattctttatacatttatcaggaattgttaagtaacaaaaaattaaggcttgaagtgttgaataagacaattaatattcttgatctaatggatgtgtatatggaaccatgtagtcaacagtttgaaattgacattctttcaagcagatgtaatctgttacctcactatgctagaaagcatgaatttgaacaaattccaaaagattgatgtcgtatgtattatcttctgcaaccacagttcagttaagttagaatataactccttgaaatcctgtatgtttggaaatgtaaaaccaggcttactggtgttcattgacctactggtgttcattgaccattgaataaattagaaaacctttagaactgagtgatataaaaaatgcacatcactgcatgtaggctgtacctaaagacactcttagaggaaaaaatttaaccttatatacatgtattatatcatgactgaaaattaatgaactgaaatagactattgtgtggtcaggaaaaggaggacatcagaagaaagaatgaacatcaaaagaaaatagaagtaaggaaataataaagataaggatgaaatggatgaatagaaaacagtgaaacaatataaaggattaccaaaacctaaatgtggttattttcacaatgaacaagaaaatgggcatcagacaagattaataaaggagaaaaggcacaagtgttgggattggcaagggactcccaaattacagatttagctataaatcggtaagcaataagaaatatataagaaataaggccaataactgaatcattttaaagatgatacatttgaaaacttagactaaataaaattctcagcaaaataaaatttaacaaaactaactttaaaataaatgaaaaacctgaataaatatatgtgtgtgtgtgtgtacatatatatgtgtgtgtgtatatatatagctattagggttatcaaatcagtaattaaaaatctgcccacaaataactaaactagtcaaaacaatggtgacaaaaggaaaggaaacatcaggcccactacagcccatgatgactaaaatggaaaagactctcaaaaacaagttatggcaaggatgtggaattgaaactctcctgcatttcttttcttttctttttttttttttttttttttttttgagacagagtctcgctctgtcgcccaggctggagtgcagtggcgcgatctcggctcactgcaagctccacctcctgggttcatgccattctcttgcttcagcctctctagtagctgggactacaggcgcccaccaccatgcctggctaattttttgtatttttagtagagacggggtttctccatgttagccaggatgatctcaatctcctgacctcgtgatccgcccgccttggcctcccaaagtgctgggattacaggtgtgagccaccgcgcccggcccactctcctgcatttctaatggaagtgtaaattggtagaaccactttggaaaactgtttgtcagtagctgctaaaggtaaacataagcctgccttatgatccagcattcatttcaacaaaacttagtccctgtattaaaagacatgtacaagaatgttagagtaattttattcattgttaaatgttcatcaacagtgtaatctataaactgtggtatgttcacataattatacacatcagtaaaaaagagcaactacaactatgtaacaacatggattattatcacacatataatgctcagcagaagaagccagacacagtagaatactgtataattccatagcaaatcaaggataggcaaaattaacatatgttgttaaaagtccaaatggtgcttacctttttggggtaaagaatattcactgggaaggtacacaggggtgctggaagtgttctctatttgattgggttagtagttaagtaagtatacacattattataaacttctctcatttaggatttctgtactttactcaataaaaaattaaaatcaaataagaaaaactataagaaaaaatctacagaagatatgtatagtcttaatttttttttaaagaaatatggtattgctttgttacccaggctggagtgcaatgctgtggtcatggctcacagtagctcccaactactgggctcaagtgatcctcccacttcaggctcgcagatagttaggactacaggcttgccccaccacacccgactaatttttaaattttttttacacatgggtctcactgtgttgcccaggctggtcttgaactcctgggttcaagtggtcctcttgctttggcctcctaaagtgcaagtattataggcatgagccactgtgcctggctttaatgcatgttttaaaatgtatttggggtttgttttaatcaggtatggtaagatacagacacaggactgacatggagaaagaaatttttatacttacagatttctagaagtaggaggggcacaatatgctgttttgggatccttggggtgttgcttcacgagccagaaacctctgtggccagtggcacctttgcccgagttttactctggcccagtgggctcattctgcccactcagcctggcaggctgcgcttggctcgtgctaccaccctggatcccacacctgccaagggtgagctaggtgcagaatggcaaggggtgtgtgaacgaccatagggtccagccactatacatagccaggcatgccggctgtggtggtgtgagcagctccaggcgccagcacgggcgccagctccctgtgaggctgtggctggaccaggtatagcataagcagcttctgtggctgacaccagggaacggggtggtactggaagcttggagacaccaggaaccacagagccctaaagagggtgtcacagccctggctcgggaagctcataggtctgggctcccctgaagggctgtagctcttctctccttctcttgtcttttcttcttgttgcctgcaacgtagtgagcagggggcatgtttcagccatttgtgttacagcattttaagccccaccattcagtgggtcctgagttcttgtcctgcatccaggaagaatgaggtaagcaaacaagtggagggtgagcaagagaagctctgttgagcgacagaacagctcagaggagacccacagtgggtagctcctctgaatggctacccccacctcatttgcgttctggtacatgtggacacagtcaatgcagcagtacccgatgtcaattgccaccttcacagcttcagttacctggcccaagggggacttgcaggtgcccagccccagtatgagcatctaggtgctgttgttgagcatgaggtagctggccgtggctgctgcactttacagacccccacctggaactgtcttattttattttatttttttttagagatagggtcttgctctgtcacccaggctagaatgcagtgttgcgatcatggctcactgcagcctcaaacccctgcgttcaagggatcctcctgcctcagcctctagagtagctgggactacaggtgtgcaccaccatgcccagttaactttttgtagagacgatctcactacgtttcccaggctggtctctaacatctggcttcaagcaatcctcctggctcagccttctaaactgtttggaatacaggcgtgaaccaccacacccagcacataacaattttagagatgttaaaaatgtgaaaacatggtaagactataggagattatttaaaaaaaaaaaaaaagcgagaacaggctggacacagtgactcactccagtaatccaagcacttggggaggccaaagtgcgagtattacttgaggccaggaattcaagaccagcccgggcaaaatagcaagaccccacacacacaacaaaaagtgaaaacaatgtgtctcttagaatagatgaactgtgatatatactatttgtgggtgtaggttaacatgaatgtacaaaataaaaaacaccaaaatcaggatagggttacctctgttggaagaagtcaggggaatgggatttggaagggacacataaggacctcaactttatttgtaatattttgtttgtcttctgtagccttttcagacaaagagtgaagattcattaaaacgtgattgggagtacatggtaatatttatccagactttttgatgtggctgaaatatgtcattactttttacaaattggaagtgaggaagagtagataagtgtaaagcggataagtctggcttgaaaagaaggataatagaggaaagcacaatacgtgggaaggtttttgtttgtttaagtgagaaatacaggtatcctttgatctgaacagtacctgtgcacactcaggaattgattatattcctacagattttcagagaagtcctttgttgtccttactttcctttatctgaaactttggagtcaaatagacgtacttaaccacatagactcagaaagttaggagtacttttacttgaacttgtttatacttgtggcaaaataaccaacagagagaatgaaaatacagaagctagagtgtatttctgaagggttaagagttaagatctagactataaatagagtaattcaccctggataagaggagggtcactaacctcacttacattagaaagaatatgatgggaataggtttaaatattaaaatatttttaggtgtgagagtgatattgaccaaatattctcaatgtattgtgccccaaattttcatttcattgcaagaagcataaggaactaagagatgaggcaacaaggttcggcttaaagagtggttggtggtggttgtgttttttgttgtctagatttttatatctggtatcaatagaagttaccattttttgaaataactatttgaaatttatttgacctttgcaaaggtcacagaatttactgagtatatttaatattctagacaatagactgattctgtaatacctaacctttgaaaatgtatcatccagcctcaggctatttccctaatctgtcttttccagatagggaaaaaaaaaattgccaacacataagaatttatatatatttcgacatttatgtttattattgttttgtgttatattttatttttcatattgatagagtgagaaaatttttgtagtatgatctacattcttcattttatactttaagcctaatactcctttttagtgcagagaaatttgtttctctccaattattccttataattaaagattactttggaacttaactcttcaaatgcagagcattcttcacttttattcattatctctttttaaattttagagctgaacgacaaaggaatgaagcactatataatgccgaagagctgagtaaagctttccaacaatataaaaaaaaagtggctgaaaaactggaaaaggtaaaaggcagttgtgcaaattcagtgttttgtattactgtctatattccaacagtaaaggtaggaataattaaaatatgtttatggttgagacagagagtaatttttatgatcttacaaaatcatttaaataaacaatttgtaaatgttagttaaggatgatgttcaccaacccttttattatcaggagaaacttttttatccaaagagggaaaagagtagagagaggagaaggaacaaaatacagagaaggatggaatgtgttaacagagactggagctaaagaagtagaaaaaagaaattcatttttatcacttcaatgaaaatgaagatagattatgtagctttcaactggtctccctcagtctgctactctgagaggggcttgcttctgcctctcggaaggttccttgaactgatttgatatagaaataatagtgagtttattacattcatttattatattcatttagtatctttaagtaatatcacatggtaatgaaatgtgtatggaggaacaccacagttggatattcagatattgagctcaaaagagaggtctggtaaagagatactaatatgggagacttccatcttgagatagcaatgaaagcagaggaagtttatgattctgatccaagaaaggtagaaaggcagaggaaggaatgttcaggtagaagggtagagtaagaagatgggtgttcatttattaaacaatcatgaaattccttttacatgccaggtactgtgctagtctctgggagattcggtgatacataacacatgatacctatcctaaagagctcactgtctagtaagattgacaagtatgtaaacaaataatttcagtattttggaataagtataatatagaaataagaggtaggtgtggtagggtgggtgaaggtggcagtggttaataaactctggtgggcccaaagaaggcttcacagagtaggcaatgcttgagctgctaggctatctcaaagattgtgatatatctttgaacagtgttaaccagggaaaatgatcaaaatctatgttctaggaagctcaccctgatgtcatgtgaagatgcatttgagaggtgagagacaagtcaaggagactttaaaagacaaggcaagagatattgaagatgaaggagctgagtaggtagctatgagggatgttaaagttggggaatcagtgggatctagtgaccacttgaatgcattagaagcgggcagtatgagaaagaagaatataggatatttttaggttgctggtttgagtgactgctggatgattgcatcatgaatcaaaatagacagtttaagaaaaaaagttaatgagttctattttggaaatgtctgtagaatatccagttataggtaggcttttgtatctataggtctggatttagacatacaaatctgtactagggctgtagttttgagaattaacagtactgaattaaagtggtagaagccttggacattgacagagttcatatagaatgagaacaagatgaaagataccctgggagataaagaacaggtagattagcttttgaaagatatcgagaagtgatttaaaaaaattagagaatcaggaaagtataataagaaaagccaaggtgatagaacattttaaaaagaaggtggtgatcttcagtgccagatgttgcaaattggtcaagaagaatgaggactgaaccaggtgtggtggcttatgcctgtaattccagctactcagcaggctgaggtagaaggattgcttgaactcaggagttagaggctgcattaagccatgataatgccactgcactcaggcctgagtgaaagagcaagaccctgtctgtaaaaaatcagaaaaaaaaaatttagaaagatgaggaacaagacagggctattggtttttataatcagggagtcattggatactttgtagagagcaacttattaaagtagaaggcacaacctctgaaatgggagaaatggaaagggagggggtagaggtagctaacagacaattctttacatacggtaggtgaagaggaaataagtgtgtgtggtgggttgggagaggcagcgaatggaagggtagaaagaagctaagttaaggtgaagaagctgtggtaaagcacctaagggtatcctgaacatattagtagggggagattgaagatgctagaattataaggaataaaagatggcacaagggtctgaatgatatgcaagatgatagtccaagagcagaagtgagattcttttttttaatgaaataggacatttctttatgggaaaaaagtggataaaaacagaaaaaagttttaggtggaaggaaattgaacgattttgaattaaatgtctttggtctcataaattaagatgttgcttaagtgattttcatagcgtaaggaggataggagggattttggaaacttggggtgagtatttctcataatatatttgcaataaggaaagccaagaaatttgctaaacttttgagagaatatatggaaagaaaagagcagtcaggaatgatgagttaataaaaggaagcaaggaaaacaagagtggccagagtcaagtgtaatattatcatgacagctacatgataaaatattttagaggagaagttaccaacaatattaaatactgagatcaaggagaaagtctgcagttgattacaaagtggtcattcctttgcagtaaaactgtgagtatcacttggcagtgtaaaatattaaggtctcactaggtactgaaatcttttttttttaaattttattattattatactttaagttttagggtactgaaatcttaagtgtgaattagttaatcagaacgctgttttgagagctaaagagggtccttgtgggaatgaaatatcttagaagggatttttaataaggtgatcagtaaggggaggtagaagacctagtaggaggaatatgcttggggagaagaaggactttatggagaaggagagaagaatgtaagagacaggttttgtttttttacacttaggattatcaattgcaaacaatgctcagcaaagccctatagttaggtggatgtaacagggtaacaaaggaattggggcagatctacccaatcttctcctctcaacagtgtatcttgggtgcttttttctgttctacattttgggctgtggtttcgttggtaaattttgtggttcaaatttcaaaagtaacttctctggaatatttgcactgaaattaacctttagtaactcggacgcagcagctgtagatgaatttttgacttcagttgatgcaattgcctatctgttacaggttttctggacaggtagtagtgtctttttctctgtcctttgctactgcccaggaacttcactttgcttcttttcactacaaggctggggacttaaatgtatgaaattcttagtctactctcctgcttatttctgaaatcactactgacatttttagcttgaaacacctaaaacttacaaccacattagtatgtccacttaaattattgttttaggttcaagctgaagaagaaatattagagagaaatctaactaactgtgaaaaagaaaataaaaggctacaagaaaggtgtggtctatataaaagtgaacttgaaattctgaaagagaaattaaggtacagtattctgttgtagaaaaaggatttttgtgtggacatggaaaaaactgaaacactttaaaacacaatattttattgttgtaattataggcttacattatatagaaggataggcttcatgactgaaactgttttctagctatagagttagaattagaagtgaagtaaaatgtgttaatgctaataatatttgtaaatacggagacatactgatcaacatatttgctttgcatatatttagagaaaattaatagatataatgtccttgatgtataaccacattaactcactagtaaaatgtgtataatatccgatgttctaaaaaaaagtgtttttcaaatcataaaaaattacctagtccagacttctcattttataagtaaacagaagccccgagagtagccagaatttactgaaggtctgaaagatcgaagtcttctgactccaatgctctcttttagtacatcatgttgtcctctcaaaactaacaccatcaactttcagaggttaatattaaccagtctttatcacttcaaactgttaatttaaaaaaaagggggagcaggaagcaatcaatgactgatttgtctaattttgccatactttccttaaggtagtctgtttagtatttttgccaaggaggaggaagtaaagatactttttactagagtattttttagaatcggttatcgattgcaagatatacttttaagaaagaaagatgctgccaattacactatgatgcaatcctttatcacttaaaatttttatacttcatgaaagaattcttgtatttgtaattagatatgatttcttaagtcgttattttcatatttttcaaaaaagttattctcatatttcaaatataagtgaaataaattggttaagatatttttaaaacttcacatttggagtctaaccctctaaaatgtctaagtttttcctcacagtatctcccagtgtgccattaagacttgttgatgcagtatttcttaaaagaatccttgtaagaacagaaagtcattgatgctgggctcttaagctggttgtacaattatgtagagccagtttactttttctcctgttttaggaatccaaaactttgttgataatgtgaaatgctatgtcagggattttgaagttagatttcctgtcttatataattaaacagggagcagaaatgcttttaagacagtagggctgtccttccctaccatttactgtgagacactaggaaagttatataacctttttgtgcctcagttacctcatctgtaaataagaagtaataatagtgccaaccatataaagttgtgagtgcctggcatgcagaaagtaggtatttagtaaatgtgagcaggtattattttagaattaagcttcaaaaaattttaaaagtgagattaaataaatatgattaaaatgaatgcatatatattttattttcatttttattctcttttcttcataggcagttaaaagaagaaaataacaacggaaaagaaaaattaaggatcatggcagtgaaaacttcagaagtcatggcacaactaactgaatctagacaaagtattttgaagctagagagtgagttagagaacaaagacgaaatacttagagacaaattttctttaatgaatgaaaaccgagaattaaaggtccgtgttgcagcacagaatgagcgactagatttatgtcaacaagaaattgaaagttcaagggtagaactaagaagtttggaaaagattatatcccagttgccagtaagtatgtgtgattacgtaatggaaaagaagaattttactaaagtgttttagaaaagactatcattttgtggttgctttattagcttctaatttctttttctctatacttttagtcatgaatttctcttctgtctaaatctctattttttttcctgcacttaccattctacacttttccccagtttctcagatgccatatataagaatggcacagaattttttttaaacagctttgttgaagtatcatttatataccataaaatttgcctgttttaagtgtactaatctatgatttttagtaaatttataagttttgtaacaatcaccatgatccagctttgaaacatgtctgtcatccccaaaaggtattttggacccatttataattagtccctgtactcacttctacccctaggaagacactaatagtttttgcatctgtagatttgtcttttctggacatttcacataaatgaactcgtataatatgtgctcttttgcacctggtcttttgcattcttagagtcgttcatgttgtgatatcagtatttcatttctttttattgctaaatagtatttcattatatagatatgttatattttgtttatccattcactggctgatggacatttggattgtttccacttagggatattatgaataatgctgctatgaatgtttgcatacaagtctttggacatgttttcatttctcttgggtagatacctaggagtagaattcttgggtcatatggtgaatttattccaaactgttttccaaaatgtctacactattttacattctcaccagcaatgtatgagggttcctgtttctccacttccttgccaacacttgttcttgtctgtctcttttattataaccatcttagtgggtgtgaagtggtatcacattgtggtttttctttttttttgtttgtttttttttttgacggagtctctcactctgttgcccaggctggagtgcagcggcatgatctcagctcactgcaacctccacctcccaggttcaagcaattctcctgcctcagcctccctagtagctgggactacaggcacaagggacggggtttcaccacattggtcaaactggtctcgaactcctgacctcatgatcaacccaccttggcctcccaaagtgctgggattacaggcgtgagccaccatgcctggccctaatttacattttttttaatggctcatgatgagcaacttttcatgtacttattagaatggcatagaacttaaaattttttttctttttttgagatggagtctcgctttgtcgccaggctggagtgcagtggtgccatcttggctcatcgcaacctctgcctcccggattcaagcgattttcctgccttatcctcccaagcagctcaaactatagcacgcaccaccatgcccatctaatttttgtatttttagtagagacggggttacaccatgttggccaggatggtcttgatcttttgaattcgtgatccccctgccttggcctcccaaactgctgggattatgggcgtgagccaccatgcccggccttttatttttttgaaacgaagtttcactcttgttgcccaggctggagtgcaatggcgagatcttggcgcactgcaacctcagcctcctgggttcaagcgattctcctgcctcagcctcctgagtagctgggattacaggcatgtgccaccatgcccagctaattttgtatttttagtagagacagggtttctccatgttggtcaggctggtctcgaactcccaacctcaggtgatctgcctgccttagcctcccgaaatgctgggattacaggcatgagccaccacgcctggcctaaaatgtttttataataatggtctaccaccttttctcttttagtaatatttgtgaccatatatataaatgagattaagaagaaggtaagtaaacctattcaggaatttgtaatcaataggtgtaaaatgaaggaaagatcaggggaaactataggtaaatatattatggttggtttcagatatgaatgtatggtagactagatggtagacttaccaatgttaaactgttatgaactgtggaattatgaaccaaaaaaatctcagaaatcatctgattcaatactgttttattggtgaagaaacctagacccaagaaagtaaataacttgcccaactggtaagtagtagaatttaaactagaacataagatcttagctcctctgatatctgctttcccaggatgctgtttatttgcttggatttttaatgtactgtttgcttttgaaattagaaagtaatcatatacagataacaattttaatttggcattctcatttgtgtatcaagaattatttcatatatggtcaggcacagtggctcctgcttgtaatcccagcattttggcaggccaaggtgagaggaactcttgaagcaagagttcaagaccagcttgggtaatacagtgagaccctgtctctacaaaaatgcaaaaattagctgggcatggtggcgcatgcctgtggtcctagctactcgagaagctgaggtaggaggattgcttgagtccaagagttcgaggctgcagtgagctctatgatcataagctccagtctgggtgacagagtgagaccctgtctctaaaaaaagaatcatttgagatatgattccgaatgtggtaatgtatgcttgatcgtttgtttcttgtagtgctaagaatgacacgattagaaaatgtgatttttttctacttctaggaggtgtgattcggttatagtttgaaggtagaagtcattaaatgctaaccttgctcctttttataactgtcttttaaaattctgtattatccaaacatacagaaaggtgcatatgctagtgtagcaccttatttgtaaaatttgggacacatattgtcttatcaactctatgtttttttagaataaaattttacaggtaaatcttctttgtgtaccttgtcagatcccaattatcttcctctctcctcagaaatggcaattattctgaaattcatgtgtatccttctcgtccatgttttaaatattgtcacatatcgatgcatctagaaatatatatatgttgcttagtgtttttatgaaaatactgtttgccactataatttgtttttcactcaatattgttatgagatgtatccatactgatttatgtgactcaggtttatttcttttaactattgtagttttccaattatcttaatatttcttaatgtatttatatattctcctattgatggacattaagttgtttccattaaattcatacagtttttaaaatttgaagttctgaataaaaaagcaaatgcatctcatttacataagtttacatatgtttgtttttaaacttgcagttaaaaagagaattatttggctttaaatcatatctttctaaataccagatgagtagcttctcaaacaaggaagaccgttgcattggctgctgtgaggcaaataaattggtgatttcggaattgaggtacaattttcagattctgcagttatagcaaatagaatgttttttattggtaattaagacccttaattggccgggcatggtggctcatgcctgtaatcccaacactttgggaggctgaggcaggcggatcacgaggtcaggagttcgagaccagcctgaccaacatggtgaaacctcgtctctactaaaaatacaaaaattagccaggcatggtggtggcacgcgcctgtaatccccactacttgggaggctgaggcaggagaatcacttgaacccgggaggcggtggttgcagtgagctgagatagtgccactgcactccagcctgagcaacagagtgagactccattaaaaaaaaaaaaaaagacccttaattgaggaatttaaaaaatatacagaaaagctcagagaatattataacaggtatctgtgattccacaactaagaattgaatcttcttaaccaggattgattctccttaaaatttgtggtatttgttttaaatctgtttctccaaataaaaaataaaacattacaggatgaataatgccctttgatccttatgactagtcccatttttcccctaagtatccaccatcatgaattggatatatatttctctattcatttttgtatgtttacacacatgtacacaaatatgtaccgtatactgtgtgcaattttgctttttcactcagcagtatttaaaaaattcattcatattgagatagagtagattaacaaatggatttgtgtaattacttttaatagctgtataggattctgtcctataacagtgtcataatttatttgttcctttataggtatcttgtttctgttttctgttacaaacagtgctgcaaaggacatccttgtacatgttttcttatacatatatatgagagtttctgtagtatatattcctaacagtgaaattgctgggtcatacagtgtgtacattttcaattttactaaataccatcaagtttgtaaagtggctgaaccaatttataattctacagtggtatatgggagttttcatatcctgcctaaagagttgactaatattagaattctaattttttaaatcaacttgaaaggtgaaaaatagtacagtatgagtttttttatagaatctttctaataatttttcccttcttttcttttgtgccagaattaagcttgcaataaaagaggcagaaattcaaaagcttcatgcaaacctgactgcaaatcagttatctcagagtcttattacttgtaatgacagccaagaaagtagcaaattaagtagtttagaaacagaacctgtaaagctaggtggtcatcaagtaggtaagtatattgagttattttaataaattatattcagagttttggatgatagtttttttttaaaaaaacttttatttaaattttttttttaatttaagttcagggatacatgtgcagatttgttacataggtaagcttgtgtcatggaggtttgttttacagattatttcatcacccaggtattaagcctagtaccccttaattatttttcctgatctactccctccttccaccctccaccctctgatagaccccagtatgtgttgttcccctctatgtttccatgtgttctcagatgatagtttttaaagaacaaatttatcaactgtttggtttctattatcaaacatacttgataatctgttactagttgtggtctgataagacagcaaaagttatttcagaattattagactttgtatcattcgttaatgaagtaaaattgatatccaatagaacagtggtccccaacctttttggcaccagggactggttttgtggaagacattttttccatggaccagggacggggtcagggttggtttcaggatgattcaaacgcatgacatttattgtgcaatttatttatattattatcacattgatgttgaaataattatacaactcatcgtaatgtagaatcagtggtagccctgaccttgttttcctgcaactagaaggttccatctgggggtcatggcagacagtgacagatcatcaggcattagattctcataaggagtgagcagtctagatcctgcgcatgtgcagttcataatagggtttgtgttcctgtgggaatctaatgctgccgctaatctgacaggaggtagagctccagcagtaatgcgagcgattgggagtgggtgtaactacagatgaagctttgctcattcgcctgccactcacctcctactatgtggcccagttcctaatgggccatggactggtaccagtccgtggcccaggggttggggacccctgcagttaagatgcacccattttaatatacagtttgatacgttttgtcaggtgtttgtgttttaatgtttaactcttgttaccatcaccacagtcaagacataagacatctccaccaggatcctttgtactttttcccagttaacttttaggcttaattttctctctgtttttttttttccaaaaaaaccacaaaacttttcttaaagtttagattattgattttagacctcttttcttttctcatctaagtatttaaggatagaaacttccctttaagcggtgctttgggtgtattccactactttttttaatgtgttgtattttcattttcattcagttcaaaatagttatctcttgtgatttcctctttgactcataggctgtgtgtgttttatttccaaatatttggaggtttttccagatatttttgtgtcattcatgatgatcagagaacatactgtataggacttcatttttaagaatgttttgagatttggtttattgtccagcgtatgatctatcttggtgaatgttccaagttgagaatactagtaattagaggtggtaataaatataatatgttatagattcttttacatcaagaacagagccaataaaaagtaaatagcctagaaagtgaaatattatagatgtagagaatttatgagaaatggctactgatgcaaatcttgaaggcaaagtgtatcttgtttccacatctgtgtgttctcatgtaatcatctacattatgctttttaaaagcacttctgaaggcttacttaccttggagtgggagatgtgtatgtttatagtggagaaggggcatggtcaagtaactacctctgataaccctcagtaatttttttgagacaggatcttgccatgttgcccaggatggtcttgaattgggctcaagtgatcctcacacctcagcctgttgaatagctcagataacaggtgccactgtgcctggctaccctcagtaattttttttaaagcatcactgaattctcattagctagtttggagagaaagacgatggggtcgggaaggattcactctttggagcttttgaacctgcttctgtgtgcagtacataaaaatgttcttaatgatctcaaactgtccaaataaattttatgattaccttcagtttaaggaaacagggcaacttaaaaaaaatttttacaatgatttctattaaaaaatggaatttaaaaggtggagaaggattcttacatttctggtacaaaggaatagtcttagctacctagaaaaatgagtgattcagaacttttctcctctttgttacgtatttaatttagagagcacattacttattctttgatttccttaatgaatgtctcattctctgtcccttttagtactctttagatcagaaactaaactttgtttatgactaaatctttcaactatttaagtaggtttttattcttgaagtcctattcagaacaattttccttttatgtttattagcagaaagcgtaaaagatcaaaatcaacatactatgaacaagcaatatgaaaaagagaggcaaagacttgttactggaatagaagaactacgtactaagctgatacaaatagaagctgaaaattctgatttgaaggttaacatggctcacagaactagtcagtttcagctgattcaagaggagctgctagagaaagcttcaaactccagcaaactggaaagtgaagtaagcttggaattagcttggtatatatgttaatttttgaactagaacaaaaggtattattttagggttttataaaaattatatgtttacatccagatttaaagtttttaaaaaatggtaccacataagttataaattgttttaaaattatatttggaaacctttgtattttaacttattaaaagttaaagttattaaaagtaggaaaaactatagtgggtaaaagtctcaaatttggtggaaataatattgcattgcagcctattatttcttccatagtataagttaatatggttaatatacatttataaataaagactttggattatgctgttggaagaaaaggagtgataataaaggatttcaaattttagcaaaccccaaaccacctaggaagcctgtttaatatgcatatttctgggtcctgttccagcaatttctgattcagtatatatgggcacaagagtctgcttttttcttttctttttctttttttttttttttcttagagacagggtcttgctctgttgcccagtctggagtgtggtggtgtgatcatagctcactgtagctttgaacttctaggctcaagccattctcctgcctcagtcttccaagtatttgagactgcaggcatgtgtcactatgtccagctaagtttttttattttttatttgtagagacagtcgctgtgttgcccaggcttgcctcgaactcctggtttcaggtgatccccacctcagtatcccaaaatgctgggattactggtgtgagccaccacacctagccggaatctgtatttttattttttgtgtatttctgctgtttaaagagtctgtatttttaaacaactgcatgtaaacctgaaacaactacgcaaggaattacattctgaaaaggggataatgagtgttttgtgaatatcttgtcttcattttcactgaggacaggataagggtgcctcattaggtaattgtggaccaggaccacatgtgtatatcttatactcgatcttcaaaccagaggctgcagtcatctataggtacactttttaaatacctgctttctcagcttaaagtctatagccaaggctgaggaaaaagaactataagataggaacttatgttaataatgaagatggagatttagacagtttataactatggctaccagtttacttaggaaattgccaaatactgggattaataagttttttaaattacaaaaatagcacagtcttgttaatataaaaggggaaaaagaagaaaatgaaccattgataattctaccaccagaaataactgctgataacattttattgtacttatttcagtctttaacagctacgtaaaaatagattagggtattgtcctttttggatataggggtctgaattaaatgacttatgttttacatagatagaagaagtgatcctttgttttcagtatttgtttttcttcttaattgtcacttattttgtaaaatacttataattatgtgggttaaaaagttattcactttgcatcctaaatgtttataactgtaagtttgcccaatttacctagacacaatgtatttgaactttgaaagaggagcaggtgtttgatcttagaatgcaaaatcattacctttaaaaaataattttacatttatttcaatgtgttttcagatgacaaagaaatgttctcaacttttaactcttgagaaacagctggaagaaaagatagttgcttattcctctattgctgcaaaaaatgcagaactagaacaggagcttatggtaaaacttatctttgttcctacaaatttactgtgatttttaggcacttaatttgtgacagcacatttgttttagcatcattattataaaatatataggaaagtataaattctactaaactcttctgatcatttcttgtttatatttttaagttaataggcttatatggcaagttatccaagttttctctttttttttttttttttgagacagagtctcactccgtcgcccaggctggagtgcagtggtgtgatctcggctcactgcaagctctgcctcctgggttcacgccattctcctgcctcagcctcccgagtagctgggactacaggcgcccgccaccacgcctggctaattttttttgtattttcagtagagacaggtttcaccgtgttagccaggatggtctcatctcctgacctcgtgatccacccgcctcagccttccaaagtgttgggattacaggcgtgagccaccgcacccggccgttttctcatttttatcctaataggattgaagataatggtagttctttgatatgcttcttgatatttaaaatagtttaaatcttctcatcttgataaagtatttttagccattttgttaaagtttgaagtataaactactgtggttctttaaagaatggagtatgacatatttaatggttgactaatgtacttttatgtaaaactgcttttcaattatactttttttttgagacaaagtctcactctgtggttcaggctgcagtgcagtggcacaatcatggctcactacagccgtgtcctcccaggcttccccctgagcgtccccagaagctatgaccacaggcgcatgccaccacatctacttagctaattttttgtatttttcatagagacggggtcttgccgtgtttcccaggctggtcttgaactcctggattcaagcgatctgcctgccttggcctcccaaatcaattatactcctttaaagtgttttgtgtttctaggaaaagaatgaaaagataaggagtctagaaaccaatattaatacagagcatgagaaaatttgtttagcctttgaaaaagcaaagaaaattcacttggaacagcataaagaaatggaaaagcagattgaaagagtaagtaatacatatttagaatatgagtgctgaaaagaaacttaaacattactagccccagcattttttattttgtagacgaggacacaaagatacacaaaagttagtggcaagagctgtaattagaatcccaatctttctgaataatttttcagtgctttaacagaatatagtatgccttctgtttcagctgtaatcattatttttgacattattaaagtaagagtaattctgtagactccatttccctaaaaatatcagttgcttgaagattgattgagaggaaaaagcagaataagagaagcactcttgaccttgggttaaaagtagaaaagaaaatttgagaccaaaaatgcaagacacagtaaaaaaaaatagatacagtagtccctgcttatccatgggagagacattccaagaccttcagtgaatgcctgaaaccacagatagtactgaaccttatatattttttcctatacatacatacctattataaagcttaatttataaattagacacagtaagagattagcaagaattctaataaaatcgaccaattgtaacaaaatactgtcataaaagttatgtgaaaacttgttctcataaaagtgtgttctctctcttatgccctagtgcctcctttgcactttttttttttgagatagagtctcgctctgtcggccaggctggagtgcaatggtgtgatctcagctcactgcagtctccgccttctgggttcaagtgattctcctgcctcagcctcctgagtagctgggattacaggtgcgcgccaccaagcctggctaatttttgtatttttagtagagatggggtttcaccatgttggtcaggctgatgtcaaactcctgacctcgtgatctgcctggctcagcctcccaatgtgcctggctcacgcagaggtgtgagccactgcgcccagcctcctttgcacttttatgaatgtaggttctgtgagtcatctttgagaacagcctagtttcgctgcaattgaagtcttgctttggatggtatcttttctccttagcttcttcatctctgctggaaatgtgacagcagctgcttcatcagcagacacagcttctccaataattttaatatttttcagtctaaccctattattgaatctgtgtaatcatcccttatttgcagtaaatgacttggtgtcacttgtttcaggggatctttgctgaagtcttaatatatactcaatattttctggtgcaacacattgcagtcagttggaacatgttttctgttaatgccttccacctacaaatttaatgccttttctattttaactaagcacttacgcattgtggttgtaacttttgtagtttgaggtacaactgccatacttgcatgaatttatttttcttcacaatttcatggatagatttattctttattgtagatcttagcaacctcagcatgcagttttttttctttcctcattaagtcaagaaccttcaccttttcacttaaaggaagcatgctatgtcttctctttgacatatccaaattggatctgcatccagatagcatcactactcttttgctttggggccattattaagtaaaataagagttccttgaacacaagcactgtgataccatggcagttgatctgataaccaagatggctactaagtgactaacgagcaggtagcttatacagcatggaaaatggatcattcttgtccagagctggacatagtgggacgtcatgagatttcatcacgctgctcagaactgcaattcaaaacgtatgaattgtttattcgtggaattttccatttagtattttcagaccagggttgactgcaggtaactgaactgtggaaagtgaaaccacgaataccacagggctgctgtaatttagatgagcttaacagaagaatggagcagacaagaggaaaaagacagtgaacttgaatgtagattaatagatattattcagtctgagcaacagagaaaaaattttttttccaagaaaagaaagatttataaaaatattgaacaaagcctcagagatatatggggaaggacctggaagatctgatattcttgtcttcagagtcaaaggagagaatgagattagtgcaggaaaatatttgaaggaataatgtctgaaaacttcacaaatttgatgaaggaaataaatttacaaatttaaaaaaatcaaagagaactacttctagacacatcaaaatccttgccaaaaactaaaacaaaaaactttgaaagcacccagagataaatgacactgcatataagggaacaaatgttaaaattactgcagatttctcatcaaaaactatggacataagaagatggaacaacattttttaaatgctgaaagagaaaaaaactgtcattctattttatatccaacaaaaatactctctaggaatgaaggtaaaataaagacattcttagatgaaggaccgcatagagaatttgtcaccagcagacttgctctaaaagagaatgctaaagaaagttcctcatggaaaaaaaatacctgagagaaacttgggacctcaggaataaaggaagaacaacaaaaacagtaaatatttggtaaatataggatttttataatatctatggcagttgaaagaagaaattataacatttactgatgaggtatattgatataatacatgtgacaacgacagtgtaaagggggaggggtaaaggggtctatattcttagtttctacattttgcctttttttcttcagccgttaagttcaggggtacacgtacaggaggtgcagatttgtcacataggtaaatgtgtgccatggtggtttgctgcacagatcatcccatcacttaggtattgagcccagcatccattagctattcttcctgatgctccctctctcccatcccactcccctataggcctcagtatgtgttgttcctccccatgtcttcgtgtgttctcatcattcagctcccacttataagtgagtacgtgcagtatttggttttctgttcctgtgttagtttgctgaggataatggcttccaactccatccgtgtccctgtaaaggaaacgatcttgttcctttttatggctgcatagtattccatagtatgtatgtaccacattttctttatccagtctatcactgatgggcatttaggttgattccatgtcttttctattgtgaatagtgctgcaatgaacatacacatgcatgtatttttataatagaatgacttacattcctttgggtatatacccagtaatgggattgctgggtcaaattgtgtttctgcctctaggtctttgaggaaatgccacactgccttccacaatggttgaactaatttacactcccatcagcaatgtaaaagtgttccttttctctgcaacctctccagcatctgtttgttttttgactttttaataattgccattctgactggcatgagatggtatctcattgtggtttcgatttgcatttcttgagcgatcagcaatgttgagctttttttttgtatgtttgttgtccacatatatgtcttcttttgagaagtgtctgttcatgcaagtgatttcatttcttccttaaaaagagagaagctgaagacaatttggcaaaatacaaaaatctatgtaatttcaattatagtttcacatgtatttaatatttaaaatgtttcaaaattttaaaatatttaatatgaaaattctgttttcatgtttagcttgaagctcaactagagaaaaaggaccaacaatttaaagaacaagaaaagactatgtccatgttgcaacaagatataatatgcaaacaacatcatcttgaatcactagatagactcttgacggaaagcaaaggggtaaaatcatccttataaaagtgctatttagaagttgactaatattttatgtctctataacttgcctttaaatctaatcaaatctgcatacttatacttttcttactgtttttaggaaatgaaaaaggaaaatatgaagaaagatgaagctttaaaagcattacagaaccaagtatctgaagaaacaatcaaggctagtatgctaatactttatttttctttctttccttttttttttttttaacagacagaatctctctcatttgcctaggctggagtgcagtggcatgatgataactcactgcaaccttgaactcctgagctcaagtaatcctcccacatgagcctcctgagcagctaggacaagcgtgcttcaacatgcctggctaattatttttttctatttggagacattcttgtggcttttttacttttctctgtaaattgtaaacattgtacagataaaaggcaattcagagctgacgatttgatctgactcaatgaacttagttcctttaaatgtattttctttagagcgaattatgatcttaattatttgatagttaatcatctagtttgcaggttatctagcctctttttgtcttaaaacagtttttataaccctaaaaattgttttaaattttagctataattgctacttattaacattaccaaaaaaaaagaaaattaccagaggaagtggaggaagagaaaactaaaagtgattcaattttgcttgtttttatcagttggcttgtaagattaattgagataaagccagaatttctagctaaaatacggctttctggctagtatatcttcatggttaaaaacatgggctttgttgttaaattgggtttcagtgtggcttcaagtgcttacccactcactgtaaccttagccaggttatttaactctttgaactttaatttcttcatccacaaaataggaatgacaataccctagaagagcattagtgtgagaattaaatgaaacagggtatataaagtgcttagcacatactgagttgcccgaagttttgtaactaactgctatatatttagtattttctcttgcatttttagtgttaaacgtaggtccaaatatgctatgacgtttattctgtcatatgtagcttgaatataaaagatttgctttaaagatacgatgttattttttccctattctgtttttaattcattttgtgactgtgtatgcccatgtagacatgtgtttattcataaatattcctgtagtattcaccaaaactcttaacatttaatgcaatgtcagttcatttccctgtgtaagaatagccccaaatttcattaatattaaaaaatgattactgtacagagattgtaggcatgaaatacttttattagataaaactcatgcagccacttaactcctggttttcattaaactacctaacgtaactgggcagtcatctggtgaggtatttccgtgtgttaatagccagatatgagatggaaaagaaatcagcaaaagaatgaattatgatgttggattttattcctttaacatctttagcaggtttgctgtttggggaaaaatcaaaatgagtaagaaatatagaagccaaattcctatgatttaagctatattgactgattctacacataagttatttatagcagcaaaatagaagcctgaagtctacttctctcctgattatgtcattactaccttcctttcatgacttttgttcatgtctctcaacatgcctcaacttgttctctgcaaaagaaatatgaatttttttatctataggaaagttataagggtcagtttaaagttgtatcactaagctaaaaggttgatgataaaattctgaactggtaacaagaaatcagtaaattaaaccagttgttacctgctgttaaatggaaaattgaaaaggtgcttattagacttacagattttatttcttttgttttgttttcctcttattttctactttagattccccaaaacccccacaaaaaagtcttaaacataaaagaagagtttaccttctttttttgaagatgcatagcctagggccctatctggttgtctccagattgtgcacctgaggagcttctttggttcagcagagtggtgtttgtttttgttttgatttcatttatttatacacacacacacacacacacacacatttgcaagtggtttgtatacaatgcaagatgtttatctgtatgagattcagactttcaaactctgttcaaataagaaattcaatagagtagcggatgttttgggtttttaattagttttttattagctataattgatttatttctaatttattttttaaaatttcaagcccacaaaaaattgaaaaaatagtctactcctcacctagattcactctctgttaaactctattaaactctaggtacactcactttatctctctctacacatacacatgcatgcatgcttgtgtgtgtccctaccaacccacctcccttttgccaaaccgcctgagagaaggtacggatgtcataatactttacccctttaatacttaacatgcatctcctgtgaacagagaatttcttctgtatggccacaccaccactacactacagagaaagtcaacattaagttagtaatatcattcaacattgtccgtactaaaatttccccaattacttaaaattgtcctttatagccttgctactcaaagcatggtctgtgaactagcagcatcagcatcacctggaagctttgaagagtatctagccatgccccagacctgattcaccccagtgaatcaagtgtgatgacacaaaatttaaggagacactctcaggattatataccttatttaatttgatgactgccagatctcattattttaagggcatacattttcattgataattagcaaactaactttggggtgagtctttgaggccatgtgaatatcctgttcctcaataaccttataatcaatggctttcatatctaatgatgaatcttgcccaaatgagttattacactgttaactattaggtagtgatattctgacagaatcataggttttatttattttctctgtgtgaaggatgatacaagtcccaatgcccattctctttcataaaaaagaaaatttctaagtatttataattttcataaaacaaatgttaattagtcattcagaattacagattttttagctgttaatgatttcatatacagactataagggtggtgttcaaaaactgtgtatcttataagattccctttttagaaataagagtggcaaagataatttcatgatgtagaatagaatctgcaagagagaatgtttttctcgttttttcatctgctaagaaatctaagatttctttcactttttcaagactgcttactagaacattattagcattaagaggaagaacaccattgagaagctcaaatttacaataaagaaaacaaggagcaagacaagaatcttaatagatgagatgtggagcatgtatgcaatatgtgcgccttgaacgaaaagtaccaaatttgagttgctctttggtattaaggtagtaaagcagtggcaactatatgaacacttggaccaagttaaattgctgcctttctgaaaatattttcactgtttcaaagcaaagaaggtttcacttctttttttctagctgacaaattattttcttagtaacttcagcatttcaaaatattctcacttaaggccaggcaaggtggctcacacctgtaatcccagcactttgggaggccaaggcgggtggatcacctgaggtcaggagtttaagaccagtctggccaacatggcaaaacccactctctactaaaaatacaaaaatcagcaagacatggtggtgcatacctgtaatcccagctactcaggaggcggaggcaggagaattgcttgaacctgggaggtagaggttgcagtgacccgagatcgcaccactgcactacagcctgggctacacagcaagactttgtctcaaaaaaaaaaaaaaaatctcacttaagcatcattaacagtatgctagtttgtactcactttcctatttttcttattcaaggaggcttaagaagtaggtttaaataccacttaccttttaaagaaaagtttttagagtgtttggcctacaggttcttgacagttggccctagtttatcttgtcaattgtggctcccaaataaccatttcctacaaattcatcttcttactaccctaggcttttgccaacttctcaccactccctttcgcagggccttgcttctgagcatactcccttttcctggaatgcccttctaaacttgtccaactcttgtttattcttcaggattccataccttggttttctctttggtttcctcatttgcaatgaagaattagtttactcaataaatatcttctataatggcattttatatcctaagtaggactgtatattcactatttgaagcagtcaggtaacattaggagataaatctgtaaaatattgagtatatcgttttgtgttttttttttttttttgctttttttcctgcttaggttaggcaactagattcagcattggaaatttgtaaggaagaacttgtcttgcatttgaatcaattggaaggaaataaggaaaagtttgaaaaacagttaaagaagaaatctgaagaggtaaattaacatttactttatatatagcatatatttcaagtgattttttttaagaagcatgagatgtaggacaaaatatatatatatatatatttcttttgagacagcgtctccccatgttgcccaggctggagtacagtgtcgcaatcttggctcacttgaacctctgcctcctgggttcaagcaattcttgtgcctcagcctcctgtgtagctaggattacaggtatgcactaccatgcctggctaatttttgtatttttagtaaagatgggatttcaccatgttggccaggctggccttgaactcctggcctcaagtgatccacccacctcggcctcccaaagtgctgggattacaggtgtgagccactgtgcctggccaaaataatatcttttatgtatctgatataaaaaagtatttccaataaaatgtaaattccaattttattttctttaaagagcaaacatttcaatgcaaaatagaatataccttaaaattctaattcttttatttttagggaatcagaagaataaattattaatattacagtcattctaatataatattacatgacaccttgaacattgttttagatttagaggtttaaaattcttcaagaatttttcattttgtttttgttcttgttgtctgtaggattgagaattaactttagaatttcaacttttttaagataagtttctcagatactgcattggaaaccttttttttttttttttttttttgagatggagtcttgctctgtcgcccaggctcggctcactgcaacctccacctcctgggttcaagcaattttcttgcctcagccccctgagtagctgggactataggcgcatgctgccacgcccggctaattttttgtatttttttttttttagtagagacggggtttcaccatgttgcccaggctggtcacaaactcctgaactcaggcaatcctgccaccttggcctcccaaagtgttgggattacaggcataagccactgcacccagacttggaaacttttcttgaacatcttactcatctctgtatgctcaatttgtagcactttactttggttaggcactcactaaacatttgctcaaatggataatcgtaatgaagaatgtatttgttagaatttataatgtatatattttaaggttaaaatttatttttagaaatcgttcccaatgaatcttcatcaaggttgacttttggccactcattgttgctcacgcctataagcccagcacttggggaggccaaagtgggtggatcacttgaggccgggagttcaagaccagcctgggcaacatggggcaaaaccccatctctacaaaaaaattaaaaacattagccaggtatggtggtgcatacccgtggtcccagctactcaggaagctgagatgggaggatcacttgagcctaggaggtcgaggctgcagtgagctgtgatcacgccactgcactccagcctgggcagcacagcgagaccctatctcaaaaaaaaaaaaaaatatatatatatatatatatatatttatttatatttacatattagtcaagatcgatttgactatatcagaaaggtccaatgagaaaaacagaagcctttatatcttttaaatagagcaaatttatacagagaattagatacacaggtgatgaaagggtagagaagccaaacagtataccacagtgactcagagattattataagcagggacccgctaccattgttaaggttagaggaacatcaggaaaagatggtgtgatcatagtctagaagcagggctgcctatctggagctggggccaaagaaaaaaggtctgtccaataggaactggggcaatagaggaggagcactgcagctactggccattcccattggccaaacctatttgtaatctagagggcaaaggaggccaagaaatgcagtttcctgcaatacacagagcagaacaggggaaagccataggtaaatctaagagtaaataatgtagttgaccagcactccagacttaggtgcatcaagtaattatatagccttagaagtttaaaaaaaaaaaaaaaaacttcagatttaatacggtcatgtcttcttctgtctaccttcccttatgaaggtttttatagcatctttgacaggcatatatttttctactccaatacatagaaactaaatcatctaaactgtatgtacttggatttttaaaaataggaatgtcctttttttttttttactatgatcatctttaaagtagtatacaaaatacattattttggcatttattctactgcccatacccacactccgcttcataataaatagacttggcagagatggaatctacctggaggtaggcagcatttgtaacaggagaatctgttgagctttagactttgcattcatagaaacaacatcagagactagggtggataacagatatttacacacaaaataaatagaacgattttttttttctttttttgagacagggtcttgctttgtcacccaggctggagtgcagtggtgcaatctcggctcactacaacctctgcctcccaggttcaagcaattctcctgcctcagccttcccagcagctgggattacaggcatgtgccaccacacctggctcatttagaatgatttttacaactggaaatacatacctaggctcaaactgaattagaaaccagaagtggtaatcaggtatatttgaccagactagggagtaagtaaattagaaagatttgcaagctcatttattgccgctcaatcgttagctcaactgcacatgcattggcttgcttacttaaaaggtcatctgtcacatgttcatgtgtattgataaaaaacgtggagaagaatccaagtactaactgttgacttatttgcctttacagcaaattatgtcttacagagaaaattctttctaatgttggttaatataattaacaccttgtaacagcagagttgtgaagttttcatcatatatagctacattttagaaaatctgatttgagtaatagtgcatccattccgttaataataggtgatattataaagatgttcttatcttttaaatcagggaatatgccccaatcatataactcactgaataattaagtggccctagggcatataggtagaaatttagccagttgtaaaaactacatgttgattacccgttgcaaaaagctaatatatgttcctctgagcttttgcctcagccacatattcttttccggatgttgaaataaatatatttatgatgaaaataatactttggggttctgaatttttggaagatatttaatttcatattaaaatgtttttaacaatgcttttaaaataataaagttatgtgttcatgcaaaattacattgtcaacatgataaaagaaactcaatacaaagtagatgcgactaagcctaaatgttttctgcataaagattttattcaataaaatcagtcgtttcattgataaatatcttcatttaaatggatggacttagattttgagaagctggcatcatatttctgcattatattttatttttaagcaacaattatgagactttctgctttgggtacatagtgatactagataaagttaagtgtaaggtagattttatcatctaaattctactttcttatttacttcaattataaaatattaagtactctgggaatataataatacattagtagaaaatatgatgtaaaaacaatttgttctatatttacttttaaactaaagccaactggccaggcacggtggctcatgcctgtaatcccaacactttgggaggctgaggcaggcagatcacaaggtcaggagatctaacacggtgaaaccccatctctattaaaattaaaaaaaaaaaaattagccgggcgtggtggtgggcgcctgtagtcccagctacttgggaggctgaggcaggagaatggcgtgaacctgggaggcggagcttgcagtgagccgagatcgcatcactgcactccagcctgggtggcaaaggaagactccatctcaaaaaaaaaaacaaaaaactaaagccgactggagttaaaggtcagtacaatgaaatgtcagtgtaagtttgatagatatatgttctattttgtaaatatttgtgataactaattttagctatttcaatatatgtaattgaaatgtcagtgactagattactgaaataaaattttgttattatgtggtaaggctttgtgttttggttagatcttatttttttcttctgttttgtcttattttaatattttgtccatttttttctctgaataggtaagtatgaaacaggatgttccaataaagaaaaaaagagtatttaaacctgtcttgcaggcaagtcagttctatctaaaataaaccagtgcagaagtgtgatctgcaggtttggtcaggagctaagagagaaaacaaaacaggtgatactgacacatatttacactaaattattttcatgcagacagaattaaacaaaacatatttgcatgaaaagggattataattcaggattagagatcagttagttgcctgtgatatccagggttacttcgagtatacaacatcatcatataattaagaaatctgaaatctcagagcttctcataatgagcaaagaatatttggccctgaaggccttaatgttcacctgctggatagttagaaaaaagaagcaagtcgtgattctcttccgctatttactataaggagtttaaatttccttttggaatgatatttactggaaagattctttgctttaaaggaatggctttattttccttcacttaaaaaatttattatataagcaacaacaagaaaacttctaaagaacatttacctacagcccattctctaatacttcagttttcatttttctgtttgcatgtatatttttcaaaattatattaatgaaatgtgattttttaactttataaatttttatgttagctgtctttttaattattttaaatggttgcacattttaaatcacattgacaatcatcacttattaaatcttccattcactttggtaggagatgaagaatattataaaatatattttaaattatgtttcattgttgatagtattttaaaaataatttctgctggcatatttttagaatttggattactaggacaaagggaatttatttttcttcttaataggtgctcttggataaaagtatcttaaagcaattttggagaccatcatattcaagtcctaaatatatagagtaattagtgaaatttcttagttgttattgtcattcctttatgtgtttttttgtagcataaatattcagcagtgctttgctgggatattattatataaacaacagcaataatagcaacaataacaataaatagcaccaaacatcatatagtgcttttatggctctagtttattattagaaagggtgaaagaatcaggtgaagtgcagataaaaccatggctgcctatgctgttccctccttctgggagaggtcagacagaacatgctcctttttatagcagtaaaatgtggcaatatctgtttctgcctagggaagcctatttatgactcaaagttcagggtttttattgggggcttgtcacacaggaacaatgaccagcctacaagtatcaaaaattccagaattctaaaggaaggcatgtttcagtgccccagccaggcaaaacaacctcatcacttaggaacatttttaaagccacatttccagacaccaaccaagagcaatcctataagcaagcccttccagtacatctccccattagaaaaatgaatactgtccttccaatgacaaactatagacatgaatgcaattgtcccacatgacaagtggatggttatctaataaggaggacagctttgacattttattgccatttatttgaaacattgcattgtattgagagatatatatatatatttgccaggtatattgtttacagaaagagctaaagataaaaaatcacagtcttcaagagacttctgagcaaaacgttattctacagcatactcttcagcaacagcagcaaatgttacaacaagagacaattagaaatggagagctagaagatactcaaactaaacttgaaaaacaggtatatattattagcccaagattgttttatttgtatgaaatagaaatttttaaaatcatgaatagatttttcgttagttttttaaattgctgtttggccagatgccgtggctcgtgcccataattccagcactttgggaggctgaggcaggcggatcacctgaggtcaggagttcgagacgagcctggccaacatggccaaacctcgtctctactaaaaatacaaaacttagccaggcattgtggcacatgcctgtaaccccagctactgaggaggctgagacacaagaattgcttgaacccaagaggtggaggttgcagtgagctgcaatcgtgcccttgcactccagcctgggcgacagagtgagactccgcctaaaaaaaaaaaaattgctgttaaacctcaaggattttgcattataagaaatactctatactgatattgtaaaataaagttctattcctatgtaatctgacctccatctcttataccatgattatatgtttgctgttccatacaatttataattcatgtttctttattcaatctctcttcttgtacctaatctgaatacctataatttttcctttttggatcaggacatggtatgtgatattccttaaagaaatggcaaagcagtgcactaaaagaaaaatcccaagggaaaatacccctgaaagttctaaaattaaaaattattacttacttgaatgtaagaattctagagaattttatactagaatctaatctttttcctttaattcattactgaatttatctgaattctttagatattttacattcttattttgttttttctttgaaaagaaatcaaatttacagtaatgtgtaaattagaaaatgatcgtcccctgtaatcttactgtattttccttttttgtcattttttcggtcttttatctacttgttctgaagtcctcctcagcctgtccagtggaactaaagtatcttcctctcactacatttaaacacatcaggcaggtattctgtattttttttttgagacggagtttcactcgtcacccaggctggagtgcaatggcgcgatctcggctcactgcaacctccgcctcccgggttcaagcgattctcccacctcagcgacctgagtagctgggattacaggcatgtgccaccacacccagctaattttgtatttttagtagagacagggtttctccatgttggtcaggctcgtctcaaactcccttctctggtgatccacccacttgggcctcccaaagtgctgggattacaggcgtgagccactgctcctggcctctattttttttcaagagacatcttcctgtgactctccatcccttttgttaaaatttagacctactgcttgctatgcctactatacagcttcatcctgaagcatttcttcttctcatctatgtttgattcccactgcctacatcctttgtcattgactctggttcttgcaggattgattatgattcttgttcctaactcacttctataatggttgtatggttttttctgttttgttttgtttttttttaacaagttcacttttttttcttttttttctctttttgagacgtagtctcactgtgtcgccaggctggagtgcagtggtgcgatcttggctcactgcaacctctgtctcccaggttcaagtgattctcctgcctcagcctcccgagtagctgggactacaggtgcgcaccaccacatccagctaatttttgtttttttagtagaggcggggtttcaccatgttggccaggatggtcttgatctcttgatcttgtgattcgcccacctcagcctcccaaagtgctgggattacaggcgtgagccactgcgcctggcctcatttgtattttttatttggtgattttctttgtgatcttgttttaaaagattttgtgttctcattagcttcactgaggtctacagaagtttatatctaaaaatttcttcagtatttggagtaaatttttgacttggtattccttttctgcctttcattcatattacactgtgcataggttccattttgcatcttcagatttctctatttaattaagaattgagtaggtggattttccttggttcctttccctttttacctgggtactgttttaattttcttcttgaaacttgaggtggaggggtggatattaatggggttttcttgttttgttttgttttgagaccgggtcttactttgtcacccaggctggagtgcagtgacatgatcatggctcagtgcagcctcaacttccctgggctcaggtgattttcccacttctgccttccaagtgcataccaccatgcccagctaagagtgtgtgtgtgtgtgtgtgtgtgtgtgtgtgtgtgtgtggcttttctttttttttcttttttttttttttggtagagacagagtttcaccatgttgcccaggctggtctcgaactcttgggcttaagaaatccaccctccttggcctcccaaagtgctgggattataggtgtgaaccaccgcacctggcaagatattaatggtttatgatctatatttagttcttcagtgagggattttagaagaacgggggatatgcaggtcagagttgagaggttaactttgagaccacagtcatataaatattcatgaagacatggagtgactgaaattacctagggagagaatatagaatgagaagcaagaagattgacttggacagatccctgagggatgtgatacatggaagccaaagtaagtatttcattaaggaaggaatgaatgttgctgtcatgggctactggaatcagtgtcaagtaaaatgaaggttgggaaatgtccattggaattagcaacttggaagtcactggtgttgtaatccctgtttctgtggaatggcctctggctatgggttgaagaatgagaagtgagacagtgatacaacatgcatagaaaactttgagaagttgggctatatatgggaggaaataaagggtagtaggtagagggaggtcaaggtctgaagaaaagctttttacagtgggaaagtcttttaacatgtttaaatgctaatattaaaaaaacagtagagagactgaagatattggaaagaggagatagtagtatgaagttcctgaaaaaatgaataggaattgaatccacaacacctatgaagcagtttgatttatataaaggaggaagaatacctcctttattgtagtagaatagaggaagaatgaataggaacagattcaagttaagatgggagcaaatgcaaattagcatttgaggtcatgtggaaatctaggaatctattgagtgagccaattcgtgaagaaaagaaaggagcagtatggtaagagaagaaagggcatttcaaatggggacaatgaaaaggggaatatttactatcattttgttcaattattttaacactttagtgttatgatgtggccacttccctaaatagtaatatgtatgtgaagtatctttattattagaaagtaagccttgctttttatattttccaaacattacttcttggtctatatgttgatttttatgatacatcttgaaactgataagctaggttacatatttataaaagtatttttcttctgaatttaaaatgtttactgaaaactgctttacaaggtgtcaaaactggaacaagaacttcaaaaacaaagggaaagttcagctgaaaagttgagaaaaatggaggagaaatgtgaatcagctgcacatgaagcagatttgaaaaggcaaaaagtgattgagcttactggcactgccaggtaaaatgtgaatatgttttatttaccttcccacttcaatatcagtggtatctgagttttgaaatcagataatgttcagtggagcatttgcttgaggaattaatgtctccatagtctgtgttcctattgcattttgtttgtatttccttcatatctctcattatgcttttttctgtattacagtttaatgcttttaaccttcctactataagtttcttaaggcaaggatcatacctggtttattttagggtcttacacaacaactggcacagttccttatacctcataggcactcagcaactgttaattgtgaataacattaaaagttgtaggcaaaaatgtaaatgtactcacatagaggaaactttcaggcaatccaattatataggggaagaatgacaatataaaagtggttctcagccttgagtgaatattaaaatcacctcaagagcttgtaaaaaaacatactgatgactgggtcccacttttagattaaataaaacctaaagattctgatttaatttggctaggctggtcccaggcatcgatacttaattggtcaagaaaggaacccatgagctgaaagcagtacccagcctcttcagatctcttctactttgttgggaagaattgacataatttataacataatcagcccacccttctaccaacaggagtcaagagtgaacttaggcactggcactaaaaccacatgtccccaggttccctctcctccattgacaggggtcctttgtgctcagaggagcaacttgcttcctcagatgtctgtcaccctctcagcagggttgagggcttcccaagtttaagactaagaccaaagtatttcacaccttctttcttccattgacagatgttctactcactaacatggcctcaccactggtgtccaccttgagtctgtgaagactgactgcattatcactttatccttgtttatgccagataccacaagaaaccctagatttccaggtcagctctcatatctcacactaattcccaaaaaactctccacacattctgtttctttctccaaccccatcccaacttctgaaagacttctactgtgccttttgaacttcataatccattctctgtattcactactttttcttttctcttgctgtaatagaaacctggccctcccctaaggacattgcttcttcccctgtagccttctaaagtaaaaaacttttccccatagctcttgtaccacagggtccaggcaaggtgtgaagtatatactatacttggtgaacctcatgccatcagaacccttactggtgctgatttctttagacggcctgacttactgttgccctctccagcatcacttctgtcattcttcttggggatttcagtacacctctgaagctgatccttctgacaccttggcttctcatttttaacaatttctgtactctagtgatcctgatctttaacatacctcagccacttactcccatggaatttatcttgtgctgaaaatttaaatcaaaaccaaataacattttttggtagaaattttctaaaatgtatattttcttggggtttttactttctctgggtatctcagggttatcattatatacatcatgctaaaatgtagtgatactctaatgaaactttgaggcatatacagttctgttttttataaaatgtctgtaggctgctaatgctttttgagtccttgtatattttctataattttcccctaactcctttgctgacaagccatctgctcatggctctatgccaatctcttttgattattcttttctaattatctgttttatatctactttaatattagagctaattggtcaagctaaaaattatttacttgggattttagaaatgtaaaagtgtcattagcactcatctaatctagtacttaattggtctatggacatatttgaggatctggtaaaaagctttagcttgtcttctatacatagatgtatacatgtacattatacatgtataattttgcatactgtttcaggggttttatagttttccttaagtttactcatggacttccaattaaaaaactcttgaacaaatccaaatttgttgaagttttatctagaaaagaaatgctcctacttgcaaactcaatttagaaatttcaaagatcaaacaacagaaagtgttgacacaaaggaacatgaactcttcctaccattgagggtaacattaacaattgtttaattagtaaatatcactttagaattaccaacaaagggacttaaaactggctcttagtatgttgatttgtctgtaggggagctgccgtattagaataagttcaggactgacaaagttagtaaacctggccctatcactattaacagctaattgtattatctcagacaactcacctagtcttcagtttcctcctctgtaaagcagggaagttgcactagtctaggaatctctagttccttttaaagctaaaaaaaggatagaaccaataataaaactgagtaaaagcaattgacttggctctccagtgagtaatatggtttttatggtgaataatttgattgtttggcttatttattttctttgttgctaataacaaaaattcctagatgaatgaggtccttggatattttcaatacatgcaaagctaaagttaaatgtggttagagtgaaaagaatgctaggcttgttaaatattaccaggtagtagtagtaaagttgtatttagtggtatgtaatgtgtaaaggaatagtttttagttggagaatttttaaaaataggtgatttaaaattccaactagatattttgctgatatttgtccttatataacttgcaggcttttttttagtcagagacaagttagttggttaagtttctaaattacctgttttattatttgtttttaattaggcaagtaaagattgagatggatcagtacaaagaagagctgtctaaaatggaaaaggaaataatgcacctaaaacgagatggagaaaataaagcaatgcacctctctcaattagatatgatcttagatcagacaaagacagagctagaaaagaaaacaaatgctggtaagcaagtggttagatgagtatagctgcctatgtatttgtacttaacgaagtgaaataatgtgagaatttgagatggtggggctggaagggaaaataagtggtattttgcctctcgtagatgaatataattgaatattcttaatatatacaaagtttgtaataaatggtttacatatagttataaaattattctctcctcttaatagtaaaggagttagaaaagttacagcacagtactgaaactgaactaacagaagccttgcaaaaacgggaagtacttgagactgaactacaaaatgctcatggagaattaaaaagtactttaagacaactccaggaattgagagatgtactacagaaggctcaattatcattagaggaaaaatacactactataaaggatctcacagctgaacttaggtgagttaaataataagaaattatatcacagttataagtccttggataatacaataaaatatgttgttgcattctagacgtctaaatttctcaactgtctttggctcactttggctcatcccagccagcctatcccatgccttatctaactaattcagctgtctttgttggccgccaaaactttcatcctcagtctttagaccattttatactagccctagtggtaaaaaatcattgggcatgcatacagcagtggctaacagcaggaggatattaataatgataatattgttctttgtattaagtccttattttatgctaggactacgccagggacttcacatatgatctcactcatttccttacaacacacctattagaaacatatatcacctttttaatagttgagaaacctgaggccttgagaaaaataaaatgccccaagtcatacaggtagtagagtctagagaagggagttaaacacaagtctgtccaactctaaagtctgggatcttagattagcagtataacataaactgttatgctgacacacatgtatagtgagtggaggtgtacagccagattagagccaaagtatgagaaataggttcagaaaaggaaaatagaattacaaattaggatgtaaaatgtgaaataaaagaacaggataaagagcagcaagataacccagaaacttagatactgtaccacagaattcagtgtagggcctccttctcttctgtatccacaaactcatccttagtaaatttcatgtagctttaaatactatgtgtcagacacttccaaacccatttctccagtattgaccttttcctgtaactccagattcaatatccaactagttgttacctccattcggatatttttaagaggcatctcagacttagccaaaataggactcatattttctcataaccctacccttctcctaactcagtatcatgcagttgctcaaaccacaaatatataagatttttcttgttctctctttccatcccttttttcatccagtgtattagcaagccatgtcaactttatttccaaaacatatatatatattttttttcagacagattcttgcccaggttggagtgcagtggcatgatctcagctcactgcagcctccacctcctgttcaagcaattctcctgcctcagccaccaagtaactgggattacaggcacctgccaccacgcctggctaatttttgtattgttaatagaggcggggtttcaccatgttggccagactggtcttgaactcctgacctcaggtgatccatccacctgggcctcccaaggtgctgagattacagacatgagccactgcacccagccccaaaacacattcttaaatccattgatttcgtggcctcttttctgttatccttagcacaaagcatcatctcttacctggtctgttgctgtggcttcctagctgggctctctgcttacaatcttgaccccctcccaacaatccattttccaaaaatagatttaagtttattatttaaaacataaattagaccaggcgcggtggctcacgcctgtaatcccaacactttgggaggccgagacaagcagatcacaaggtcaggagtttgaaaccagcctggccaatatggtgaaaccccatctctactaaaaatgcaaaaatcagccaggtgtggtggcaggtgtgtgtagtcttagctactcaggaggctgaggcaggagaattgtttgaacctgggaggtggaggttgcaatgagccaagaatgagccatgatccattccagcctgagtgacagagtgagactccatctcaaaaaaaaaaaaaaaaaaaaaaaatagatcatattgcttacctacttaaaccttctaatggctttctaaaaccttcagaataaaatccaaactccttcacaaatgaaaataaaaactacattgatatatcacttcataccaaggatggtcatttttaaaaaccaaaaaatggaaaagaacaagtgttagcaagtgtagaaaaaaaatgaaaccctcattcattgctggaggggatctaaaatggtgcagccactgtagaaaacactttagccttcctcagtaagttgaacgtagaattaccatatgactcagtaattccactcctagttttgtactcaaaagggttgaaaacagatatctaagcaaaaattgtatacaaatgtttacaaagtaagccaaaaagtgaaaacaccccaaatgttcatcatcagatgaatggataaacaaaatatagtgtcttagtccgttttcatgctgctgataaagacatacctgagactgggcaattcaccaaagaaagaagtttaatggactcacagttccacgtggctggggaggcctcacaatcatggtggaaggtgaaagacacatctcatatggtggcagacaagagaagagagcttgcgcagggaaactccgctttataaaaccatcagatctcttgagactgattcactctcatgagaacagcatgggaaagacctgcccccatgattcagttacctcccactgggtctctctcacaacacatgggaattcaagatgagatttggatggggtcacagccaaactgtatcattctgccccggcccctcccaaatctcatgtcctcacatttcaaaacaaattgtgccttcccaacagtctctcaaagtcttaattcatttgagcagtaactcaaaagtccacagtccaaagtctcatctgagacaaggcaaatcccttctgcctatcagcctgtaaaatcaaaagcaagttagttacttcctagatacagtgggggtacagacattgggtaaatacacccattccaaatggtagaaattggccaaaacaaaggggctacaggccccatgcaagtctgaaattcagcagggcagttaaatcttaaagctccaaaatgatctattttgactccatgtctcacatccaggtcacactgatgcaagaggtgggtttccttggtcttggcagctccacccctgtgactttgtaggctatagcctttctcctggctgcttccaccggctggcattgagtatctgtggcttttccaggctcatggtgcaagctgtcagtgcatctgttattctggggttctggaggatggtggccctccctcttctcacagctctaccaggcagcgccccagtggggactctgtatgggggtgcccaccccacatttcccttccacactttcctagcagaggttctccatgaagccctgcctcagcagcaaacttctgcctgcagaaccaggcctttccatatatcctctgaaatctaggtggaggttcccaaacctcaattcttgacttctgtgtactcacagattcaacattgggtagaagctgccaaggcatggggcttgcaccctctgaagccacggcctgtgctctatgttgtcctttttccgccacagctacagtgactgggatgcagggcaccaagtccctaggctgcacacagcgtggtgaccctggatcccacccatgaaaccattttttcctcctaggcctccaggcctgtgatgggagaggctgctccagagacctctgacatgccctggagacattttccccattgtcttggggattaacatttggcttctcattacttatgcaaatttctgcagccagcttgaatttctcctcagaaaatgggattttcttttctatcacactcaagtcacctctggagtgctttgttgcttagaaatttcttccaccagatacgctaaatcatctctccgaagttcaaaattccacaaatctctagggcaggggcaaaatgccaccagtctctttgctaaaacttaagagtcacctttgctccagttcccaacaagttcctcatttctctccaagaccacctcattctggactttattgtccatattgctatcagaattttggtcaaagccattgaacaagtctctaggaagttccaaattttcccacattttcctgtattcttctgagccctccaaactgttccaaccctacctgttacccagttccaaagtcgcttccacatttttgggtatctacagtagtgccccactttactggtaccaatttactgtattagtgagttttcacgctgttgataaagacatacctgagactgcacaatttacaaaagaaagaggtttaatggactcacagttccacgtggctggggaggcctcacaatcatggtggaaggtgaaaggcacatctcactggtagcagacaagagaacttgtgcagggaacctcccatttttaaaaccatcagatctcatgagacttattcactgtcacaagaatagccaaggagagacctgcccccatgattcaattacctcccactgggtttctcctaaacatgtagaattcaagatcagatttgggtgggaacacagccaaaccatatcatatagtgtatccatacaaagaatattattcagtcataaaaacgaatgaactactgatacatggtacaaagtgcatgaactttgaaaacattatgctaagtgaaagccagacacatgatgcataattccatttatatgaaatattcagaattggcaaattcatagagaaagaaagattagtggttgccagggactaggggaagggaaaatggaaaataagtgctaatgagtaggaagttctttgtgggggactgatggaaaaatactggacatagatagtggtgatggttacataacattatgaatatacttaatgcttctgaactgtgcactttaaaatggttaaaatggtaaattttatattatatgaattttaccacagttaaaaaaatccaagttccttatcttgaatacaaagccttatgtggtctggttcctgtccttgttcctgacatttttcttatactttacacttaccaagttttcttctaccatggaaccttggccatagctgtttctttttactggaataacagttacatggtcagcttcttcttgtccttcacattacttcagagagaagccttctctgactacccactctaaagtagccacccagtcactacctcatcatgcagttaatgctctaacatagcatttaatattatatttttcttacttaggtgtctgtcttttcttctggacctattacaatgtaaactcagatcagagacatttatcttttttactattaaatccacagcacttagaaccctggcatataggaaacatccagtaaatatttgcaaaataaataagtgaatgaaaacatgaaagatgtaaacagtgaaatcttaagttctagctaacagatgaattgtggaagctccgctatttgcatagatagaagttagagttttctttaatttcatactatttttagaatattagttttagccttgtgttatatacctcttgagacttttagaagaatattaaaaacaactcattaaagaagttcaaaatcttcttttaaaaattagtacccttatcagtactatttcatatttcagactggaaaatcatatgaagattttcaagatcaacattttcaacctttgtcttatcagaacttagagtttcaaattattctctgatcacaggcttcactttggtaaaagccttaaaattgtgtcagtattaagcattttataatataaggttatacataaattagggtttaagagggcttagaatttgtaatatttttatattagatttaagtgcttttttatatgtaaggcatcgttttgagtaacatcctcatgagaaatactatggttaaatgcctcattcaattgtaatgaagtcacaattgttacatgtaaaagactttgaaacactcctttgatctgtgtatgaaaaaatgtggatatgtatttttaaaaattcttataatcattcaatcttggagtcctgggagtgttttagcaattagcttaaattatctgtaataccacagtgtgagttaacttttacccttttagaataccctttattaaattaattgtattgatgtcaatctttttctttatctattattccttaaatttgaccctttcaatctgacttgattgcatatattattttgcttttaatttatagaagaggtaacctggttgacctaactttttaaaattatactcttctactatctgctttgatctttttcctttgataaattgtagagaatgcaagatggagattgaagacaaaaagcaggagctccttgaaatggatcaggcacttaaagagagaaattgggaactaaagcaaagagcagctcaggttgatttttcttgattatattttaatggagttttctgttatgacacagtcacacaggatttgagaggtcaccaattttttgtaaaatgggcatttttatagcatatcttttctctgcacatagggtttactaaattagagatatgtcatctctctttatcttgatatttttctagcaagtagattttgaaaatgaggattagcttagtatctgagccttttgatctcttatattagcccgtatcagaagaagctaagtgttggaggaacaaaaatatttggaaggcgttatttagcactttttgtccagcataaaatgaagtctgaattatttgtcatttatgaacacaactatattttattgtttctataatgtatatgggattgaatgtcactatgtattgttaaaaaaaatgcatatggggctcatgagccagtattagtaaacaatgattatttttcccatttaaaaaataatttgagtttatactaaagcaaagagcattagtatattagctatactaatgagtttatacttgttatacttgctataaacaattacaaagcctattctaagcatacaagtttttatatcagaataaaattgaacaacagtttaaggttattttttaggttacacatttggatatgactattcgtgagcacagaggagaaatggaacaaaaaataattaaattagaaggtactctggagaaatcagaattggaacttaaagaatgtaacaaacaggtaaattattttaaaattacgtattttaaattattttttaaaaaattcaaactgtaactaaaaacaccccttcaaatagtgggtgttttttgttattgttgttttgttttttgttttttttggagacagagtcgttctctgtcacccaggctggagagcagtgacacgtgatcatacctcactgcagcctcgagttcctgggctcaagcaatcctcctgcctcggtctccccaaagctttgggattacaggcgtgagcgaccacactctgtggatctttcacttctttgattaaatttcttcctagatactttatttttttgtagctgctttaaataggattgccttcttgatttctttttcacattgattgcttttagtgtatagaaatgctactgatttttgtatgttaattttgtatcttgcaacttgactgaatttatcagttcttttttagtttttgtttttgtttgtgttttgagacaagatctcaccctgtcatctgggctggagtgcagtgtcatgatcatagctcactgccgcctcaacatcccaagctcaggtgatccctccacctcaagtctctgaagtagctgggactacaggcgtgcaccaccatgattggctaattttttaattttttgtagagatggggttttgccatgttgcctaggtaggtctcaaactcctgggctcaagcgatcttcccccctcagcttcccaaagtgctgggattacaggcatgagacaccacgccagccctgtttatcagttctaatagttttttggtggagttttcaggtttttccaaatacaagattatatcctctgcaaacaaggataatttaacttctctctttccaatttggatgccctttctttctcttgtctagttgctctagtcaggactcccagtattatactgaataatagtggtgaaagtgggcatacttgtcttgttctatatcttagtggaaagactttgagtttttccctattcctatgatattaactatgggtttgttgtaaatgatctttactgtgttattttccttctttttttttttttttttttttttgagatggagtcttgctctgtcacccgggctagagtgcagtggcttgatctcagctcactgcaacctccgcctcccgggttcaagcaattctctgcctcagcctccccagtagctgggattacaggtgcccaccaccacgctcagctaatttttgtatttttagtagagacggcgtttcaccatcttggccaggctggtcttgaactcctgacctcatgacttcacacacctcagcctcccaaagtgctgggattacaggcgtgagccactgcgcccagcctgttattttccttctatacccaatttgttgagagcttttataatgtaaagatgttgaattttatctgatgcttttcaataatgcttttaattttaatatgaaattattatatggtttttgtccttgattctgttgatgtaatgtatcatgtttaatgatttgtgtatgttgaaccatcttggcatccctgggatgaattccacttggttatggtgaatgatcttttaaaaatgtctttgaattcagttgatagtattttgttgtggattctgcctctgtgttcatcagggatattggcctgttgttttctgtttctgttatgtccttgtccggttttggtatcagggtaatgctggccttgtagaatgagtttagaagtgggccaggcacggtggtgcgtgcctgtaatcccagcactttgggaggtcgaggtgggcagattgcctgagctcagttcaagaccagcctagacaacctggagaaaccccatctctatagaaagtagaaaaattagccaggtgtagtggcatgtgcctgtagtcccagctattaaggaggctgaggtggaaggattgcttgagcctgggaagtagaggctgcattgagccatgagtgcacaactgcaccccagcctgggcgacagagtgaaaccctgtctcaaaaaaaaaaaaaaaaaaaaaatgttccctcctcttcaattttttgaaatagtttgagtagaattggtattagtttttctttaaatgtttggtagaattcagcagtgaatgtatcaggtcctgggcttttctttgatgggcgactttttattactgcttttatctcattacttgttattgttctattcaagttttctgtttcttcatggttcaatctcagtaggttgtgtgggtccaggaatttatccatttcttctagtttttccaatttgttggtatgtagttgttcataacagtctgtagtgatcctttgtatttctgtggtatgagttgtaatgtttcctttttcatctcattttatttatttggattctctctcttcttagtcatctaaaggtatttgttaattttgttcatcttttcaagaaattaactctttgtttcatttatcctctgtattgttttatagtctcaatttcatttatttttgctctgatctttattactgctttccttctaataatattgggtttggctgttgctattccagtgtgggaaaggcagttcaagaccaacttgaacttaccttttgtagagacagggtcccactatgttgctcaggctcacattcttatcagcacatggaattatccagaatacataaatgtattatgtattatccagaatatataatatgttaggccacaaaataagtctcatcaaatttttaaaggtagaaatcctatcaaatatattctcaatgcaattctaaaagcatcattttcagtaatatgtccaataatattttcaataatgcttttaacatgcacctttaggtgcattgtttgtttgaaatttttgtatttttttgatgtaagcaattattgctataaactttcctcttggtactgcattcacagtagcccgtaggttttgttatgttgtatatccatttttatttgtttcaagacattaaaattttttttaaaatttcttcactcaccctttgttcattcaggtgcatttgtttacattttatgtatttatataatttctaaagttcctcttattattgatttctatttttattccatagtggttagataatatatttgataggatttctacctttaaaatttgatgagacttattttgtggcctaacatatttatgtattctggataatattccatgtgcagataagaatgtgagcctgggcaacatagtgggaccctgtctctacaaaaagtgaaaaaaaattagccaggtgtgatgatgagcacttgtactcccagctacttgggaggctgaggcgggaggatcacttgaacccaggaggtcgaggctgcagtgagctatgattgtgccactgcactccagcctgggcatcagagtgagaccctgtcaaaaaaaaaaaaaaaaaaagaaaagagagaaaaaaaagaatatgtattcagtaacagtgggtgaaatgttctgtaaatgtcagtcacaaaatgcctccttggcctagtttgtagttgaactctgatgtttctttgttgatttttttaatctggacaatctgttcattactgagagtggggtattgaagtccctgtcgttttattgcaaccacctatttgtcccttgagatctattaatgtttgctttatatactcgggagctttatatgcctgggtgcatagatatttataatttttatatcctcttgctagcgtgacacatttatcattaaatactggccttctttgtctctttctactgtctttgatctgtagtctgttttgtctaagtatagctatttctgctatacttttgatttccatttgaatggaacatctttttacattattttactttcagtctatgtgtgtctttatgaagtgaatttcttttaggaagcatatagttggatttgttttttaatccattcacccactctatgtgttttaaatggaaaatttagtccagttacattcaatgttattattaataggtaaggatctgtgcctttctgttacttgtttcttagttgttttgtaactcctccctttctttcccacttactgtctttcattgtggttaaatgattttttctggtagtatgattaattggttgctgtttatttttagtgtatctctcacaggtttttgctttgtggtgagacttatagaaaacatcctattgttataacaagctatcaaaaactgatatcaactgtgatagcaaaaacaaaaaaaagtaaaaacttgtatactttaatctccttctccttccacattttgaatttttggtgttccaattaaattgttatattgcctatctctgaataaattgttgtaattattatttttaataattttgccttttagtcttactaaagatataagtggtttacacaccatgatttcagtgttggtgtaacagtcacattagtggcggtttttcttttaagtttgaagtattccctttagcatttcttgtaggacaggtctagtagcgacaaatttcctcagcttttctttgggaaagtgtctcttcttcatttctgaaggataactctgcttggcacggtattcatgattgacaggttttttttgttcaacactgagtatgtcatcttactccctcctggtctgtaaatttctgctgaggtgtctgctaccaggcatactggatcttccttatatattatttgcttcttttctctcactgctttcaggatcctgtgtttgtctttgatctttgagagtttcattataatatgtcttagggtgttattatttgggtttaatctggttagcgatctttgacctctttatacctgcatacttatatctttcctcaggtttggaaatttttcttttgtttctttaaaaaagctttctacccctttgtctttctcagttccctttttaactccaataattcaaagatttgctcttttgatgttgtcccaaagatcccataagctttgtttattcctttttattccttttttcctcctctcactgtgtagtctatttatctatctatctgtctgtctatctatctatctatctatctatcaaactaattaactaactaacatggggtctttgttacccagaggtggagtgcagtggcacaatcatagctcaatgtagccttgaccacctgggctcaaagaatcctcccacttccgcattgtgagtagctgggattacaggtgcatgccgccacacctggctaattaaaaaaaaatttattttaagtgatggagtttcactatgtgactcagtctggtctcaaactcctgggctcaagtgatcctctcagcctactgagtatctgggattacaggtgtgagccaccatcctcagttctgattatatattttcaaatagtccatcttcaagctcactgattctatttgacccattctgctgttgatgctctttatttcatttttcacttcatttattgtatttttcagctccaaaatttttgtttgattttttaaaaattattttattctctgttaagtttttttgataaatttctcaattgattccctgcgtcgtcttagagtttgttgaacttccttaaaatacctattttcagttctttgagagatcacacatctccatcacttcagggttactctctggtgcctaatattgttcatttggtaaggttgtatttctttcaatgttcttgatacttgtagatatgcaacgacatctgcatattcagggactgggtatttattttagtctttgcagtctggcttagtttgtgcttgtcctttttgggaggcccttccaggaatttaagcaaactggcttttgtgttccctgaggctgtgatcactgcagctgttgaacactagagaataatctacatccaggcttgctgcaggtcttacaagggcttcaaggttgacatggctttctggcccacatggacctgggaaggggtcaagttgcgtactaaggctgtgggaatgcttgccagggacccaggtccagaaggctgtcctggtggcccagatgggcatgtttcccagcaaatcttttgacaggtgagatgagtctctagttgcaatgagaggggctggagttgagactggccctcttgggatatattgtggaatggaggctgaagagcccagtctcagcttagaggggcacacatagcccagcaagctccttcacaggatatttccccaacgacagtgtgaggagctagagttgagactgggcccccttggcatctgctgtgggatggaggctggagaacctatcttgttggcccagacagggccagcaggtctcagctcagatggaatagttccctgtctgcagtgggaggtgctggagctgagatttaacccctttagcatctgctgtgggacagaggctggagagcctatctcattatttcagaggtgcatgtgtctcccagcaagtccctgcacagacaggatagttccctgattgcagcaggagagtcggggctgagactgggtccccttgggatctgctctgggacagaggttggcaagcctttcaaggaggcttagactcctaggcagcaggataaggacaggtctccctttgggtctgtgtgtgagtagctctgagctgggacctttgctgaggggagttggagcagagtcaccaggcaattttccggtccactgctgagactgatgtcagcagggagagagcctttccactaaggcactagtatgcatgattccttatggaccccttttcagatggttgtgcttgtaggctcaaggccaaatggggctgtagccaagtcccttggggacgtgggctgtttccaggcttgaacccagaagcaagcttggcatatcagccacctgggtttctgtctgtgctctcaaaataacactcccacatcttcgtctctaccaggatttcacaaactcctacctgaatcctgaggctcctgcaaagaggcttttgactatagaaaggtgcaggattctttttttattttattttattttaaattaacagtgtttatttacctctaagtattgttgagagactggggtgaagacacaattttcattttgtaatttacagacttctataagctaaaacaaaaacaaaaaagtcttctctatttaatataatggtagaatacaacttctacttttatttattttaattttttaaatttcaatcgcttttggggtacaagtagttttggttacatagatacattttatagtggtgaagtctgagagggtgcaggattcctgttgttgtgggggaatatgagtgggttaccctctattctgcctttctggtaatgtccaagaacaagaatttttgtgcttatttccaggatacgattgccttaacctatttatattttgcttttagatatgagtgtttaaagcttgacttacttggaacacagcattgattaaattacatttcattaattttactgatactgcttatctgtttaaaattcagatagaaagtctgaatgacaaattacaaaatgctaaagaacagcttcgagaaaaagagtttataatgctacaaaatgaacaggagataagtcaactgaaaaaagaaattgaaagaacacaacaaaggatgaaagaaatggagagtgtaagcaaattatttccacctaaggaacaagtggtagtctctgttgagtgaaatgaatctttatgttttaaactggttggttttaatatacagaaactgtgccataactgtttttaggctagttttttgtgccagaaacctgttagtttctttgaccttttaaaatatttttctgatggtctaggtataggcaaagacagtgtcttatttatctctgtatacaggcctttgcatggtatctttcatatagtaaatctacaatatatgcttatttggttgacaaatatttattgagaagctgctatgtaatagaattgaggagtcagctttttttttttttttttttttttttttttgagactgagtctctctctgttgcccaggctggagtgcagtggctcaatcttggctcactgcaacctctgctttccgggttccagtgattctcctgcctcagcctcccaagtagctgggattacaggcacctgccaccacgcctggctaatttttgtatttttagtagagatggtgtttcaccatattggccaggctggttttgaactcctgaccttgtgatccacctgccttggcctcccaaagtgctgggattacaggcgtgagctaccgtgcccggccgaagagtcagctattaataagatacagtgttttgtctgttaggaactccatcaaaagaatggataaataaataattgtacattgagaccaagtgcactgagttgccagatgaagtttgatgacttcatatcatcagtatgcatgtgtgttgactggtgaattcattcctccacttgctcttttaaaaagtgaatttagggtcaggcacgatgactcacacttataatcccagcattttgggaggccaagttggcagaatcatttgagcccagaaattcaagaccagcctgggcatcgtagcagtgggacccctgtctctacaaaaacattaaaaaactagctaggtgtggtgatgcatgcctgtggtcccagctacttgggaggctgagatgggaggattgcttgagcctgggaggtcaaggctgcagtgatttgtgatcacgccactgccctccaatctgggcaacagagcaggagcctgtaccaaacgaagaagaggaagaagaggaagaagaggaggaagaggaagaagaggaagaagaggaagaagaaggaggggggagggatagtggggaggagggggaggaatactttattagaaatttaattgagtaatataaaaccatttcagtgggagtagcagccccagtgacaagttttactttcacagagagtaagaccttaacccagctgtgtggattaaatggtggattttaattatctataccaatatattctctgtctttgacatagataatcaaatgttaacttctcttttctctttatgttttctgtcataaatgttacatttaaaatgataaaagattatatggcttgtgtatgttacagtgatgtaatatatatcaataagagtcccaattatggtatttttgtcattttctcattagatttttttcttgaatatcagtttcacagtgggtgatactcattgtatgttaaattttaacatactcattgtatgttaaaggatttagttggaaggtggaaatttacgtattaagcaaaatcagaataagaaataggttatctatatatttcattctgaaacctacaaataccttatgcttttcaggttatgaaagagcaagaacagtacattgccactcagtacaaggaggccatagatttggggcaagaattgaggctgacccgggagcaggtgcagaactctcatacagaattggcagaggctcgtcatcagcaagtccaagcacagagagaaatagaaaggctctctagtgaactggaggatatgaagcaactctctaaagagaaagtaatccctattttaaataatcttatgtatctgaaatcttacaaatattagcattttttttgaactgtagaatatagttctttcaaaaatgaactgtattgcacaacagtgtgaatgtacttaatcccaccgaattatacacttaaaaatggttaaaatggtcaattttgtgtgtattttaccacaattttagaaaataatgaactgtgttatatatagataactttgtaatataaccaggaagtccttcagaactgagttttggctaaactagttctcaaattgagttataaagcacttttagacttttaagtgagttcgagctcttacttgaagaaaaaataaagctaatcttttttgagtaaaaatttttacatttgtagtgactcttaaaaatgaaaactattggcttggcacggtggctcatacctgtaatcccagtactttgggaggccgaggcaggcggataagtaagtcaggagtttgagaccagcctggccaatatggtgaaacaccatctctactaaaaatacaaaaaacaaaattagccaggcatgatggtgggcacctatagtcccagctactcgggaggctaaggctggggaatcgcttgaatcccgaaggcagaagttgcagtgagctgaagtcgtgccactgcaccccagcctgggcgacagagcaagactccatctcaaaaaaaaaaaaaaaaaaaaaaaaaaaacatgaaaactatccaaatttgtaactattaaatttgtaacttttaggaaacctgtagttcaaaacccttggttgataaagtaacttggaggtaaagtgcttttaaaaagcaaaaatactaatataaattttatttttccagtatttggtaggaagttaactacttggcttaaaaatatttacattggtatacttgggttaattatttagactttaagaaaaatgtgtttattgatgttgcaaaaaaaaaaaattcagctttccattgtggtttccatggtttaattcaattccataggaactgaattaaaatatttttacctttaattttggttaagcctacctatgttgttattcacatttctggatggttagaccagtaaagcatacatagagaatgtttattagagatatattatacatttggggttctaggaaaaggaaagctatctacttttatctcatttctgcctttatcaatagtgtcaaagtatagtacaattggtttttatttgataagctaagctcactttaaaaagtgaattaaagttaggaattttttaattgacagtgttttaaatacttattttaacccaaaactaaatatatattgatatgtttttcctttgatgtagggccaaaccttggttctttttgtatgagtcatttgattagaattctacctagtctttctcacataactagactcctacctggtctttcaccacactatattccatcatctatagtttccaattctgctttctttaaagtggaggaagaattaattaaaagacattaattaaaattaaaataattaaattaattaaaattaaattaataaaaattaattaataataattaattaaaagacatttgtaagtgaaccatgttatatttttatgggacctcctaccatattttataacaattttgagtgtttctaattggatagcaaaatgttcatgacttacttattaagctggttcaaaacatataacttagtttttggataaaaactttgcatttgcttatttcatcatgttcataatctataataaaattacacaattaaaattacaagcacagttagctaaattagcataaataagtttgaataaaaacacaactgactcttgataaacagacaatatatatagtgagcaaaaatatacaggcatacctagcagtagactgttatctgccagagttcagtgtcctgaggttattattaatagttcattttatagaaagcattggttagtgaacatctattttatgatgacagcaaacaattatattaatactctcccattaatagtctctgaaatgtctagattttaaagcatactatttagtaagttaactttgtgtctgtgtttatataatataaaaaattaaactacttccaataatgcactggattagtttagctataataaccaaataaacaagttttatagcttttactcaatatgtcatttttaaggatgctcatggaaaccatttagctgaagaactgggggcttctaaagtacgtgaagctcatttagaagcaagaatgcaagcagaaatcaagaaattgtcagcagaagtagaatctctcaaagaagcttatcatatggaggtaaagaaaaatttaatttgttttgttagtgcccactaaagtaggttgacctatctggacaaaagtatgagtccagctcttaagtgttcattattgaataatacattgtggtcttcatttctggtagcctaaacatacagctttcactttaatatactgtggggttaagagcttgaattcctgagccaggcaacctggttctaaaccctagctcaccacggagccacctgtatcaccttgggtaagttacttaacctgtgtctaaaatggatataataatagtatctacctcatagaactgtggtgaatattaaatgaattaatatataatataaaatagcatttgtaaaagattaactggaaatatttaataactgatataaaccgtttcatgtgatgtaaatctataatgctttgcaattttcagcatttcttcttataataacttagctagagagataatactagagcctttttatctatcagcatgtcttgagccttcacagaaatgggcagtattattgactagaatagcatttttcatctttttaaaaactacatttaaagatattacccaaaatctctgtatatgatttaaataaattacttatgtttagtgctaataaagcgttttttctaatacggcaagggttgcaaatatttatgttaaactccattcaagggagtttggtgacatttttgtgagtgattggtagggcttgtggggaccatgtcttgcttaaatacatttagaatcatatctctttgaaagcattgtgcctgccaaacaaaacatatttacaagctgaatctaatcctaaggctaagaatttgcaacctttgatctttagcgacaaacctgaatgaatgctgttggactcagcataattatataattgttattaacagctcagcttagtaactatcagtaataattaggcgctttcaagtgtttgcccttaactactcattacactttcattatatggcctctgttctgtttttaagtataattatccaattgtttcttttagttttataagccacctgaaattataaatagattgtacataaaataaattgtaaaattagttcagtattgctatctttttaaaaaagtgatggggtctgtgttgctcagactggcctcaaattccagagctcagataaccctccccactcagcctctaagtagctgggagtaaaagcacacgccagccgggcgcagtggctcacacctgtaatcccagtgctttgggaggccaaggcaggtggatctcttgaggtcaggagttcgagaccagcctgaccaacatggcaaaaccccgtctctactaaaaatacaaaaattagctgggtgtggtggcgcatgcctataatcccagctactcaggaggctaaggcagcagaattgcttgaacctgggaggcagaggttgcagtaagccaagatcgcgccattgcagtcaagtctgcgtgacaagagtgaaactccgtctcaaaaaaaataagtacatgctgctgcattttaatatttaatattactatttaatatttgatactaatattttgtctataatattgaagtatatatttttacctgtttggaagttgataaaaatttacttttaaaatatatatgttgtttgaatataaaaatgagaggatatggtattaaagtaatagagagctagaaaagaggatcaataatttttaacagttttttttattatactttcttttttttttaatacattaagttctggggtacgtgtgcagaacatgcagttttgttacataggtatacacatgccatggtggtttgctgtacccatcaacctgtcacctacattaggtatttctcctaatgttatccctcctctaatcccccaccacccaacaggccccgatgtgtgatgttcccctccctaggtctatgtgttctcattgtttaactcccacttatgagtgagaacatgcggtgtttggttttctgttcttgtgataatttgctgagaatgatggtttccagcttcatccatgtccctgcaaaggacgtgaactcatccttttttatggctgcatagtattccatggtgtatatgtgccacattttctttatccagtctattattgatggacatttgggttggttccaagtctttgttattgtgaatagtgctgcaataaacatacatgtgcatgtgtctttatagtagaatgatttataatcctttgggtatatacccagtaatgggatggctgggtcaaatggtatttccagttcgagatcaacagtattttttaatatataggtttccaaattgtcagaaaatcacttaataataaatgtaaaactcctgacttattggaggagaatgagattgttttaacctttaattgtgaaaaatttaaatatatttaaaaatagaatagtataaatagtatatacatcctcatatttatttttgaacgttaataattttcaatgcatagccaatttatttcatccataaatacattgaccattttctttatctaaaagagaatacttttgagaatgaaaaggaatgctatagtaattacatgagggtaccaggcataaaacctagacagtcctaagcattctcggaagtgtgtcaacatacctttaacctttgaaagcacagtgctttcaaagagatatgattctaaatgtatttaagcaagacatggtccccacaagccccaccaatctaagcaagacatggtcccccaagccacatcaatcacccacaaaaatgttaccaaactcccttgaatggagtttaacataaatgttaaacccattcccaacccatcccccatattcacatattatttgaagcaaattttagacataattatttcatctgtaaataattatgtagacataattattctatattcaataagtatcttgtattagtccattttccattagtccattagtccattttcacactgctataaagaaatacctgagattgggtaatttataaagaaaagagctttaattaactcacagtttcacatggctggggacacctcgggaaacttacaatcatggcagaaggttaagggaaagcaaggcatgtcttacatggcagcaggagagagagagtgtgtaaatgccacacttttaaaccatcagatctcatgagaatgaacttactatcatgagaacagcttgggggaaccacccccatgatccaatcagctcccaccaggtaccttcctccacatgtgaggattacaatttgagatgagattcgggtggggacacagagccaagccatatcattccaaccctggcccctcccagatctcttgtccttctcacatttcaaaacacaatcatgccttcccaacagaaccccaaagtcttaactcattccagcattaacccaaaagtccaagtccaaagtcttatctgagacaagccttccatctatgagcctataaaataaaaaacaagttagttacttccaagatacaatgggggtacaggcattgggtaaatgctccccttccaaatgggaaaaatttgccaaaacaaagaggctgcaaggcccatgcaaatctgaaacccagtggagcagtcattaaatgttaaagctccaaaataatctcctttgactccatgtctcacatccaagctacactgatgcaaggggtggactcccaaagttctgggcagctccacccctgtggttctgcagggtacagcccctgtggctgttttcatgggctggcgttgagtgcctggggcttttccaagtgcacggtgcaagctgttggtggatctaccattctggggtctagagaatggtggccctcttcttacagctccactacccagtgccccggtggggactctgtgtgggggctccaacctcacatttctcctctgtactgccttagtagaggttctccatgagggctccacctccacagcagacttctgcttggacttccaggcatttccacacatcctctgaaatctaggcagagcctcccaaagctcaactcttgtcttctgtgcacctgcagacttaacaccacatggaagctgccaaggtgtggggcttgcaccctctgaagcaatggtctgagctgtaccttgaccccttttagccatgggtggagctgaagcaacagcaatacaggtcaccccgtcttgaggctgcacagagcagtggggctctgagcctggcccacaaaaccattttttcctcctagatatccaggcttgtgatgggagaggcttccttgaagatctctgaaatggcctggagacattttccccattgtcttggcaatatttagctcctcattacttaagaagatttctgcagcgagcttgaatttctccccataaaatgggtttttcttttctaccacatggccaagctgcaatttttttttaacttttatgctctgcttcccttttaaacataagttccaatttcagatcatctctttgtgaatgcatatgactgtacactttcacaaaagccagatcacctcttgaatccttaaaaatttattctctcagagaccctaaatcatctctctcaacttcaaagttccacagatctctggggtgggggcaaaatgccactggtctctttgctaaaacatacaagatactctagtttccaataagtttctcatctccatctgagaccacctgagcttgcacttcattgtccatatcactatcagcattttagtcaaaaccatttgacaagtctgtaggaagttccaaactttctcacatcttcctgtcttctgattcctccaaactgttctaacctctgcccattacccagttccaaagtcacttccacattttcaggttatctttatagtagtaccccactattctgataccagttttctgttattagtccattttcacagtgctataaaaactgtgagtcaattaaacctcttttccttataaattacacagtcttagggctggtgtgagtgcctgaggcttttccaggtgaaggtgcaagggctgtcgctggatctaccattctggggtctggagaatggtgacagttgcagggtaatttataaagaaaagaggtttaattgactcacagttccacatggcttgggaggcctcaggaaaattacaattcttatgattatggcagaaggggaagcaagtcatgtcttacatggtggtgggagacagagagcaagaggggaagtgtcacacttttaaacgatcagatctcatgagaactcactatcatgagaacagcatgggtgaaaccatccccatgacccaatcacctcccaccaggttgctcctttgacatacaggaattacaattcaagatgaagcctggatggggatacggagccaaactgtaacatagctctaaaagataagggctattttttggaacagaaccacaataccatgatcacacctaaaaattgacagtgactccttaatatcatcaaatacccaatcattgttcacatttccccaattgtctcaaaaatgtctttatagtttatttgttcaaatcagtacccaaatagagtccattgcatttggttaattaagttcttaagtaaattgaagattatggattcctttgttccctttttcctctagtattcattgagaaatcagatgtttgtaactataaacagaatttactttttttaaagaaaaagtaaataaaagtagaaagcattagactgttgtcgaatccagtttccttccatttttttattttttttcttttccaattctggggctatatagatgatttcacatcaagagaaccatgcaaagtggaagatttctgctgactctcaaaagtcttctgttcagcaactaaacgaacagttagagaaggcaaaattggaattagaagaagctcaggatactgtaagcaatttgcatcaacaagtccaagataggaatgaagtaattgaagctgcaaatgaagcattacttactaaagtaagtaaacatataaaagtaataaagcatatctatgaaaacataaatgtctgacttatttacctgtcttagtagtttatagaggactatatgaccaaatattggcctgtttgaataaaaaccatttgatttagaagatgttgaatttaggaaattattaagatgatgtacatcttattaccgtagaagatataatttataaatgttcaaatataaactcatctaatcataatgtttagagggttttatacttgatgtacctaaaaaaaggtagaaacatttttcaaaatcagcaaagttcttttaaaatcataaagtaggccgggcgtggtggctcactcctgtattcccagcacttcaggaggccgaggtgggcagatcacttgaggtcaacaagggcaaagacaattttttgagagccatgaaggcatcattatattatggctcactacaattacgttcacaacagtgaccttctttgagtcttaagaaaaagttgaattaatttaatgtattcagtgtactatatttaattgtaaaagttatgtgttaaactgtaacttaaataaaatcctacttatatgagataccacatatcaattatggctagataatgcagaataggaaaaagaaaaagactgcagctgtgtacagtcctattctgtgccaactctacaactgttttgttaattgtgattttaagaatgtgaatgtaggatttacaacaaaaaattggcactctagccactttaaaccaacaggctttaaaccaacaaagatcaaaagagaccaagaaggccattacataatggtaaagggatcaattcaacaagaagagctaactgtcctaaatatatatgcacccaatacaggagcacccagattcataagtcaagtccttagagacctacaaagagacttagactcccacacaataataatgggagactttaacaccccactgtcaacattagacagatcaacgagacagaaaatcaacaaggatatccaggacttgaactcagctctgcaccaagcagacctaatagacatcgacagaactctccactgcaaatcaacagaatatacattcttctcagcaccaaatcacacttctgccaaaattgaccacatagttggaaataaagcattcttcagcaaatgtaaaagaatagaaatcaccacaaactgtctctgagacaacagtgaaatcaaattagaactcaggattaagaaactcactcagaaccacacaactcatgaaaactgaacaacctccttctgaatgactactgggtacataacgaaatgaaggcagaaatgaagatgttctttgaaaccaatgagaacaaagacacaacataccagaatctctgggacacatttaaagcagtgtggagagggaaatttatagcactaaatgcccacaagagaaagcaggaaagatctaaaattgacatcctgacatcacaattaaaagagctagagaagcaagagcaaacacattcaaaagctagcagaaggcaagaaataagtaagatcagagcagaactgaaggagatagagacacaaaaaacccttcaaaaaatcaatgaatccaggagctggtttttagaaaagatcaacaaaattgatagaccgctagcaagactaataaagaagaaaagagagaagaatcaaatagaggcaataaaaaatgataaagaggatatcaccactgatcccatagaaatacaaactaccatcagagaatactataaacacctctacacaaataaactagaaaacctagaagaaatggataaagtcctcgacacatacaccctcccaagactaaaccaggaagaagttgaatccctgagtagaccaacaacaggttctgaaattgaggcagtaattaatagcctaccaaccaaaaaaagtccaggaccagacagattcatagctgaattctaccagaggtacaaagaggagctggtaccattccttctgaaactattctaatcaatagaaaaagagagaatcctccctaactcattttctgaggccagcatcatcctgataccaaggcctggcagagacgcaacaaaaaaagagaattttagaccaatatccctgatgaacatcgatgcaaaaatcctcaataaaatactggcaaaccgaatccagcagcacatcaaaaagcttatccaccacaattaagttggcttcatccctgggatgcatggctggttcaacatacgcaaatcaataaatgtaatccatcacatgaaccaaaccaaagacaaaaaccacatgattatctcaatagatgcagaaaaggctttcaacaaaattcaacagcccttcatgctaaaaactctcaaactaggtattgatgggacatatctcaaaataataagagctatttattacaaacccacagccaatatcatactgaatgggcaaaaactggaagcattccctttgaaaactggcacaagacaggggtgccctctctcaccactcctattcaacatagtgttggaagttctggccagggcaatcaggcaggagaaagaaagaaagggtattcaattaggaaaagaggaagtcaaattgtccctgtttgcagatgacatgattgtatatttagaaaaccctatcatctcagccccaaatctccttaagctgataacttcagcaaagtctcaggatacaaaatcaatgtgcaaaaataacaagcattcttatacaccaataaccgaccaacagagagccaaattatgagtgaactcccattcacaattgcttcaaagagaataaaatacctaggaatccaacttacaagggatgtgaaggatctccaaggagaactacaaaccactgctcaatgaaataaaagaggacacaaacaaatgggagaacattccatgctcatggataggaagaatcaatataatgaaaatggccatactgcccaaggtaatttatagattcaatgccatctccatcaagctgccaattactttcttcacaaaactggaaaacaactaccttaaagttcatatggaaccaaaaaagagcccacacagccaagacaatcctaagccaaaagaaaaaagctggaggcatcacgcttcctgactacagggctacagtaaccaaaacagcatggtactggtaccaaaacagagatatagaccaatggaacacaacagatccctcagaaataacaccacacatctacaaccatctgatctttgacaaacctgacaaaaacaagaaatggggaaaggattccctatttaataaatggtgctggaaaaactggctagccatatgtagaaaggtgaaactggatcccttccttacaccttatacaaaaattaattcaagatggattaaagacttaaatgttagacctaaaactataaaaaccctagaagaaaacctaggcaataccattgcctaggcatgggcataggcatgggcaaggacttcatgactgaaacaccaaaagaaatggcaacaaaaaccaaaatagacaaatgggatctaattaaagagcttctgcacagcaaaagaaactaccatcagagtgaacaggcaacctacagaatgggagaaaatttttgcaatctactcatctgacaaagggctaatatccagaatctacaaagaacttaaacaaatttacaagaaaaaaacaaccccatcaaaaagtgggagaaggatatgaacagacacttctcaaaagaagacatttatgcagccaacagacacatgaaaaaatgttcatcatcactggtcatcagagaaatgcaaatcaaaaccacaatgagataccatctcacaccagttagaatggtgatcattaaaaagtcaggaaacaacaggtgctggagaggatgtggagaaataggaacacttttacactgttggtgggactgtaaactagttcaaccattgtggaagacagtgtggcgattcctcaaggatctagaactagaaataccatttgacccagccatcccattactgggtatatacccaaagtactataaatcatgctgctataaagacacatgcacatgtatgtttattgcggcactattcacaataggaaagacttggaaccaacccaaatgtccatcagtgatagactagattcagaaaatgtggcacatatacaccatggaatactatgcagccataaaaaaggatgagttcatgtcctttgtagggacatggataaagctggaaaccatcatcctgagcaaactattgcaaggacaaaaaaccaaacaccgcatgttctcactcataggtggaaatcgaacaatgagaacacttggacacagggtggggaacatcacacactggggcctgttgtggggtggggggaggggggagggatagcattaagagaaatccctaatgtaaatgacgagttaatgggtgcagcacaccaacatggcacatgtatacatatgtaacaaacctgcacgttgagtacatgtaccctagaacttaaagtatttttaaaaaatcatataaatcaattttagatgaagtagtaaaaaaaaaaaaaaaggaaaataccaaaatatgcgtgttaaacttttattttgtaatgcattctgtggttatgacagttttagttatgaacacagtatttttgaaagctactttaagaatagaaactatcagagtaaaactgacaggatttagaaatatatatcttatggatacctttaagaaaaggcaaatgtatttgaagaggagactactatacttacattattaagcttttgaaattaaaatatcatctctttttttaggctttttggttttttagtgtatgtagtctcattcctaggatcccaaagttcagtcagaggacccaaatgaaagacatgaaaaaaattgaaatgaaaagtttatttaacaaggattgatttattaaaaatttatcactttaagtttttgaaaaatttctaatgcactaaagctttcttgtaatgagaacacaaaaagcagaatagcttatctatttattccctactggaaattctgaaaggggtctttttgtgtctatatgtgttagattaacaaaagatagcgtacctctacatctttgcagagaaatttttaggtgtaagatttcaatcttgaatagaaattgatattgtcattaacaccaaaaatatatatataaggagaatctagttttaatggaatttcttagaataagcatatttcaaaggaatatgtgtaattttcccaaagtgaacctatcttaagtaaaggttttaaacagagcttggaaaactctcaagaattataaacagaattcctatagtgggacaaaggttgactttctaaaagtctatgattttctaaggagttcattcatttaacaaaaatgtattgagcacctactatgtaccaatttatctgcaggaatcagaattaaccagattacaggccaaaatttctggacatgaaaaggcagaagacatcaagtttctgccagccccatttacatctccaacagaaattatgcctgatgttcaagatccaaaatttgctaaatgttttcacacatctttttccaagtgtacaaaattacgtcgctctattagtgccagtgatcttactttcaaaattcatggtgatgaagatctttctgaagaattactacaggacttaaagaaaatgcaattagaacagccttcaacattagaagaaagccataagaatctgacttacacccagccagactcatttaaacctctcacatataacctagaagctgatagttctgagaataatgactttaacacgcttagtgggatgctaagatacataaacaaagaagtaagactattaaaaaagtcttctatgcaaacaggtgctggtttaaatcaggtatgtattttatacactgtaaactgtaataatttgtttccaaagaatatcattttattacttggaagaaaattcatatatttaaatgaaaaactactaatatttgaagaaggaagattttacattttatacattaagtaaaatcaataccaaaagacattttctctattgcatggtgtgagataatacggggaaagagagaggcagagggagacagaacaggaagtagaacgaaaaataggaagatagacatgaaagtgcttaaaaataaaaaaattaaaaaactgaaaaaaagaaaaatggtaagaaatatgcagtgagaggaatccagagaaagtaggttctgaggtgaatgttctcataacttcgtcataatttactgttcatttgggctctgtatgtcaaaataagttattgctggctatcactgatccttggaaagttgatttactgaattagccattatttaaaagcatgaataaggccaactgtcctcatccttataatttttcaccctaaaatatttatattcatctttccttcttttgtcccttttctctttaaaagaaagatatatccctcttcttttttagagagaaattcttgaacatgtactttcaagcctttaatatgcttgcctgttttgcttctctgcttcctgatttaatctgtatcttcaggcttctttatttccctcttcctttcatttccagacatcttaaattcatacccactctaagctgggtgcagtggcacatgcctgcaatcccagctatccaggaggctgaggcaggaggattatttgagcccaggagtttgagacaagtatgggcaacatggagaccccatctcaaaaaaaatttttattcattctatttctccattgttgctacctccttactacccttcccactttgtaacttactgtatttgtctcttgaatattaaatttactgttttcttgaaagtcacaaaaaactctttgtataataaacaaatttagtatcctctttttcttcagcttttgtagatttaactgtccattcccccttttgatattttctcttctcttgacttttatgatttaatatttttctggtcctcttcttattttgaactaattactttctcacttttctgctcctcgtattccttatgttccacaatataggatttaatctgtagtttaagaatggaaataatctcctttagataatgtcagctttttaaaaaatgcctaacatcattttcaaacacatcaagatagctttggtggcctgaacagttaaaaactatttttttggaatagatccaagacaaagaaaaattgttgagtgagtttttcttcataatacttatttttgctggcttaagtatatgtctatctacttgtttattgattgtctcccccactgaaaatgtaagctctgtgtggagagggtatggtcatttcgcttatttctatatttctagtgcctggtatatagtagatgctgaatgaatatttatgaatgtatcaagtggctaaataaattatatacagtaaacacaactgtagttttaaatgctagatttcatcaggctgtgctggccaaaatttcacttttagcatattacttttagcacccaagaagttaaagattcagtaaaggtaactgagaagtaatcagtgaaatagaagagaaattaggagagtataatatttcacaatgtatttcaaggagggtgagatcaattgtgtccagtgttgctaagtaaagtgaaggttgattattgactatcatatttggtaatgtcgaggcttttatgaccctcataagactggctttagcctaacaatgggaatgaaagcctgttgtagagtgggtttagcatagaatggaaagagaggaaatagaaacatcaagaatagacaactctttggataaagagtaaagcagagaaatgagggagatgtgatgtcaagggagagttttttgttttgctttttaacataagagagaaaacagctgttggatattgataggaatgatccagtagacagggaaacagccattcaagacagagcagaaggagtaaaatccttaaggtaggcttaagaaatgggatacaggagagcagtagaggagttggtcttggataaaagaaggggcagttcatccactgtggtgggaaggcaggcagaatatgggagcacagaaacacatggaatggaaggtttgatagtgggagagaaatttctttatcaattgcttttcttttctttttttttttgagacggagtctggctgtgttgcccaggctggagtgcagtggcgcaatcttggctcactgcaagctccgcctcccaggttcacgccattctcctgcctcagcctcccgagtagctgggactacaggcgcccgccaccacgcccggctaattttttgtatttttagtagagacggggtttcactgtgttagccaggatggtctcgatctcctgacctcgtgatctgcctgcctctgcctcccaaagtgctgggattacaggcgtgagccatcgtgcccggccaattgcttttattttcttagtgaaataagaagcagggtttttagttaaggcacagtaagatattggatatttaagaacagggaaggtatgtgaaatggttacttactttggagagtaggaaagcataaacagactagcaaagtctagtagaattgccagccagatagttctgtcatgtggaacaaccgtgcaagatacaggacatctggcatcatttgtttctgcctgttgtatatcagcagcagcatgtccctttctcccctatcacaatgacaaacaaaaagtaccatcacaaatttctaggatgttctgtagaggatggtactgcaccctttaagaacctctgctctactccagtgacccttgcagtcatagatatgcaagactctctttttggtaaaaatcgcacctaatttatgcaggataaatttgataagtacagtgacagactgtgatcataacaatacatagcctttactgtatgtcaagcaaatcctttacataaattaactcatttaatccttataacaaccccctgataggtactattatctgaatagtaccaaataatagtacctaatagttctactgtagtgggtactattattatccttatgatatgaggaaactgagtccctgctcttaaccactatatataatctttacataattgtattggtattttcttcagtatgtctaattacatagtttggtcttgcagttgcttagccaattaaggattaagagtaggagttagccaggcgcggtggctcacgcctgtaatcccagcactttgggaggctgaggcaggtggatcacgaggtcaggagttcaagaccagcctggccaagagggcaaaaccccatctctactaaaaacacaaaaattagctgggcatggtggtgcgcacctgtaatcccagctgctcaggaggctgaggtggagaattgcttgaacccgggaggcagaggttgcagtgagccgagactgcgccacagcactccagcctgggtgacagagcgagactccatctctaaataaataaataaatagtaggagttaaaagttactacataacagatagaataatttcttactctgtaggtttttgcaatatatatttgaatttttcaagtcatttcacctattcaattatcattgaagatcaatgccaaattaaaatattcaaaatactggccgggcaaggtgcctcacacctttaatcccaacactttgggaggccaagcaggaggattacttgagactaggatttcaaggacagcctgggcaacatagcaagacccgatctctacagaaaaataaaatgaaaaactagctgggcatggtggcgcacatctgtagtcctagctacttggaagctgaggtgggaggattgcttgagcccggttcgaggctgcagtgagctattatcatgcaatgcagcaagaacccatctctaaacaaaacaaacaaacgtagcctattgttaaacttaaagattggattcttaaaatcctatcaaagttatattctgtataaacatagttttcttgattgtcaatgatactctactgagttttaaatgcattgaccactgtcaatactcataactttaagctcacatggaactcctacagcgcatgagcctcagttgcattacctgtggtagtgaccacctcatagtcatttatatgtatgttgcattaataaatatatactactctgtaaaatttaatgaaagagatgtatttttatttttttgaggcagagtcttgtgctgtcacccaggctggagtgtagtggcacgagagctcactgcaacctccgcttcccaggttcaagcaattctcatacctcagccccctaagtagctgggattacaggcgtgtgtcaccatgcctggctaatttttgcattttttagtagagatggggtttcaccatgttggccaagctggtctcaaactcctggccccaagtgatctacccaccttggcctcccaaagtgctgagatgacaggcgtgagccaccgcacctggcctgaaagagacattttaaattgggatgtagagccatgatctgtagcctagttcaggtcctcggcttatttcacctgccacttaagtatgacattgcattggtctcctatttaaaagcaggattttaaaactcttttaaaccaaataaattattatttaaataaagaaatccagtatgtcaaatagattcaaaggtagtttatctgattgggggtaggatatgtctgacctttacccagttacttaaatctactcatggctgctcatgcaaaagctccagagcagccctggattaatcattaaggaaaataagcaggagcataggggactaaggggaatgccacagagttgtttgccctagctatcatcctcttaattcgttcactgccacacttgactttagtagaatttttagtaactgtctttatctgccagttcaaatttaatctgcactattaaaaaatcattttctttggtatgatgagtgacaaaagtttaaaagtttgatttgaaagtgtcatcaggtattacatttgtttctttacacatggtgtgagtttcaaaaccagctacctgggtctggatagcatttgactcatcagctgattcgtctaaaggactcttaagcaattttttaaagcagtggtagggccaggaggcgccattgttgggctgtgcagagggtatcagctggcctaaatccagctctgcttcagaaaagtgcagttttaaagtccactggtacaatgaaaagaatgtggaaaccgatacatgagaagtgtttaataagtgttagctcccttgtgttgcagcccaaatactattttcctaatggttaagtacgttggcacttccattgagagtaaagcctcttaacactgaagtattctgctttcagactaacaaaagcttcagaactcaaaaaattacacctgtacacaatttagaacacaatatcagcaagttcagagacttcatattaactcctattctaatcctgttttggattagagcagtggaagtgttgtgaatactgattaattagctaattcaccatttattaggaatttataaaaagttattacttctatttctcttatttgtaagtagttttcaagatatggtacatatatcatgcagtaagatgaaaaataagaaattaggaaattagctatagggaaaacaaagatgaaaaaaaaatgttaaaccaggagtacaggtaatacctagagacatgataatattttcaaattcacaccctcagtaaagatgaaggtatgacaagaaaatttggcccatatttttttaaatcccctgggcctttttcctctatttttctactttatgttaaactgcttttatatgcaaataattgtgtaggggtgggttgcccctacacacctgtgggtgtttctcgtaaggtgggacaagagatttggaaaagaaaaagacacagagacaaagtatagagaaagaaataaggggacccggggaaccagggttcagcatatggaggatcccgccagcctctgagttcccttagtatttattgatcatctgtgggtgtttctcaaagagggggatgtgtcagggtcacaagacaattgtggggagagggtcagcagacaaacacgtgaacaaaggtctttgcatcatagacaatgtaaaggattaagtgctgtgcttttagatatgcatacacataaacatctcaatgctttacaaagcagtattgctgcccgcaggtcccacctccagccctaaggcggtttttccctatctcagtagatggagcatacaatcgggttttataccgagacattccattgcccagggacaggcaggagacagatgccttcctcttgtctcaactgcaagaggcattccttcctcttttactaatcctcctcagcacagaccctttacgggtgtcgggctgggggacggtcaggtctttcccttcccacgaggccatatttcagactatcacatggggagaaaccttggacaatacctggctttcctaggcagaggtccctgcggccttccgcagtttttgtgtccctgggtacttgagattagggagtggtgatgactcttaaggagcatgctgccctcaagcatctgtttaacaaagcacatcttgcaccgccctcaatccatttaactctgagttgacacagcacacgtttcagagagcacggggttgggggtaaggttatagattaacagaatctcaaggcagaagaatttttcttagtacataacaaaatggagtctcctatgtctacttctttctacacagacacagtaacaatctgatctctcttgcttttccccacataattgtcttttgtctctgtctgctctttttttcttcttttaatcttcctttttcattgattttttcatgtagctattcatcatccttgtttattgtgctctcaaactataacatgacactgatgccaaaatgttatatttatgttccttttttcgagttttaaaattagtttaaccccatattcacacccacctcatcaagccagaattatttgcttttattttttattttatttattttattttatttttttgagatggagttaccctcttgtctcccaggctggagtgcagtggtgcgatctcggctccctgcaacctccccctccaaggttcaagtgattctcctgccttagcctcctgactagctgggattacagacgctcgccaccacacccagctaatttttgtatgttttagtagagacagggtttcaccatgttggccaggctggtctcaaactcctgacctcaggtgatccatgcacctcggcctcccaaaatgctgggattacaggcagtgagccactgcacccggcctgcattttatattcatgtggttcattattgactttttatgattcatatttttcagtagactaaatatttctcactctcgctttaaattatactcctgttattatggtagacttttaatgctaaatcagtttaggaatatttcaaatattaatctattattttgcattattctagggagaaaatgtgtaattcaaagaagatactgatgtgttgaaaaaatggaatttttggtactgtgctgtttacttattatatgtagctcatacttcatagaagctgttattttgcttttgaataaattttatatttcaatattttaaaagaaagcccttctaaaacttaattatatttttaaagaaaatttattattttatttattgttttttggcttaaacttgctgctttcttttgctttttatataaaaatcattgttaaaatgcataagtacattgaggaatgcaaatttttttttttttttaatgaaaggcctcacatatttattactgaacccagccaaccaatgcgttcataacagatgcagagagacaaaatatattcccaacaaaacatgtcaaactctccggatagtggtgacattttcagcctgatatggtaacatgattgtgaccttcagacagcataaatatgtgtgccatctcatgtgcaattccttatagacccagcttggttcttctccattgtctccttttggttttattttattaataaaatcctgattttattaccagttttcatctgaatccactggggaatgggacaattttgcttttgtttcttggccagcaatcacttaatcctgaaagtcttgtgagaagacatggcaagaagcaaagtcaagcacacaccatgatggcagagaaaggaaaagaggcgaggaatgtcagttcttaatcagactattatttgctaatttttctagtattacttaatttttaaaattagtataaatttataagtcattctgccacaggtttataattgtactaataatggctgactttcattgagtcagtttactgtttatcagtgactattctaggcagttgtattagtctgttctcatgctgccaataaagacataccccagactggctgggcgcggtggcttacgcctgtaatccttgcactttgggaggccgaggcaggcggatcatgaggttaggagatcgagaccatcctggctaacatggtgaaaccctgtctctactaaaaatacaaaaaaattagccgggtgtggtggcaggcacgtgtagtcccagctacttgggaggctgaggcaggagaatggcatgaacccgggaggcggagcttgcagtgagccaagatcgtgccactgcactctagtctgggcaacagagcgagactcaaaaaaaaaaaaaaaaaagacatacctcagacctcagactgggtaatttatagagaaaagaggttttttggttttgagatggagtttgcttttgtcacccagattggagtacagtggcaccatcttggctcactgcaacctccgcctcctgggttcaagcgattctcctgcctcagcttcctgactagctgggattacaagtgcccaccgccatgcctggctaatattttgtattttttagtagagatggggtttcacgatgttggcctggctggtcttgaactcctgacctcaggtgatccacccacctcggcctcccaaagtgtcaggattacaggcttgagccactgtgcctggccagaaaagaggtttaatagactcacagttccacatggctgggaggcctcacaatcaatcatagcagaaggcaaaggaggagcaaagtcaagttttgcacagcagcaggtaagagagagcatatgtgggggaacacccctttataaaacctcagatctcatgagacttattgactatcacaagaacagcatgggaaagacccaccctcatgattcatattttttgaggatttaaaggaaaagatggccataatgagtgaatagatggggaggaatcttagacaaatacaaatcaatgagtggtacaaggtagaaacttagggagtcccaatattttacaggcaggcagaaaagaaaattgagaatggatgtttagagataaaataaccaaatggaaattctagaaccaaaaagtatagtagctgaacatttaaaactcccaatattggcttaacagcagattggaggtgacagaaaagtcagttgacttgaaagcagataaatagtaaatttccactctgaagaacaaagagaaatatgattgaataaatataaaaagagcatctaagacctgtaagatagtattaagagaagaaagggaaaatggggcaggaaaaagttcttatagttatggctgaaaatatcacaaatgtggtgaaaagatgacaacctatagattttctaagctcagcaagccctaagcaggataaaaaaaaaaatcctgcttagtaatataatagtgaaaattctgtaaaccaaacacagacataccttaaaaacagagacagaaaaatcctcatgtaggggaacagtgatccaaaagaaggcagatttgccatgagaaagagtgagacacacttttaaaaggacaactgtattagtctgttcccacactgctataaagaactatgtgagactgggtaatttataaagaaaagatgtttaattgactcacagttccacaggctatacaggaggcatggctcaggaagccttgggaaacaaaatcgtggtggaaggtgaatgggaagccagcatgtcttacatggcaggagcagaaggaagagagagcaaagggggaagtgctacacacttaaacaaccagatcttgtgagaactctatcatgaggcagcactagggggatggtactaaaccattaaaaaccacttccatgatccaattacctcccaccaagccccacctccaatactcaggttcacaattcaacatgagatttgggtggagacacaaagccaaacaatatcattccaaccatgtcccctcccacatctcatgtccttctcacacaaaagttcaatcatccattctcaacagccccctaagtcttaactcatttcaacattaactcaaaaatccatagtccaaagtctcatctgagacaaggcaagttccttccacctatgatcttgtaaaataaaaaacaagttagttacttcaaagatacaatgggggtacagacattgggtaaatgctcccattccaaaagggaaaaattggccaaaaacaaaggggctacaggccccatgatccaatcaccttccaccaggctccaccttcaacacttgggatcacaattcaatatgagatttgggtgggacacagaagcaaaccatatcaacaatataatgaaagttaaaagtatggacaaagataccagggaaacaagcataaaaagtgcttcagggctatattaatatctgacaaagtagatgtcaaaaaatgagttttgccagagattaaaaaaggatgtttcgtaatggtaaaaggatccatttaataggaagacatactcctaaatgtgtatacaccaaataacagacttcagatacacgaactgaaatctaactgaactaaagggacaaatatatccacatagtgggatagtttaacctccagttttcagtaattaaaagaataagagaccaaaaaaaaaaatcagcaaggatatagaagttatgaataatatcaaactgacttgacttaactgacatttaaagatactgtagagccacacgtggtggctcatgccggtaattccagcaatttgggaggccaaggtgggaggactgctttagcccagaagtttgagaccaacctgggcaacatggcaaaaccctgtctctaccaaaacaaacaaaaaaatcaaccaggcatggtggtgtgtgctatagtcctagctattcaggaggctgaggtgggaggattgcttgatgcttgagcccaggaggcagaggttgcagtgagcagagatcacaccactgcactccaggcatggtggtgtgtgctatagtcctagctattcaggaggctgaggtgggaggattgcttgatgcttgagcccaggaggcagaggttgcagtgagcagagatcacaccactgcactccagcctgggcaacagagcgagaccatatatataattattatatataatacatattttatagattaatttttacatatatataaattatataaaatataaattaattatatatatatattatatatataaaattattatatatataaaatacatattgtaggccgggaatgatggctcacacctgtaatcccaacactttgggaggctgaggcaggaggattgcttgagcccagcagttcaagactggcaagaagaacatagtgagaccccatcactacaaaaaaatttagaaactagctgcacatggtgatgtgtggctgtggtcccagctactcaggaggctgaggtaggagaatctcttgagcctgagagttcaaggctgcagtgaaccatgatcactctactgcacttcaagctgggcaacagaacaagaccccatctcaacaacaacaacaaaaagcagattgctattaaatatgagggtcatcagtgcatacagactgcctaaattaaaaagcctgacaaaagctacaaatcaacagttttaaaatattggacatgaagcaacaaaagacagtgatttctgagagatggttgagccctttatttcccccatcttattacctggagtaagtttctaggctgtgaccttgagttgaagagacagagctaggaatctggggaggctaagaaggctagaattcacagggcacagtaataaagaggagagagctacacagagaactctggaaattaaaggatctccctcaaattttcagatgagacatcatcagtgactatatgtgaggaaactacacaaggcaagggaaagaaccacttgaataattggaacaatcctcagagctcagaaagctctgagaatagatttgtttccatgactaggagtgagaaaatctcatcattttcagggcatcaggtagaattctcaagaatggtgcctcaataatggggaaataaactctagactaaatgcctcttgggtactagtttagagtcatttaaagcaaaacctgaaaggataaaactgtttccaaataaccatgcccaagaacaaaagctcaagaatatttataggaataaactatttatctaataatgtaaaattcagaatgtgtttaatcaaaagttaccaggtccaggaatggtggtacacagctgtagtcccagctattcagaaagctgaggcaggaggatcacttgagcccaggagttcaaagctgtagtgtgctatgatcacacctatgaataggcactgcactccagcctgggcaacatagcaagaccccatctcttaaaaaattatcaggaatggaaagaagcaggaaaatatgacccaataatgataaaaagcaatgtaaaccaaccagaaaagacatagatgatcaaattagtagtcaaggccactaaattattacaactctattccgtatgttcaagaagctagaagaaacactgaacatgttgagtagagacatggaaaacataaaaaaagaaatacaaacaactttgggagattaaaacaacaatatttgtgatgaaaaataaattggatgagatgaacaggagattatatattgtagaggaaagattaatgaacatgaatagaaaactagaaactatcaaaatgaaacaaataaaaaattgtagaaaaaaaagtgagcatagcatcaaccagctgcaggaaatcttcaagtgacataatatacttctaattgaagtccctacaaaacaaaaggtagaggggaggggacaaggggaaacaaaaattcttaaaaaatgttttcaaacctcttgaatactatattagaaactagtgtgtagtgtgttgtggggtttataatctatgtaaagtaaatctattccaataacagcatatagggactgtgaggagggaaatggaagtatactgtttttgttttttgttttgttttgagatggagtctcgctctgtcgccaggctggagtaaagtggcgcagtctcggctcactgcaatctccacctcctgggttcaagtgattctcctccctcagcctcctgagtagctaggactatgcacgccaccatgcccagctaattttgttatttttagtagagatggggtttcaccatgttggccaggatggtctcaatctcctgacctcgtgatccacccgcctcggccccacaaagtgctgggattacaggcgtgagccaccacgcctgcccagaagcatactattttaaggctattttaaggctcttatatcttatctcaggtataagagtgaaatatcacccgaaagtagactgtgataagttaatgctctatattataagccctaaagtaactattaaaataacacaacaaaaagttatagtgaataaacccaaaaagaaaataaaatggaatcacaaaaaataatttttccaaaagaagacagaaaaagagggaaaagggagcaaggaataactgggacaaatagaaaataaatagcaaatggtagattaaagacaactaaatcaatcatcatattaaatgtaaatggcataaccatcttcattaaaagagatcatcgggttgtatcaaaaaataagactcagctatctgacacctacaagaaacaatactacctacaagaagtacaagacagaaatagatgaaaaggattgaaaaatattatatgctaacactgattaaaataaaggtggggctgagcatagtggctcacacctgtagtcccaacatcttaggaggtcgaggcaggcagatcacttgagatcaagagttcgagaccagcctggccaacatggtgaaaccctgtctctactaaaaatacaaaaacttagctgggcgtggtggtgtatgcctgtaatcccagctacttgggaggctgaggcagaagaatcagctgaatccatgaagtggaggttgcagtgagctaagatcacaccactgcactccagcctgggtgacagagcaagattccacctcaaaaacaaaaacaaaaaaaaaacaaacccaaaaaataaaataagtaaataaataaataaaggtggagtgactatattaacaccaaaggtctttccaggacaagtatcaccagagataaagagggtaatttcataaaggcaaagaggtcaagtgatccagaagacaccaatcctaagtgtataagtaactaataacagatcttcaaaatacgtgatataaaagctaatagaactgcaaggaaaaatagacaaatccagaattaaagttagatatttcaatacccctttctcaataacttatagaaaaagtatcctgaaaaataataagatatagaagacaggaacaacaacataaaacaattgaacctgacatttctagaacacctcacccaacaacagcagaagatatatttttaaactatgcaggaaacatttaccaggatagaccatgttctaggacataaaacaagtctgagtaaatttaaaaggatctaagacataccaagtatgttctctgaacacaatgttgagttaaattataaacatagagcagaaggcggtatctgggaaaaccttaatttttggaaattaagtaacacacatctaggcaggtgcagtggctcatgcctgtaatctcagcactttcagaggctaaggcaggaggatcacttgaggccaggagtttgagaccagcctgtgcaacacagtgtgacccccatctctacaaaagtaataaagtttacccaggcacggtggtgtgtgcctgtcacatcagcggcttaggaggctgaggtgggaggatcacttgaatctggagttcgaggctgcagtgagttttgattgtgccactgcattccagtcaggatgaaaaagcaataccttttctctaaaagacgttaaagttaacaagaacttcagtacaaaaatccacaaaaaagcttcaccagagcatccatctccaccaggacaatgttcctgctcgttcctgtcatcaaacaagagcaattttgtgagtttctatgggaaagcattatgcatccaccttacagtcctgatttggctccttctgacttctttgtgtttcctaatctttaaaaaaaatctataaagagcacccatttctcttcagttaataatgtagaaaagactgtattgacatgattaaattctcaggaccctcagttctttaaggagaaactaaatggcagggatcgttgtgtacaaaaatgtcttgaatttaatggaacttatgttgagaattaaaagttttatattttatattttataattccatttttcataataattggagacctcctcatatcagagaagaggaaaggtctcaatgacttcagcttctaccttaggaaagtagaaaataaagaataaactgcttcccaaaggaagcacaagaaaggaaatgttaaagatcatagtgaattttaatgaaatagaaaacaaaaacaataaagaataaggcacatcaagatagccatataaaagcctccaccaatcatctttccttcaggaacatcaagtataacgactgtctacaaaaaaaaaagaaaagaaaaaatcttcgtacaaaccaaaaagcaggtgagcattcccaatacctggtttttaacttcatactgctgaaagaggcactgaagagggtgggaaagatagtcttgtattgctgatgccactcctctcccatctccaggcagaggctgcatggcacagggagaatctgtgctcttgggggagagaaggagaatgcagtgattctggggctttgcattggaactcagtgatgccagcaccagacagaattcagccaatgcccacaaagggagtatttagccctaaccagatgggaatcacccatcccagcagttggaagctgagtgatatggtttggctgtgtccccaaccaaatttcattttgaattgtagttcccataatccccatgtgtcatgggagggacccggtgggaggtaattgaatcacgacggttaccccatgctgctgtcctcgtgatagtgagttcttaccagatctgatggttttacaaggggcttttccatctttgcttgacatttctccttcctgccatgtgaagaaggatgtgtttccttccccttccaccatgattgttaagtttcctgaggccttcccagccatgctgaactgtgagtcaattaaacttctttcctttataaattacccaatcttgggcatgtctttattagcagcatgagaacagactaatacagtaaattggtaccagtagaatggggcacagctatatggatacctgaaaatgtggaagtgactttggaactgggtaacaggcagaggttgaaacagtttggagggctcagaagaagacgggaaaatgcaaggaagtttggaacttcctagagacttggagggctcagaagacaggatgatgtggaaaagtttgtaacttcatagagatttgttgaatagttttgaccaaaatgctaataatgatgtggacaatgaagtccaggctgaggtggcctcagatggagataaggaacttatttggaactggagcaaaggtcactcttgctatgcttcagcaaagagactgatggcattttgcccctgccctagagatccgtggaactttaaacttgagggagatgatttagggtatctggtggaagaaatttctaagtggtaaagcattcaagaggaagcagagcataaaagtttggaaaatttgcagcctgaccttgaggtagaaaagaaaaacccattttctggggaaagagtcaagcctgctgcagaaatttgcataagtaacaaggagctgaatgttaatcaacaatacaatggggaaaatgtctccagggcatgtcagagaccttcccatcacaggtccagaggcctaggaagaaaaaatggttttgtgggctaagcccagggtccccctgctctgtgcagcctagaggcttggtgccctgcctcccagctgctccagccatggctaaaagaggttaatgtacagctcaggccatggcttcagagggtgcaagccccaagccttggcaactcccatgtgatgttgagcctgcaggtacacagaagtcaagaattgaggtttgggaacctctgcctagatttcagaagatgtctagaaatgcctggatgtccagg

SEQ ID NO: 1676 - DNA, 904 bp, Homo sapiens
gcggttcgaattctgtgctgccggggttcgctggttctccgagttgtgtccgaggcttccacgcgcaggggcccgggaaagggtcagaggcttcctaacgcagactcgagtgcgaagcgcgcagtcgccgggtgggtctctccccagcgacgatttgggtgaaatggaatctagttcatcagactactataataaagacaatgaagaggaaagtttgcttgcaaatgttgcttccttaagacatgaactgaagataacagaatggagtttgcagagtttaggggaagagttatccagtgttagtccaagtgaaaattctgattatgcccctaatccttcaaggtctgaaaagctaattttggatgttcagcctagccaccctggacttttgaattattcaccttatgaaaacgtctgtaaaatatctggtagcagcactgattttcaaaaaaagccaagagataagatgttttcatcttctgcccctgtggatcaggagattaaaagccttcgagagaaactaaataaacttaggcaacagaatgcttgtttggtcacacagaatcattccttaatgactaaatttgaatctattcactttgaattaacacagtcaagagcaaaagtttctatgcttgagtctgctcaacagcaggcagccagtgtcccaatcttagaagaacagattataaatttggaagcagaggtttcagctcaagataaagttttgagagaggcagaaaataagctggaacagagccagaaaatggtaattgaaaaggaacagagtttgcaggagtccaaagaggaatgtataaaattaaaggtggacttacttgaacaaaccaaacaaggaaaaaggtatgtgtttttaaagcaaatacatgtttttgaaagggaataa

SEQ ID NO: 1677 - protein, 244 aa, Homo sapiens
MESSSSDYYNKDNEEESLLANVASLRHELKITEWSLQSLGEELSSVSPSENSDYAPNPSRSEKLILDVQPSHPGLLNYSPYENVCKISGSSTDFQKKPRDKMFSSSAPVDQEIKSLREKLNKLRQQNACLVTQNHSLMTKFESIHFELTQSRAKVSMLESAQQQAASVPIEQIINLEAEVSAQDKVLREAENKLEQSQKMVIEKEQSLQESKEECIKLKVDLLEQTKQGKRYVFLKQIHVFERE

SEQ ID NO: 1678 - DNA, 3973 bp, Homo sapiens
gcggttcgaattctgtgctgccggggttcgctggttctccgagttgtgtccgaggcttccacgcgcaggggcccgggaaagggtcagaggcttcctaacgcagactcgagtgcgaagcgcgcagtcgccgggtgggtctctccccagcgacgatttgggtgaaatggaatctagttcatcagactactataataaagacaatgaagaggaaagtttgcttgcaaatgttgcttccttaagacatgaactgaagataacagaatggagtttgcagagtttaggggaagagttatccagtgttagtccaagtgaaaattctgattatgcccctaatccttcaaggtctgaaaagctaattttggatgttcagcctagccaccctggacttttgaattattcaccttatgaaaacgtctgtaaaatatctggtagcagcactgattttcaaaaaaagccaagagataagatgttttcatcttctgcccctgtggatcaggagattaaaagccttcgagagaaactaaataaacttaggcaacagaatgcttgtttggtcacacagaatcattccttaatgactaaatttgaatctattcactttgaattaacacagtcaagagcaaaagtttctatgcttgagtctgctcaacagcaggcagccagtgtcccaatcttagaagaacagattataaatttggaagcagaggtttcagctcaagataaagttttgagagaggcagaaaataagctggaacagagccagaaaatggtaattgaaaaggaacagagtttgcaggagtccaaagaggaatgtataaaattaaaggtggacttacttgaacaaaccaaacaaggaaaaagagctgaacgacaaaggaatgaagcactatataatgccgaagagctgagtaaagctttccaacaatataaaaaaaaagtggctgaaaaactggaaaaggttcaagctgaagaagaaatattagagagaaatctaactaactgtgaaaaagaaaataaaaggctacaagaaaggtgtggtctatataaaagtgaacttgaaattctgaaagagaaattaaggcagttaaaagaagaaaataacaacggaaaagaaaaattaaggatcatggcagtgaaaacttcagaagtcatggcacaactaactgaatctagacaaagtattttgaagctagagagtgagttagagaacaaagacgaaatacttagagacaaattttctttaatgaatgaaaaccgagaattaaaggtccgtgttgcagcacagaatgagcgactagatttatgtcaacaagaaattgaaagttcaagggtagaactaagaagtttggaaaagattatatcccagttgccagtaagtataattaagcttgcaataaaagaggcagaaattcaaaagcttcatgcaaacctgactgcaaatcagttatctcagagtcttattacttgtaatgacagccaagaaagtagcaaattaagtagtttagaaacagaacctgtaaagctaggtggtcatcaagtagaaagcgtaaaagatcaaaatcaacatactatgaacaagcaatatgaaaaagagaggcaaagacttgttactggaatagaagaactacgtactaagctgatacaaatagaagctgaaaattctgatttgaaggttaacatggctcacagaactagtcagtttcagctgattcaagaggagctgctagagaaagcttcaaactccagcaaactggaaagtgaaatgacaaagaaatgttctcaacttttaactcttgagaaacagctggaagaaaagatagttgcttattcctctattgctgcaaaaaatgcagaactagaacaggagcttatggttaggcaactagattcagcattggaaatttgtaaggaagaacttgtcttgcatttgaatcaattggaaggaaataaggaaaagtttgaaaaacagttaaagaagaaatctgaagaggtatattgtttacagaaagagctaaagataaaaaatcacagtcttcaagagacttctgagcaaaacgttattctacagcatactcttcagcaacagcagcaaatgttacaacaagagacaattagaaatggagagctagaagatactcaaactaaacttgaaaaacaggtgtcaaaactggaacaagaacttcaaaaacaaagggaaagttcagctgaaaagttgagaaaaatggaggagaaatgtgaatcagctgcacatgaagcagatttgaaaaggcaaaaagtgattgagcttactggcactgccaggcaagtaaagattgagatggatcagtacaaagaagagctgtctaaaatggaaaaggaaataatgcacctaaaacgagatggagaaaataaagcaatgcacctctctcaattagatatgatcttagatcagacaaagacagagctagaaaagaaaacaaatgctgtaaaggagttagaaaagttacagcacagtactgaaactgaactaacagaagccttgcaaaaacgggaagtacttgagactgaactacaaaatgctcatggagaattaaaaagtactttaagacaactccaggaattgagagatgtactacagaaggctcaattatcattagaggaaaaatacactactataaaggatctcacagctgaacttagagaatgcaagatggagattgaagacaaaaagcaggagctccttgaaatggatcaggcacttaaagagagaaattgggaactaaagcaaagagcagctcaggttacacatttggatatgactattcgtgagcacagaggagaaatggaacaaaaaataattaaattagaaggtactctggagaaatcagaattggaacttaaagaatgtaacaaacagatagaaagtctgaatgacaaattacaaaatgctaaagaacagcttcgagaaaaagagtttataatgctacaaaatgaacaggagataagtcaactgaaaaaagaaattgaaagaacacaacaaaggatgaaagaaatggagagtgttatgaaagagcaagaacagtacattgccactcagtacaaggaggccatagatttggggcaagaattgaggctgacccgggagcaggtgcagaactctcatacagaattggcagaggctcgtcatcagcaagtccaagcacagagagaaatagaaaggctctctagtgaactggaggatatgaagcaactctctaaagagaaattagagaaggcaaaattggaattagaagaagctcaggatactgtaagcaatttgcatcaacaagtccaagataggaatgaagtaattgaagctgcaaatgaagcattacttactaaagaatcagaattaaccagattacaggccaaaatttctggacatgaaaaggcagaagacatcaagtttctgccagccccatttacatctccaacagaaattatgcctgatgttcaagatccaaaatttgctaaatgttttcacacatctttttccaagtgtacaaaattacgtcgctctattagtgccagtgatcttactttcaaaattcatggtgatgaagatctttctgaagaattactacaggacttaaagaaaatgcaattagaacagccttcaacattagaagaaagccataagaatctgacttacacccagccagactcatttaaacctctcacatataacctagaagctgatagttctgagaataatgactttaacacgcttagtgggatgctaagatacataaacaaagaagtaagactattaaaaaagtcttctatgcaaacaggtgctggtttaaatcagggagaaaatgtgtaattcaaagaagatactgatgtgttgaaaaaatggaatttttggtactgtgctgtttacttattatatgtagctcatacttcatagaagctgttattttgcttttgaataaattttatatttcaatatttt

SEQ ID NO: 1679 - protein, 1216 aa, Homo sapiens
MESSSSDYYNKDNEEESLLANVASLRHELKITEWSLQSLGEELSSVSPSENSDYAPNPSRSEKLILDVQPSHPGLLNYSPYENVCKISGSSTDFQKKPRDKMFSSSAPVDQEIKSLREKLNKLRQQNACLVTQNHSLMTKFESIHFELTQSRAKVSMLESAQQQAASVPIEQIINLEAEVSAQDKVLREAENKLEQSQKMVIEKEQSLQESKEECIKLKVDLLEQTKQGKRAERQRNEALYNAEELSKAFQQYKKKVAEKLEKVQAEEEIRNLTNCEKENKRLQERCGKSELEILKEKLRQLKEENNNGKEKLRIMAVKTSEVMAQLTESRQSILKLESELENKDEILRDKFSLMNENRELKVRVAAQNERLDLCQQEIESSRVELRSLEKIISQLPVSIIKLAIKEAEIQKLHANLTANQLSQSLITCNDSQESSKLSSLETEPVKLGGHQVESVKDQNQHTMNKQYEKERQRLVTGIEELRTKLIQIEAENSDLKVNMAHRTSQFQLIQEELLEKNSSKLESEMTKKCSQLLTLEKQLEEKIVAYSSIAAKNAELEQELMVRQLDSALEICKEELVLHLNQLEGNKEKFEKQLKKKSEEVYCLQKELKIKNHSLQETSEQNVILQHTLQQQQQMLQQETIRNGELEDTQTKLEKQVSKLEQELQKQRESSAEKLRKMEEKCESAAHEADLKRQKVIELTGTARQVKIEMDQYKEELSKMEKEIMHLKRDGENKAMHLSQLDMILDQTKTELEKKTNAVKELEKLQHSTETELTEALQKREVLETELQNAHGELKSTLRQLQELRDVLQKAQLSLEEKYTTIKDLTAELRECKMEIEDKKQELLEMDQALKERNWELKQRAAQVTHLDMTIREHRGEMEQKIIKLEGTLEKSELELKECNKQIESLNDKLQNAKEQLREKEFIMLQNEQEISQLKKEIERTQQRMKEMESVMKEQEQYIATQYKEAIDLGQELRLTREQVQNSHTELAEARHQQVQAQREIERLSSELEDMKQLSKEKLEKAKLELEEAQDTVSNLHQQVQDRNEVIEAANEALLTKESELTRLQAKISGHEKAEDIKFLPAPFTSPTEIMPDVQDPKFAKCFHTSFSKCTKLRRSISASDLTFKIHGDEDLSEELLQDLKKMQLEQPSTLEESHKNLTYTQPDSFKPLTYNLEADSSENNDFNTLSGMLRYINKEVRLLKKSSMQTGAQQGENV

SEQ ID NO: 1680 - DNA, 4090 bp, Homo sapiens
gcggttcgaattctgtgctgccggggttcgctggttctccgagttgtgtccgaggcttccacgcgcaggggcccgggaaagggtcagaggcttcctaacgcagactcgagtgcgaagcgcgcagtcgccgggtgggtctctccccagcgacgatttgggtgaaatggaatctagttcatcagactactataataaagacaatgaagaggaaagtttgcttgcaaatgttgcttccttaagacatgaactgaagataacagaatggagtttgcagagtttaggggaagagttatccagtgttagtccaagtgaaaattctgattatgcccctaatccttcaaggtctgaaaagctaattttggatgttcagcctagccaccctggacttttgaattattcaccttatgaaaacgtctgtaaaatatctggtagcagcactgattttcaaaaaaagccaagagataagatgttttcatcttctgcccctgtggatcaggagattaaaagccttcgagagaaactaaataaacttaggcaacagaatgcttgtttggtcacacagaatcattccttaatgactaaatttgaatctattcactttgaattaacacagtcaagagcaaaagtttctatgcttgagtctgctcaacagcaggcagccagtgtcccaatcttagaagaacagattataaatttggaagcagaggtttcagctcaagataaagttttgagagaggcagaaaataagctggaacagagccagaaaatggtaattgaaaaggaacagagtttgcaggagtccaaagaggaatgtataaaattaaaggtggacttacttgaacaaaccaaacaaggaaaaagagctgaacgacaaaggaatgaagcactatataatgccgaagagctgagtaaagctttccaacaatataaaaaaaaagtggctgaaaaactggaaaaggttcaagctgaagaagaaatattagagagaaatctaactaactgtgaaaaagaaaataaaaggctacaagaaaggtgtggtctatataaaagtgaacttgaaattctgaaagagaaattaaggcagttaaaagaagaaaataacaacggaaaagaaaaattaaggatcatggcagtgaaaacttcagaagtcatggcacaactaactgaatctagacaaagtattttgaagctagagagtgagttagagaacaaagacgaaatacttagagacaaattttctttaatgaatgaaaaccgagaattaaaggtccgtgttgcagcacagaatgagcgactagatttatgtcaacaagaaattgaaagttcaagggtagaactaagaagtttggaaaagattatatcccagttgccattaaaaagagaattatttggctttaaatcatatctttctaaataccagatgagtagcttctcaaacaaggaagaccgttgcattggctgctgtgaggcaaataaattggtgatttcggaattgagaattaagcttgcaataaaagaggcagaaattcaaaagcttcatgcaaacctgactgcaaatcagttatctcagagtcttattacttgtaatgacagccaagaaagtagcaaattaagtagtttagaaacagaacctgtaaagctaggtggtcatcaagtagaaagcgtaaaagatcaaaatcaacatactatgaacaagcaatatgaaaaagagaggcaaagacttgttactggaatagaagaactacgtactaagctgatacaaatagaagctgaaaattctgatttgaaggttaacatggctcacagaactagtcagtttcagctgattcaagaggagctgctagagaaagcttcaaactccagcaaactggaaagtgaaatgacaaagaaatgttctcaacttttaactcttgagaaacagctggaagaaaagatagttgcttattcctctattgctgcaaaaaatgcagaactagaacaggagcttatggttaggcaactagattcagcattggaaatttgtaaggaagaacttgtcttgcatttgaatcaattggaaggaaataaggaaaagtttgaaaaacagttaaagaagaaatctgaagaggtatattgtttacagaaagagctaaagataaaaaatcacagtcttcaagagacttctgagcaaaacgttattctacagcatactcttcagcaacagcagcaaatgttacaacaagagacaattagaaatggagagctagaagatactcaaactaaacttgaaaaacaggtgtcaaaactggaacaagaacttcaaaaacaaagggaaagttcagctgaaaagttgagaaaaatggaggagaaatgtgaatcagctgcacatgaagcagatttgaaaaggcaaaaagtgattgagcttactggcactgccaggcaagtaaagattgagatggatcagtacaaagaagagctgtctaaaatggaaaaggaaataatgcacctaaaacgagatggagaaaataaagcaatgcacctctctcaattagatatgatcttagatcagacaaagacagagctagaaaagaaaacaaatgctgtaaaggagttagaaaagttacagcacagtactgaaactgaactaacagaagccttgcaaaaacgggaagtacttgagactgaactacaaaatgctcatggagaattaaaaagtactttaagacaactccaggaattgagagatgtactacagaaggctcaattatcattagaggaaaaatacactactataaaggatctcacagctgaacttagagaatgcaagatggagattgaagacaaaaagcaggagctccttgaaatggatcaggcacttaaagagagaaattgggaactaaagcaaagagcagctcaggttacacatttggatatgactattcgtgagcacagaggagaaatggaacaaaaaataattaaattagaaggtactctggagaaatcagaattggaacttaaagaatgtaacaaacagatagaaagtctgaatgacaaattacaaaatgctaaagaacagcttcgagaaaaagagtttataatgctacaaaatgaacaggagataagtcaactgaaaaaagaaattgaaagaacacaacaaaggatgaaagaaatggagagtgttatgaaagagcaagaacagtacattgccactcagtacaaggaggccatagatttggggcaagaattgaggctgacccgggagcaggtgcagaactctcatacagaattggcagaggctcgtcatcagcaagtccaagcacagagagaaatagaaaggctctctagtgaactggaggatatgaagcaactctctaaagagaaattagagaaggcaaaattggaattagaagaagctcaggatactgtaagcaatttgcatcaacaagtccaagataggaatgaagtaattgaagctgcaaatgaagcattacttactaaagaatcagaattaaccagattacaggccaaaatttctggacatgaaaaggcagaagacatcaagtttctgccagccccatttacatctccaacagaaattatgcctgatgttcaagatccaaaatttgctaaatgttttcacacatctttttccaagtgtacaaaattacgtcgctctattagtgccagtgatcttactttcaaaattcatggtgatgaagatctttctgaagaattactacaggacttaaagaaaatgcaattagaacagccttcaacattagaagaaagccataagaatctgacttacacccagccagactcatttaaacctctcacatataacctagaagctgatagttctgagaataatgactttaacacgcttagtgggatgctaagatacataaacaaagaagtaagactattaaaaaagtcttctatgcaaacaggtgctggtttaaatcagggagaaaatgtgtaattcaaagaagatactgatgtgttgaaaaaatggaatttttggtactgtgctgtttacttattatatgtagctcatacttcatagaagctgttattttgcttttgaataaattttatatttcaatatttt

SEQ ID NO: 1681 - protein, 1255 aa, Homo sapiens
MESSSSDYYNKDNEEESLLANVASLRHELKITEWSLQSLGEELSSVSPSENSDYAPNPSRSEKLILDVQPSHPGLLNYSPYENVCKISGSSTDFQKKPRDKMFSSSAPVDQEIKSLREKLNKLRQQNACLVTQNHSLMTKFESIHFELTQSRAKVSMLESAQQQAASVPIEQIINLEAEVSAQDKVLREAENKLEQSQKMVIEKEQSLQESKEECIKLKVDLLEQTKQGKRAERQRNEALYNAEELSKAFQQYKKKVAEKLEKVQAEEEIRNLTNCEKENKRLQERCGKSELEILKEKLRQLKEENNNGKEKLRIMAVKTSEVMAQLTESRQSILKLESELENKDEILRDKFSLMNENRELKVRVAAQNERLDLCQQEIESSRVELRSLEKIISQLPLKRELFGFKSYLSKYQMSSFSNKEDRCIGCCEANKLVISELRIKLAIKEAEIQKLHANLTANQLSQSLITCNDSQESSKLSSLETEPVKLGGHQVESVKDQNQHTMNKQYEKERQRLVTGIEELRTKLIQIEAENSDLKVNMAHRTSQFQLIQEELLEKNSSKLESEMTKKCSQLLTLEKQLEEKIVAYSSIAAKNAELEQELMVRQLDSALEICKEELVLHLNQLEGNKEKFEKQLKKKSEEVYCLQKELKIKNHSLQETSEQNVILQHTLQQQQQMLQQETIRNGELEDTQTKLEKQVSKLEQELQKQRESSAEKLRKMEEKCESAAHEADLKRQKVIELTGTARQVKIEMDQYKEELSKMEKEIMHLKRDGENKAMHLSQLDMILDQTKTELEKKTNAVKELEKLQHSTETELTEALQKREVLETELQNAHGELKSTLRQLQELRDVLQKAQLSLEEKYTTIKDLTAELRECKMEIEDKKQELLEMDQALKERNWELKQRAAQVTHLDMTIREHRGEMEQKIIKLEGTLEKSELELKECNKQIESLNDKLQNAKEQLREKEFIMLQNEQEISQLKKEIERTQQRMKEMESVMKEQEQYIATQYKEAIDLGQELRLTREQVQNSHTELAEARHQQVQAQREIERLSSELEDMKQLSKEKLEKAKLELEEAQDTVSNLHQQVQDRNEVIEAANEALLTKESELTRLQAKISGHEKAEDIKFLPAPFTSPTEIMPDVQDPKFAKCFHTSFSKCTKLRRSISASDLTFKIHGDEDLSEELLQDLKKMQLEQPSTLEESHKNLTYTQPDSFKPLTYNLEADSSENNDFNTLSGMLRYINKEVRLLKKSSMQTGAQQGENV

SEQ ID NO: 1682 - DNA, 93430 bp, Mus musculus
  misc_feature (1)...(93430): n = A, C, G or T/U
gtgctcaggaaagtctggtgaatgtctgttagtctgtctggcgcatgttgtccatttgtctggtgaatgtctgtctgttagtctgtctggtaaatgtctgtctggtaaatgtctgtctgttagtctgtctggtgaatgtggtccattagtctgtctggtgaatgtcggccatcagtctgtccataacttcatgctgtcattcactcccctggcctgaagcactctgtgtagccaaggataacctcacacactatttctcctgtgttgagagtacaggtgtgtgcggccatgccccgtttgtgagtcctagggcctgatagatgccagaccagcactctgccagccaagctacattctggcgcccaatctctgtgctttgaacctgccttgggatttgtctgcccttacttgagagccacccacctcccctgccattcaagcaaacacattccatcctgctaaaaagaaaattaaggttcagaggggctcagccacctgccttaggccacacagcattaagaatagttagaccaggggcccacatgccttgcctgaaacttgggcccttcccaggactatgctgggtgggctgtcagtgtgtgcctgtgtgcctctgtgtgtgtgtgtgtgtgtgtgtgtgtgtgtgcaatcccctgccagcaccctgctgcagccccttcaggacaggagacacccggggctcagctagggttggccatggctgttctgtctgtcacactctaagccagctggggacccacagggctgattgattggtatatctgcactgccccacccagcactgctggtcatgggactgctcaccggctgccctgcagggcagagggaggcggccacatgctctgcccacactgtgggtgccacccgcacggccaggtgctttctgttgtttgcacctgcgagctgccctcctgggaaaggaagatgtctgctgtctcaggggttttagctgaggcctgggacgatgggaaataacctcgcctggtcctgtggtgcttcctccctcaggggtggccacccttctgctcggggtttatgatctccaaggggttatagaacaagatgactcagtgtggaccctgaccttgggcacagtttacccagcagcccctcctgtaacagtaaagtcacaaggctttactggggttctggggtttccacagtgccacagacttctggaaagggatgggggcgcagggagagggatatgggggagtggggactgggaagaggggtgtgagaggaggagggactggggagagggatgtggggggctgtttcttgttaggccagcaagggcttctttgaggaagtgactcagggtggagcatgtcaaagaatcagaggcaggtgacaggaacaaaggtcttgggacttatttcgtttgattatgatggtgatgatgacagttttgagtgagagattattggagctgaagtggagagggtgatccttggtagcaggatgagggtcatgtcttaatcagtgtttctattcctatataaaacattatgaccaagaagcaagttggggaggaaagggtttattcagcttacatttccacattgctgttcatcaccaaaggaagtcaggacaggaactcaagcagggcaggaacctggaggcaggagctgatgcagagaccatggaggggtgctgcttactggcttacttcctctggcttgttcagcttgctttcttatagaacccaggaccaccagcccagggatggtcccacccacaaggggcctttcccccttgatcactaattgagaaaatgtcttacagctggatctcatggaggcatttcctcaagggaggctcctttctctgtgataactccagcctgtgtcaagttgacacacaaagccagccagtacaggttggatcatatagaacttactaaatgaatcttgctcatatctatatgagatcccatatatgggatttattagaatggcttacaagctacagtccagcttgtccaactatggctgtctgccaccaggaagtccaggcatctagtagctgctcagtccacgaggctggatgttgcagctggtcttcgaggccagcctggtctacagagtgagctccaggacagccagggctacacagagaaaccctgtctcgggaaacccaagggaagaaagtgggtgttctacttccaatgatttaactgaggaaaagtccctcacaggtgtgcctagtcacttgggttttagttaattcccgatatagtcaacttgccaaccaagactagtcctcacagtggttttggtaggggtgtgtttgtgtgtgtgtgtgtgcatgtgaagctagaggtcagccttgacacttgaccataacacttggtcagcctgtggcctggcccttttctaaggaattttctctatcttaaggtgctagggagaccccagcttagagattctgaacctgaggctcagataggggaggtgaccaacacaaggacacacactgcacagcaacgcagcccgggtgagccctggcctgcagcagggagggaaggggtcccagccactgccacctgccctcaggagtccagacacacctgccctgcttggcaagctgccctgacagggccttgaacactctgacacacctccctggtggacagggacagggttgtaggcctctactgggaggaggtccaggcttgtgggcaccttttaaaggttcatgtgacatcacatgaccgacgtgggctatctgcctaatcagacagcctggagccattggtgggtgtgaggaaggaagggattgtagagggatggtcaccgattgctgcctcactagcacacctaggagcttccgtgccagatgatgtgttgaggtgtggggagaatgcctaaggtatggtctggcatcagataagactagaggccttcatgtgcacactagtgccgttcctgaagaggccagcagagggtgccaaagcctcttgagctggagttgtgtgcagttgtgagctacctggctcgggtgctgggacccaaactctaattctttgcaagagcagtaagcacccttaatcactgaaccatctctccagcgcctccctctcattgccgacccacgaggcccaagatcccttactgattatggtttaactcagcatgtccaacctggagctggcttactgtctcccccctgcaaacgacttcttatgacacccagtcccagcctggctgccccgcaggtgtgcagtcagtgaaccccatcatgtttgtgaggtctgtggtgaccacatgaggtgtgttctgctctgatggaaatgtgtgtttgggggtgtttcagttcagagcagttcctgatcctgcctcttggtgggccatgattgttgtgcttctgagctatatagcattgctgtcgattagaattgcatgcattgcaaggtgtggctacagttgctgcactccccacctgcagtgtttgagtgtcccccaccctttgattgctaatactctcatgccttttttaatgctcacacaccttcaagtactgtttggcagagttctggtaatgttctttaaaatgtcctggaagattccagtctgagcccctgtttctcacccagcctgtgtggaaaaacagctttatcctaaaagtcaactcctgatgatgggccatgcctaaggactttggaggccgtgggagatggttctataatccattagtgatgtctgcatgaatcaaggcaggcagagaactggatgtcaagtgtttgttactcctggttcaggagcaagttttgtgacacgcaaacacacacacatacacacacacacacagagttcagtgcacatatgaatgcacatgccccaaaagaatttggagaactttgcttacagttctcgaaatctcagaaatatttgtctatgttttgtctccctcccttgtgggtctgggctctcctccaacacaggggtacctgagccttgcaatctatcaaggtctcaggagctacccagcctcctgatgcccgtgtcctgtcccaaatgggacatcaccaagtgtgtagcaggaagattctcacaggctgctggggacccacactgggatcctcacgcctgcacagcaagctctctaccctctgaggattcgccagcccaggatgatcttgcactcgcttggtaacccaggcaggtcttccatcctcctgtctcaatctcttgagtagctagaaagacaagcctgagtcatgatacctggctatgacttttaaaaataactgtatagtttgtctgtttaaatttcaacagcttttgtttgtttgtttggagacagggtttctctgtgtagccctggctgtcctggagcttgctctgtagaccaggctggcctcgaactcacagagatttgtctgcctctgtctggagttaaagcctggtaggggcccaccaccaggctaaactttgaatgctcagagctataaaaccattgctacagtggggcttagaaactgttatcaccccctggggatacctacacccaccagttgctacacctccactccttcctctcatgagtctgctctctgggcacattcacctgcaccccagaacccagagggatttagcggctcagcagagacttttgggcctggctttcccttggaatgcttccggttttgtgcatacaagtgtcatgaacaagtaccttgttcctttttcatggctgaataatattctgctatataaacatcccatttatttataattaataaaagggctcaggacactgagctggcatggatctctacacagagtccctaggtgggacagagtgcgtgggtggatctctgagggtagacccccccaactcactattgctcagcagggattcctaatgccaggccttccttgagatgccctcaattaccttgagattcctaactctagctttgcagccctgtccctctggactgtgcgactgaagctgctttgaggggggacaagcccagccagggcaggaattcagtgccatgcaaggtcagaggacttgataccttcatgccatggtgctgaggcctcacaagggtctagctgatggactgaggcttggagaaactgaggcatggggaagtgaggtgatttggacaaagcagagactggggggcatcagaaggactctgtaccctgcagcatcaggtctcagtagggtgagtgctttctgactgagttttctgtccctgttcccccagctttctgtgagattgaccttaaccagaaacgaccaccagggggcagggtggaggtgctcaatgcagtagatttttaacattcattttgtgtgtgtgttgtgaggtgtcagttctgtattccatgtgggtcccaaggatcaaatcctgggggcccttaggctttatatcaagtgtctttgctcactgagccctcgctcaggcccaagttactactttgtttctaaagcccgtctctttgtcctcagcctctgaggcctccttttccatgaccctgttgattctctctgtccacggagctcgctaatgggccatcctgccgtgttcgcccttgaccctgggatggtttctgttcttggtacccagcgtcagggccatcctgggttgagaccctgctgcatcctgggttgagggccatcctggattgagcacccatgccgcatgctggccacatttatgtttacaatgatgcctctctaccagacagaggaagaaacctgtttttatttctaaaaggaatgtgtgctgggtaggaggtagggtgctctggttagcccacagcgagagagcctcgtgggcttgggaacaatactgccgacttgacaggttttgagacaccgcgcctttggcttgaagtgtctgacatcttagacccatgggtccctgtacacagtagggggcagcatccagtagggcctcaggggaagtggtgagtgggcgagctgcctgggttcacatgcagatgcctggggtgcaggaagtgggaggtgtgatactgactccgtgcccccccctcccgcagcacccactccctgtctctgcacaggaatgtggctcgtgggtctggccggccacgtggtctgtgtgtccgtggaggctgaaatgtaggtcacagatgcaagcctttgaccgacctaagacagcacaggagagttaaaccctccccccgccccgcagacagatctagctcaccagagtttctaacacaaggtgttagactcccacagggttcccaaatctagttttgcagcagccctgtcctttgggactgcacaccaggagctaacaggatgccaggcccacccagggcaggaattcagtgacatgcagggtcactaataaaaaggcacagaggtaacctatgatgcaggtcacctttggagaccctggcatcagtcccttagaggcatccagcttgctttagagtgaggggtcatgtctgagcaccggttcagggcctgccatggccaggaaggggcctacggaggaggagccagagggagttggcaggctaggagggagggatgcccaattgttgcatgaggagcttgggacaaggaactgtggctgggacaaggtggcaaggccctagctggacctcaggcaatgagcagagccagccaggtggaggcagaggttaactgggaccctgcgggtcactacacacatgtgactcaaatgacaggtctccttgtccggcgctggaggccagagtgggaagtgagtctcggtgtcgacaggacgccttgcctccggacagtgcttgggagagtccattctgttgcccgccagcccctcgagggtgcaggcttttcttggcttgaagtcatgctctccctccatagtctgcctgactctcccatgaatgtgcagcctcaccccctgcccccgtgactgtaccttgggccatcacagcaaggcactagagggagggactgatatatttattcctggaggctgaaagcacaaggtcaagaagttggaggcttccgtccctccacagaggacctgttcttcctcacgatggtgcctctgggtgtcctcagatgacagaagggttgagctgtcccttcagcccttccgaagcctgagaagtgggtccctcatggcttcaccttctgaggctggccccacgatccagaatgagcccacgtcgggttccctatgctgtctgcaccactggcttcagacatcgccagtttcaagatcgtaggcggaagcatagttttgggggtcgtcagggtccggtggggagaggcggatagggccctggggtagggcgttcacataatacatctaataatacatcgtaatctgccgttttccgtgcgttctgtctacaccctgggcttgcctggtctgagtttggaagtttcttttttctcttgtcttcccctaccactacctcccatggtgcccttcactgtcatcgatgctccgccccctctactgaggctccgcccctatgcctcctgctgtcctgtgagctccccagctgggccctgttctccttgtccctggctccctgctgggccatctgtcttatgtggctttggggttcctctctttcctgcccatgtggctccctgtcattcnnnnnnnnnnnnnnnnnnnnnnnnnnnnnnnnnnnnnnnnnctctgggcagtcagtcctttagtcagcagtcagccctaaggccctgcttctcctcaccccgttagcagagtgcccagtcagtcagtcagtcagtcagtctgtcagtctgagcgcagagtacaggcgtcacctgctctgtctgtcagtcagctgctggggcaggcactgccttggacttgtgtcagtaactaagcatggcccagccctccactgttctgtcagacagctgtcagtcagagagcagggcatgcgctccaacttgtggttggtcggttagtgagtagggcgggcttccaactgttttcagggcagctcctcagtgaatgagcagggcccactgtgttaaccagtcagggtgtccaggcccagttgttagggggcggggctggtcttagagggcggggcccggacaactgctctgtcagtcagtcaggggcgtgacctgccttagccagagggcggggcctggcctctactgttctgccagtcattcaaggggcgggacccggccacaactgttctgtcagtcaggggccggagcctgccttagccagagggcggggcccggcctccactgttctgtaaatcaagtcaatgatcaaaatccagcctctactgttctgtcagtcatgggtcaggccgtcctccacttttttgtcagtcattaaaggggcggggcccggcctccactgttttgtcagtcagtcagagggtggggcctgaccatatatatatatattttttttatcattcagaaggcagggccagcctccagtgttctgtcagtcattcagggggcggagcccggccttcagctatgatgcctgtccctgagactgcccgacctggctcagcgctgtaaccaaggccatgtgatgagcagctaaggcccagacctgctgggtgaggggttctgagagcagatgaacctcagccccgcctctgagggactttgaagattattgccctgcagtgtccctagcggttaagcccagccgccatgttcaaggcgggttttcccttagctgctgtgcctctctgggcaggtggcgagtggggctaaagtatgcatcaccaaggagccagtgtgtccttgggggccggggccagcctctgcttctgctccgtcctgaatgcatctcatatcactttcctctctcagaaccggaaggacctgggtctgcctgaaagccgggctggtctctggagggtggcactgagtaggcgtccttgatttgaatcccggctcccactgaataagccttcactttgagcctctctctctctctctctgagcctctgcttccctttctgtaaaatggggataactgagctcttgccaaggctgctagtgggaggaacacacaggcttgaggccagccctgtgagcctgtgcccggccttgtgagcctgtgcccagctgtgccttccctccctgtaaggtctccgggaggaggtttgctgggacacatgttctattcctctcccgtgtaatacattcttacccacacacagaggcacacatgcgcgcgtatacacgcccacccacagtcattggcatcatgcgttcatagttaatatccacacacattcccatgcccaccctcacctggcacgtccacccctactatcattctttacatctcaaccccacactgccccctgcacacccccaaacctgccctctgcgcacccccaaacctgccccctgcacaccccccaaccctgccccagcccatcccccaaccctgccctctgctcatcccctatccttgcccccttcccatcccccaaccctgcccccttcatacccctaaccctggccctccaaccctgccctcaactctgtacctccaaccctgcaccccccaaccctgcccctgcacaatcccccaaccctgctccctgcgtgccccctaaccccaccccctgcgcacccccaccaaccctgccctctgcacacacccccaaccttgtcccctgcccacccctaaccccggtcacaggtctccctgggccacatgggcgctgtggaggaggagcaccctgaccctgcccactacccaacctttgtcccgcccctcctggtcctgcccctcctgggccagccccccgggatgctgacacaggctttggggactcggctgcagtttcaccccagaggtggccgtggccgcttacagggctgtcaggccacctggctatgagccctggcttctgaaagattcatgccaccctgaatttgactctgggggcggtgagaggagtggggagggaggagccaccccctccagggacaaggtggaagcgcaggcacgcgcgtacccacagtctgctcagagatggactactactattgccccagcctgctgaaactgctgcggtacctgtgggtgagtgtggccgcaggggtctgcagcttgtctgagcagccgagcagccgcctgtgcctttctctggactgacagtgactgttggaggggagggagtttgagggaggtgggcagcttgggtgggagcgtagtctaggagggacagcctgcagtcctgagctgggactgttgccagcccagtgggttcgtggttccttcggagagctcgctttccaggcaggggtgggggtgagggtgggggtgggggctgggcttcttcctgatagctttgtttgccttccccgccaaacttggcaaaagtgaacctaggacccatcccgcccccactcctacatggtatacagcagaggaaagaatccccccagaacgctgtgggaaccttagttggggttcccgcctggaagggctctgagggtacctcgttttgactgagacagatctgtgtgtcctgggcttgtcccctctctagctcactccttcctccctggtgggactaaggggaccgacccaaatgaaccagggactcactgtagtgtttgggttttctagaactattgctactgagttaaaaattcccagaagggaaagtttggaaaagtgttatttttttcctttctttctgaatatttgcagatacttgagatacttgccacacagattttcctgagctaaaatgtagcttttggaaacattgtctctcttagcgttgcccgccaaagccctcgtggaatggctggaaaatgggtgttttacagttcctgatgccctcagatcaccgggaaacaaacccctcccaggcatttattgattaactttccttgtttgttattattattattattattattattacaaatgtaagctacagatgatgcacagaacacttggaatgcgccagaacctaaggagagagaggaactaaccgttggctcctgtttttcctttcctttcctttcctttcctttcctttcctttcctttcctttcctttcctttcttttcttttcttttctttttaagacagtttcattctgtagcccacgttggcctggaactcttgggtatccccctgcctcagccacccaaacagtagaggtttatgccacatgccctgcttatttatattttgaagtctgcagcccctagggtcccagtgctcagctgtgttttggtgccagggcagggaggtggccaagagacagtgcccgcttccacgcgcacatgggcaaatagctgtggtcatgtgttcatacccaccgacagcggcagtggcaattttgaggtcaagtttgacactctgaacacagcataaacaagatgctttggggatttccttagggggctttgaatgtggttgtatgttggcatgcatgatggagcgtggtgctgtggcagacatggtcttctgggatgtgaagtctgtcagagtctgccaagatagccctgggggatctaagaaagggttgggggagggtgtgctgggcagaagaactgggagcaaggaggtttgagcatacacagcaagtttcatcacaggaatacagacagcctagcctgtctgaggtctgtgaacagcctcagttccttgaaccaaaagaaaagctgggaggacaggtagtttaggtcttctgtgggtgtggcatggtagaactctatagtcacctgggccctactgctggctcctggctatggaaaccacctgcagtatctctgtcccaccaagtcactagactctggccagcacaggtgtctgagaccacggcttaggaccagccctccgcctacagagttaagctggacacgcctaacccatgtcctccgtgggaagcctggaaatgtgggagacccacgggctgcagcttagcttcctcatctgcagagcaggctgtacgacctctcacacttccctctcacaattcctccaggccctcacttacatctgcagcccagggccactctgagactgctagggcttccttttctcagtgacccagtgtcaggttcagagaggccgtctagcggggcctcagcagggagccaaggagggtagtgtgccctctgcctctccccagatggtacatggctgttgtcatcctgtgggcgcttggatggctgtcttcccatctctgcactcattccccaggtcaccacccaccccgctccgtgcctctgtataatctgactttagattgcacctattactgagatcatgcagtgtgaggctcttacctaatttggtgtcttttgtgttcatccatgatgctgtgagtggcgaagggtgtgtagtgtttcattgtgtgtgcatgcaagcatgtgcgtggtgcagcctggtgacctgtctgtccacttagattgcttggctgtgacctctctcgctttgatgagcgaggaggcatgtgtggtctcctgtggagcatgggagtcatttcctttgtgtgcatgcccagagagaggatagctgctcagcatttaatgctcagcattgctgtgtgcacagaggaggcgtccgggaacactgaggtgcagccttccggcagagaactggaacacaggggctggcgagcactggctgctccctcggaagccccacatggagggaggctcgccaccatctgcaactccatttccaaaggatcctgcaccatcgtctggcctccatccacaatgcaatgcacatgcgatgtgcgcgcgtgtgtgcgcgcacgcacacacacacacacacacacacaaaacaagtcagtagttggaaggattgggaagggactcagctggcttgtctggcacacgtgcagtcagttctgggttccctccccagcactgtacaagccgtatgtggccttggtgacacgcacccctgagctcagctggggaggacagggggattaggagttcaaagtcatcctcaggtacatagcaagttagaggccagcctgagctacatgacatagctccctctattccctctgtccccttccaagcaagcaggggatcatctgtatgagctcactgctgtgaaactccagactggattctgagctctgggaggcctaacttgccctcctggggatgcttgacagtctgtctggagatatttttggttgccttaactgggggtggagggtggggactggtacttgtggtatgttgtggatagaggccaagggtgctgctcgatgctgtacaaggtggggcagcctccttccaatcccttagcaccatcaggaccagtcatgaccaacacatcaagggaaatgctgaggggaggactcatcaatgaagataggggaggattgactcatgggtagctgaagggaggactcaagggtagctgaggggaggactcctgggaagctgaagggaggactcatgggaggactgctccattcaaaggctatgtttccccatggcatctctagcaggatcccagtctgcactttactgtttactgttttatgtgggaatccacaacagggcctcacaaccgcccactgaccaagtgagtcctggttgtgagctcacaagctcttgtgtgtgctcactgacatgggcagtcacatctttaaagtgctcgtgttaggccgggaggggggggggtgagcctgtgtcatccctgcctctcaggaggctgaggcaggaggatcaaaggttcaaggcttgctggggccacagagtgagttcaagcctcagtaactcagtttctgtctcaaaactgaaaatgtggaggagagggttgtggatttggctcaggagaagagctcgtgcccaacatccatgaggcctgggttccatcctggtaccacagacagacatctcagtaagtaagcacagggtctgatggccgtgctccctcctgtcctcggccttgattaatcacccagtccagtccttccggcttgagcaggattttgctctccggtgttccccgggccctttaacctcagcactctcagatctttctcaagatttctcagtcttcctcaggtccccgggtggcctggccaggagtggctacggcagatgtctgcaaaggggccatttgtagggctgtggggctgtctgcctgtgggtagcttcctgcctacagcctggtcttgcacacagccccggagaatgaggcccccactcccacccccaccccccacccccagctcctgggcctgccctgcatcagctgggaagtgggaggggattgagtttctgtcaccctgtcattagtaaccagagctggtggcttcctcttctggggctctttggagtcacttaatcttgctgatgagataagccaggtagacagaccctccttgggtccgtgtgtctgctgctgggcgtctgactggacactgtagcccctgctgttcttctgagccctttcgaagtctcctggcacgaacctcatgggtctcatgggcaactcaggccatccccaccctagccactgtgagcagatctctgcagtacctgcattttgcagctgaggggaactgaagcctgtgaggtttggtatcttattcaaggcccccactgggacgtgtcagagtcagtatgtaaagccctggtcccatttcaaccacttctaggcactgaatgggaacacagaggctgccagggttaaggtggcgtggcaagctctggtgaagcccatatggagtgcataagctttcaggatgacgtagatggcaccagggaccccctgggtgttggtgggaagaaggcctggcctgcaatgtggctctagccattcctgacggggaagtcacacaactgctctgaatttctgcttccttgtctgtggcttgggctagcaattgtaggactggttaggggctgggctttggggaacagccgtgttcagatgcactttggaagagatggaacacccccctacccccaccccccacacacctctcactattcctgacctatccagcttgcggtgaggcctggggatggtcctcagtgggtccctcagcttgctcaggaagctgtaggcccacagagctgcatggtgggagcccaggacagtaggaacacaacacataatagggaaaccaaggcagcccatgctgcaagggccgtgcctggtctggggggcgggcggggtcactgtctgtggaatgctggggacaagctgcccgcttcccactgtggtggccaagtttggcctgtccacattccaccccactagcagagcttgttctttcgatggaaaatgtctaaatgtagctgnnnnnnnnnnnnnnnnnnnnctggcttggctctcatcccccccccctcctccccccccttgcaatcccccggcattcttgtgaagtgtttgcttagccgtggccctctgcagcctgtggccccttcctggtgatgacgtcggtaataacagtctcagagaagcctgcaagacgcccccccccatggtctccacatgtgattcatcagtgctcacaacagccctaaagtggatgctgtcattgttattaaatacatggagaaactgaggctctgggagatccagtaactccttaatattcagggagaggctgagctggggtttgaaccagggaggtatataaaaaaagttaaatttggtgactgtgccgtttcaccatgctggaagggccatgtgtggaaggtcacctccgtcatggccacgctgctcagtgggtgctcaggagatgtgagcactgtccatgcgtttgagttacagatggccaagggctgcctgctgcttgctgacaaccctggaacatgttgctgcttctgccgtgggcctggtcgaggttctgggtctcacttcttaccctgctaaggcccccgtttagccttgctcactgaggtctgtggctgaaatggaagaactggctatttccagtcctagccctgcacagaggtttaagccacaggacgtgagtcactgaggttttcagattggctagagtgtgggttttcaagtctgggtctcaggcttttggtcctggctggttcacttcttagtgcaccacaggggcctcggcccacccttcatctctagaacctcagtggtgttatctgtagaatggggttagtacctcagcttcctcttgggcttcctgaggagctggtgaggtggtacaaacaaggccctgtgcacagtgggtgctgggtaaatgatagcagtcacagtgggtgctgggtaagtgttagcagtcacagtgggtgctgggtaagtgttagtccatgccagtgtgagattcttaggatagtgtcagtgccaccttgtactctgtgtgcgggctccctcagccagcaggatggtctacttcagccagtggggagttgagccaagtcacagacttgaggaagttgtgtcagcaggtggggtgtgctgtggaaaggaaggcagaaggcaggatactcagctggggatgactgggctgggccaggggagcctcctgagaaggtatgaagggaagagggcagcgggcaaggctgggaggaaatgaagccctacgaagggcctgtttgaaaggaaagactgaggttaacccagagctggtgatgggagggagtcggcaggttagccaggagatgcttggtgtgtagccactttgagggcattgctaggaccttgaggtcactggagcctcaggggagaacactcagtactgaactatatacagtttgggctttgaaaggaagtctggctgccatgcaaggagacaggaggttgtggggagaccccaggccaaactaagacagtcagggagaccacaaggggcccctggacattcagtatccttgaagtaaaagcagtggaccctgctctgaggctcccaccccttgcgcattcttcccatggtatccaatcctaggaagaggcacccagagccttttaatcaggacagatctgccagtggctatagcccggattcagccacctacactggttgctccttctctctctgtgacagtctcatgcccacgtcgcccaggtgcgcatgttggattcacactcatccagtggtctagcctccagctgcactcctagcccatgttccagactcggcctgctgtgccccaagcatagcgtgacccctatcctacttgttgtgcatgtctctagcatttgtcatacagacacagaaaggtggagatagactttggattgctggtggcccctgagcctggaaggacatctcctggtccccagaaggactccatatgttaccatgatattggacgctttgtgccatgggagctgtcctctcaggcagagcctccaggacttagcccctgctgtttccctgggtttcagatgttctaggcctggagatgttccaaaggatgtgttagtcttgtggctgtccaaggtggttacatggccagagtacttctgggaacagttgctgtgtggccctgagcagttgcttgcctttactgagcctgaaggtttgaatcagagtctccttaaagcccgtgcacatgttccaagttctagagctccagtgaaggggggtactctgtgggcacaatgacctgggttcaagttcaggtctccctcccgccttgcgatccccaaaggctgtgtatttcagcctttcttctcatctgcggggaagatatggcacatagttggtgctcaataaatgggagctgctgctactgtctttacatacattccctaagcttggttatgagacccacatggctggagttgctgccagctgatcttctggaggagcaattcccaggttggtcagtagagggcgccctggtcataagctggctggacctttcgaaggatagggttagctctcaattgttcacgtgtgagcttcctggggagagtaatgggcagagggacacaacagttcctggcggggagtgtggagggtatctcgtgtctgtcactgtgattggcgttctgagtccacactttagatgtcagatttgtccatctcaggagcagatgggaagggtcaaacgtttgcttagagtgattgccattccctgaggtgggtggaggctgctagcactgctgagggagaagatggagaggaaggctctccatctgggggagcaactggagggtggaatagcttgtggcaggcaatgtcaagaatggtgacctgcgcgttttaaaatagctggtagagaaatttgaacatctcaggtgggtaacacccgttatctgagtgggttgctgggtgctatgcgtttacactgacgtgtcacccgggactccataaatacatacagcatgctgctatggagataaaaatgagagttaggtggtagtggcagagacagggggcatctctgtgagttctgtgagttcaaggctagcttgggctacatagtgagttccaggacagccgggactatacagagaaatcctgtcttgaaaaaaccccaaaataaataagggtgtgtgaaatggctaaaggtgcttgctgccaaacctgaattccatccctgtaactcacctgctgggaggagagaccagtcccgccagttggcctctctcttccacgtgctcactaatagatacatgtagcaagggaattttaaacagaaacaaaagaaacgctctgcaggtgggagaacctcatgttttctgtggagatcctggctggggcgcagctgccctgtgtgctggaggttgcctttctgcagccaatggctctgtgagcaccatgtaactgccactgttgcctgacatgctaatatgctctaacagagatgtcccctcctgaccttatgtgctctgatggagatgtcgcctcctagaagcagtcttcattctcttcttcctggaagagatgctggaaagaagccccatcagaatcccaggcctggagaagccccgccctgtagttctgccctccccctcccccaagtgaagatgaaggtcttgggtggagggttttgtccttggctccctctgtgacatctcagaatcttttgtgtatgagcttccctgatgcctgagctctccttccctcagcttacctagacacccccccccaaaacacacacacacacacacacacacacacacacacacacacacacaccagttgcagagcctccatgatcccagcacttgtgaagcagaggcagtcgcatcgaactacatgagcactcacccccagcctcaaagatacttgaatcggaagacccaccctactggcctcctttagcttacccagtggttttaaggctcttcaaaaatttagtcacattctgagttctgtgacgggggtgggnnnnnnnnnnnnnnnnnnnnnnnnnnnnnnnnnnnnnnnnnnnnnnnnnnnnnnnnnnnnnnnnnnnnnnnnnnnnnnnnnnnnnnnnnnnnnnnnnnnnnnnnnnnnnnnnnnnnnnnnnnnnnnnnnnnnnnnnnnnnnnnnnnnnnnnnnnnnnnnnnnnnnnnnnnnnnnnnnnnnnnnnnnnnnnnnnnnnnnnnnnnnnnnnnnnnnnnnnnnnnnnnnnnnnnnnnnnnnnnnnnnnnnnnnnnnnnnnnnnnnnnnnnnnnnnnnnnnnnnnnnnnnnnntcaaagcttccctctgccctgttctcaccctgttgaaggtatagattgggaggggaagagggccaaccctcagtgctgccctggcttgcagggccccagaggctgggctgtctggctgtcttcccagaggggcctgctggggccgccctccctgccctgacgcctgcccaggcttgcgtgagcagccggggcccagtgaaagcggcctttgtcctctgggacaggtgacctgagacttgtagagcatagcaggtggcatgccatgtgaagccacggtcatcctgtgacccacacagccgactgggcaggctcaggggtcagggcctctgaagaggtcgggaaggcagatgctgccgggttcccgggtgcacagcgtgggagcttggccctgtgtcttccgatttcctggatcctccgcagaacacaggcacgtgtatgtgcctgctagcttgtcctgacaagccactcgaaagatgcagccctgtaactatctgttgccacactcgtgagttcttggggcaggacacagttgtccctgactagggatgggtcagctgggttccccagggactcagaactaagtcctgtagaaacgttgtcactgtgcatgtagggccgggggtgagagagctggtacgaggaccacattgtggaggcagccacagatggctcctggcatcccttctgctctctgtggattctggtagccacagacctacttcctcagccatctgggcggtgggtatgaagcctgctattcccctgccctgtactcagcctgggacggtgtgggtgctgaaggacctgcctgcctgctgtctgcttccctgtgcctccacactattggaaacatctttccccaagcttggctgtccctgagttctggtggattctctcatcttgatctcttaagatatgatcatgggtaccaagagatcccttcatggtccctgtgtcccctgccagatcagggtgtgtgtgacctgcttcacagtcacccaaatctcacggagcttttgaataactgagaggttcttgctgtcctgacagagcactcaggcctgactggtgaagtgggcacgcatcttatgtcatccggccccatggatatgaacttcattcactagcttctcagggcctggcgcatagtagatgctttggtggagtgaacctatcagaggggaaggaaggtcacaacgggccttctctcctatgcacatagtaggctggttgcggttggtgcatggaaggatgcagctgaggtggtgactgtaccccagacctgtgtcatcacacagtgggcatccaggagcccgcccgtgactcagggtgaatgttcaagtaccggctgcaccataactctgttcaccgtgcttggagaagtgctgggtatacagaaagtgctcaataactgcttatagacctgaatgagaaaatgagcgactgacgagtgatcaggatcccttgttcatttcctctgttttttagtacaagctcctgcacacagtatgtgcttgttaatagtgagccaatgacaaagtgagggttgttaattttttctacaagtgagtttttttttttttcttttgagaatagaggtcttgttggtttgtttacagtgaatgaactgggctcagtgcacaaaggtgctcgctacgtgcacactgtactgagtgagtagctgaactgaatacatttctgaagctggccgagacttgttttgttgtgtttcctccacttctcacacagggccacgcacatggcaggttcgtggctcatgcttactgggatatccggggcccctcaggggtctctgtctctgcagaatggatggagaagaaaagccgggtggggggtggcactgctgctgccgcccttcctgttgttcaggtccacacaggtggacaggaaaccgcacaggctgctgggagctgctgcccaggctggccttgaacggccgtggcaccctgccaagcatgctgctaaggagcagcacccccggggacccctcttctcagccttgctggctgttctaagtttagagcaggctgtgccagcctgcagaagccattgagctgctgtgtctcagtgtcgaggcccactgaccccgaagcctgacccaggcttcctcagagcccgctgggctccatgcttgcacaacagacctagctgccctgaagtcgagttccccaccataaaagggcataaagaggttctttctctgtgtgctcaagggatcctgttccccaacactggcttcatgtctggcttcatcagacccttccctctgaaggaccacaccccagggcagccatcttgctgttcataatgataggcctgtttctccccagtgcagtgtgcggggcaggatgcaagctgggactcacatggggtgaggaggccatttttagagttaggtagtgttcttcctctacccgaggactggggaagagagcttgtgagtcacggagcagagcctcagtgcccagagaccaggtcacccagtgtggcgtctgaccagatgctgtggtgccagccagcttcgggttactgactcgggtgcttggtgtctggtgtcttgatgagaagctctaacaggaggaaggtgcagtggtgagcatctgccattgcactgagagattggaggcagaagcagcatgggccacatagtaagaccttgtctgagagaaaagatggctgttgtggagatgggatgctgtaaatgtggggtgcagtggtggatgtctaatccaactcagacccagggagaggtgcactccggggcttgatggatattcaatcagtgagctccaggttcagtgagagaccctgtcccagaagatgagagagagtgtgtagaggaagacacctgattgtcaactcaggccttcacatgattgtgtgcacacacacacaaagacatgcacatacagacacagattctcagacactcagaatacacacacacacacacacacacactcatactcacattcacacatacagacacagatagacatagacaggcatacagaaagacacacacagacactcacacacttacactcatcacacagacacatacacacactcacattcatatatatacaaactcatacacacatgcacacacatacacagatacagagacacactcaaacacactcatacacacaacacacactcgtacataaactcacatacaaacatactctcacatgcacacagacactcatacatactcacattgcacacacactcacacatacacagacatacagacacacatacacacactcctacatatagacacatgcacacattcacattcgcacatatacatagacactcatatacactctcatgcacacacactcacacatacacagatatacatagacacacacacccacacacactcacacatactcatacacacttaacacatacactcatacacacactcacatacaaacatactcacactcacattcacacataccctcacacatacacagacagacagacagacagacagacactcacacacacggacatggccttcttgctcacgatttgcggaacccttttctaagggccttgtgggtaccaagctccaaggtgggatccctgggtgcttcctcacccccaccaggagcggtgacagctacctgcttacatacttgttcagtgagcacctgctggtctcagacacctcctctgggaatcctggtttcacgtctatccctgggctaaggtgctgtagccagaagcagcttcggggagagaggatttgtagcatacactcttatggtcggccatcaccgagggctgtctaggcaggaacatgagcagatgtcacacggtcatgagctgagagaggtgaactcatctttgctaatttacggcacagggcacccacttctacagttttcccattgactgaggctggggatgagctgtgtagagaggacttaggggcatagagactggacaaagttctctctgaccgctgggccatttcctattaggaccctgggctcttggggactacaggagtcctggacagcaatgatctttgagctcagtaagcagtttcctggcctttcctgtgttccctctctggtggtcctgagccttttcgtcacaggctccagacaggtgctttctatgtggtgaggatgccctgtgcagtgccggggccgatcgagtttttttttctgaatgccagttgttgggaaagggcctgaatattgccttccaaagtttctatgtgtaaagtcagagggagataaaaattgtacttgaagatttcagttgccatggctaccggggcacagtgagccttgttctctgtcacacacggcctcctcaggccttcagcggacatgtcttggtgccaggatgtggcatttagataactttcccaattaggggtttcaggtgtgtgaaggtcctggggtgggaacaagtaagggagggctgaggcccagtggcctatgtgtgtgaccagccatgtggtgcacaagggaagagaaagtgggacttttggggacaaggcagagtgtctgtgtgtgttctgggtaggatcacgtgaggggcatcagtgaacactgcatggtggggtacaggagtacaaagttcgtggtggaggggtcagatgggggagacctggaaatgggtgtccagtgcttacatgagagggaagtgtgtagcagtggccaagttcacatcgaagcaggagggaggttgacgggaagaggaggcagggagaatgctacactcagacacagccaagcggtaccttggagcctggagggcgggaagctggccaggccagaacttgcttcgggggtggggtggggtgggggtgggatgggtgggtgggggagtgggactggggtatcactaatctcttccaggtgggtgagcttgtctgatggggctcggtggcagaggaagataggtcctgctgtggtgggaggtagtgtagaagtctgagagggagcggggaggagcaaggccggccccagagcagggctcatctgaggagtattctgtagattaatagaaggcaaattttctagcttcagaagtaaattgggcctgggtctgtggtgctggtagtaacgttcactgcatgctggatgtaagccaggctgtccctgggcctcgccagaacctgcggctccatggctgtttgtgttccccgtctcagattcaccggaccaatgtcctcaccagccctggcggcctttttgtctgaggctgaacatgacatgacctcatgactcttggccaagcgatgaggaggctcactgacgtacctggttggggacccgaatggggctgtgttggccagatatggcctgcgaatcaagcatgagttttaggttgcaaaaaagctacatgtgacttgcaaagccaaaaatagtcaccatctggcactttccagagataatcttaagtcccgaatccgtggatcagcctaggttcttcctatcctagttctttccagaacagaacagccccaaaatagctgccaaggatccagccatcacaggaaggcttggtggcgctttgagggctgagccaggagagagggaggctcctccctggtacctgtcccctgctctggtgtcccctgcaatgatagggaagtctgagggttattgtagttaatccttagaagatgtctgcaggagagttgtgctatagcagccctgggggcctgagtgcacagggtggccaggctgtctcctggatggcactgggggacttagagctgggtatgggtatggcatggtgctacaaacagatcagtcagtccctctctccatccctcctgccaggctctatctttgaagtcagaccataacacttggcacttcccagctgctagtgctcccacccttagagaggcagagcgggacaggtaagccacaccctgtggcagcaaagcctgggtgcaggcactctgagcaaagtaggtggtctggggatctcggactctggagcaggacacttgtaggcctgtggggagctgtagtggagtggggtgctggggatcctggaagtagggagattgacagcttgctttgtcttgaggtgtgtgtgtgtgtttgtgtgtgtgtgtgtgtgtgtgtgtgagtgagagagagagagactgtgtgtgagagtatgaatgtttatgaatgtgtgtgagagtgtgtgaatgtggatgagaaagtgaatgtgtgtgtgagagtgtggatatgtgtgagagtgtgtttgagtgtatgtgagtatgtgagaatgagtgtgtgtgagtgaacatgtgtgagagtgtgtgtgtgagagtatgaatgtgtgaaattgtgtgtgtgtgagagagagagtgagcatgtgagtgtgagagtgtttgagagtgtgagtgtgaatgtgtgtgagagagagtgtgagagtgtgtttgtgaatgtgggtgagaaaatgtaaatgtgtgtctgagtgtgagagtgtggatatgtgtgagtgtgagtgtgtgagaatatgtttgagtgtatgtgagtgtatgataatgagtgtatgtgagagtgtgtgtgagtgtgtgtgatagtgtgactgtgtgtctgtgtgtgagagtgggtgtgtgactctgtgtgtgtgtctctctttcctcagacgagctgccaagattatgtgctaaaatgtgctagaacatgacctagggtgactcctggaacagtgtgagtgagtgagtgagtgtgagtgtgtgtgtgtgtgtgtgtgtgtgtgtgttgggggagatggtgactcaggagtggagctgtgagaagcctgtcctccagcagccaggaggaggaacagccttactgctgctgctgctgctgctgctgctgctgctgctgctgctgctgctgctgctgctgctgctttgaggagaggggtggggccgggagagccaggataaaatgatggagttgggtgcagacaccacagtggtcaccattatccccttgtgaactgagccatggcaacacgggaacacaggtctcacactcagactggccaccaaatagacatcccccagcctccactccctgcctgtttccttgtctctacggtgcagtgcacacgtgttttcctaacacacaggtcaattttattctctttaccaaacataagcaaacagagagggcaagccacttgcccaaggtcacacagtaaagacccagagaaggccagcgatggctccgtgagccacacaggcacttggctttgaacaagtcttgagtctgggccaggtctgcacccaccaccagccggaatggttccctcactgctgcctggctctactgagccttgtctgtttcacccctggggcggtactacaatttcccataacttgggctgaaaaccagggtggtaggcagggaagaggtgtctccctatgtgggcatagtgtcctttctcaatccttagtcatgagcctcagcaacggaaaggttcagcaaagtgccttgctctgctgaactgtggtccgtccttctctaggagagtcccagcctcaggtgctgagtaaccggcctatcttccaggaagttgctggtccacacccagggcagcaaatcagccggttccacagtcaccaccaccccagctgaatcccccaaattcctcctaacccattgtcctcttcactgtgaccctaagatcctggggtgctccttggaggggggatagctcagctatgtgtggctgactgacagctcagaaatcaatacctctcaggggccaggtattgattcctccagttccttctggtggctcattgatccaaaaccctgaaatccagtctttggtggcaagaatggtggtatgcagctctttctgggtgccaggcaggtaggctgtgtttgaaaccctcctgcctgtgctaggccctgcttgcttggctccacagtgagaggccactgaccgtaggcctgccttgccacagcagggccatgcccctgcattccatagtgcgggaaatgcttcccacgggagtctggtggcccacgtcgctgtttctagaaagtcctcctttctgggtgatcccctccctctcccaagttaattaacagtgcacctctgaaatgacggctggcgatgttgaatacgcagacacaaggaagtggccatgtgctcagcgtggttataaataacctgggtggacttggaggtggaggccaagatgctacactttcccctcttatcagaactccttccctgttgctatgggaaccagcctagggatgctgggagttctgtgggttggtccaggcctcagtcgttcctgtttacatggtgggtgtggggagtgtctggtgagggttctgggtgatccagatgcagcccaactgtccccgggggctcagcaattggttggtaaactaagtcatggccagtataggctctgtggtttgagggaggcttctcagaggagagggctgtctagacaacacatcctgatcttggaccaggagtgagggggtagaagggtgccccagaaagagggaacagtgtggcagcggtgtggagcagaaagggcctgggcagtttaggatgtccaggatggagactcatccagtcagtgtctagggcaagtaggaaatttgtcggtgccggggaagtcacagcccgataaagtctgcgtcacaatcacgtgctacagggaaccagaggcacctggtaaatttcccatggggcccaggggatgcatgtgtggcctgcctctgagatgatgtctagggtctcttggggtggtagtggtgtttgaacaacacaatagacttgttgttagggctcagtggttaagagcaccaccaactgctcttccagaggtcctgagttcaaatcccagcaaccacatggtggctcccaaccatctgtaatgggatgtgatgccctcttctggtatgtctgaagacagcgacagtgtacttaaatacataaaataaataaatcttaaaaaaaaaaaaaaaagacaatagactcagcagtcaccatctctcttcagacgcccgccccctcctcccagaggtcaggccatatgctgtgccaaactgtctaggttagcttaacttttttttttcttttaagtaataaaatttttatagagaattcttggcatggtgattatctccccgttctgcgagagggacaacactgtaagaaatcacagagaaatcactgtcctaaccccccctgctcaacccgtttaaagtgagtgggcttcacacgacactttccggattaggcctcatgtagcccaggctggccctcacactccctgtgtagccaaggatgactctgaaggccccaggtctcagcatactgacaaggaccagaagggaccctcctgagagaatcacaacggccccttcacacccttgcttgagtgagcagctattgggcataagtgagctggtctcagaggagactgcaagctatgggtcaggcctggggccacagagctccgtcagaggagagtagactgggttttccccggctttgcccaccttccgtgtgtgcacctggggattcatctccaggctgttagctggaatcgggtggggggtgggtacacagtgtgaccttgtcagcagctcctggcatctgggggagccccaggaacgcagagtcccacagagtggaagccatagccatgaaaaggacttgggggctgctctgacccttcttagggtctggagtgatgtaagtgtgacttctggcttctgcgctgaggtattagggaaagacaagggaagtgtcggagccagaggagcctgagatcaaatcccaagtcttgctcacccactcagagaggagtgtggttctggtgtcctctgtacctcactgccctgcagggtcgtgagggtggccgtgtcgtcagagctcacaggtgctcacccatgcagttgttccaagggttaaatgaggtgagaggtgtgggccgctcccagcctcgaacacctttgagtgatggtcttattttacatcattcttatcagcagagtaatagtccacttccttggcttgttctcatgacccaggacagtgaggggagagacctcctgggcagagggggaaaccaccctgggctgtgaggacagagggaagccaaggaggaagggaaaaggtggccttcactctggaaagggatctatgtagtgtgtcaacctcccagagtcaagactaaacatggccacacttctggccatttcccatttcagtaccggaaggactcctattcatccatccaaaccccttccagataacccatctcctcattgcgttgggtttgccatctgtttctgtctcctggctctcaggtcccaggcatctgttggcctttccttttttcactagaccaaggaaaggtgtatgcgtgatctggaaaggaatggtggcacctgggcttgagctggcctgtgggggtggggataggggtgggggggaagggctttctccttcagcagtgtagatttagagaggcaggctgagctgcgcagggagcgaccgcagttctgttctgtgtcagctcagatgtatatggaataactattcattgaatgaaggaaggaaggaatgagtgagtgaatgacaagttcttccctttgtgagacccgtgggctctctgtctcgagtcacactgtggtcagcatcctcggttccttccagggccccacaggtccccagttttgcagatttcttatgtaaggaagatacagtttgctttcagaatgcctgcggcgtccccagagtttcctggagagaatagcatttgcagaaacagccctctgggggggacgcctgtgctgccccagatttagtagtgacgctttttatagccccactcccagagcacgtggtgacactggaagccggagcaagcagccagcatctggctcccggctctctcctgctcttgtctctccaaaggaggcagaaagccaagatccacagcgtttcctgcaccatgctggcaactctatcgcttacagctgtgtgacactggactggccatgtccatcccttctccctgcctcgtgttatccatctgtaaaatggcatggagcttcttgcattgttggcaggagcagatgaggtgtgtgacagagacacggttcagtgaggcagcatggtggtgcatgatataatttgatgacgtaatggcttagcactgtgatgtcacatggtattgcattacagtgaaatcatcatcctgtctgtgacatcacacatggtgtgtgtgtgtgtgggggacaaggtgtcctgatgtttggccacagctggtgtttggggggacagcgatgacaggggtgggggagtggagtgcagtggggctggtgtttatgtgcagagacggtggggactcctgtgctggtggctaacatggaggccgggccatagacttgagcaatgacagagtggggtacacacaggtgtctggtgagctctgtccccagcatgtccccgggctggtcttcctgtgggcaggggacctgggttctgagttctttgctggctgttcactgagatatatggtcaccctttgtacagccctgagccagaccgtgttctggggatggcaagctggactcatgggcaaaaaaccaagtgcaccctctagatgtggggacagacgggaaggagtcaaccagccacatgcacaaccagcaaacacttggtgggtttcatctgtgagagaaatcaaagaggtttagttactctctcagtggctagttaaagccagttgcagattgtaacttggtttagccagtccagtgcagggtaggaagcagggcaggaggcagggcatggcccatggggccatcacttagtaccaggaaacaagaaaacagctagtggtcaggataaataattctttaaatgagtatatatatatatttttaagtcaaagcagaatcccatgaagaatacagacttaatactggaaaggcagagtcgatgtgatagagttctcctccatcctggatccagacaccccgcttttcccagcccacctgccccttttggctgagcacctggcttcttgtgtcccacttgtatattttgtggcagctgtgtttttagcatcagcccctgtgtgttcttctttctgaggtgaattctcacgtgtgtctcacatgtggtatctgtcgtgaactgtggtgtcaacaatcaagcactttcttgtttgtttgttttaatgtgtgagtacactatagcggtgttcagacacaccagaagagggcatcggatcccattacagatggttgtgagccacggtgtagttggtgggatttgaactcgggacctctggaagagcagtcagtgctcttaacacctgagccatctctccagccccagtcgagcacttcaagacatttgaaatgatgcccgggacagctgtcttcttcataaaaactgtgtgtctgagatttttttttaaataaagatttatttgttatgtatacaacattctacccgcatgttcacctgcaggcctgaagagggcagcagattccattacagatggttgtgagcccccatgtggttgctgggaactgaacttaggacctctgaaagaacagctagtgctcctaacctctgagccatctctccagccccatctgaggtgttttcaaagccgatgacacctgtgcatcccaacctggtccccagcttcagtgtgtctatccatcccaaaggggcagtgtttcatctggggtgtttggcttctcttagaaatattacgggtgctgcacccctcttgaagccattcagtgggagctacgatcactttagatgtgtctcgtgcctctcacggccccccctcccctccgaaggatagaatgatccccatctctgtgtccagatagcctgtcacacttgggtccccctctcgttctcgaaatgttcctggggtggcttttctggggccagattgggaagggcctgtctatcctttcctgtcttctgtctgtccctggttacctgggaagtctatgaagtgaccggagcctggagtttgctgtgaattccttgtagaacccagaaaccccggctgtgactgtgggtgtagccccctttggaggctagggaaggagccaggctcaggtggagaaggggattggccttcccctggcatgtttcctcatctgcagaggtgcaggctggggtgacatctcacctgctgggcacacagtctgacctctctcacctgctgggcacacagcctgacctcagtcaggggccctccttccattgtaagccatcctgtcctcatccctacagttccctatgaacctggctcacctcaggacctttgcacatattatgatcaggagactgagggcagcttggctgagtgagtttttgtctcccagtgactctagtcgggaagctggccatggttcctgtcctctggatctgaccggaggcaggtacctgccttcgtccagtagccagccatggtgctgggttctagctggaactctagtctcttctctgtgggtttctcctccagagcatccaccatggctgccccttacatgccctagagtcatcctcactgtggcgcttggggaccaaccctgatgcattgtgggaggggtagtggggaccctgggggcctctgggaggcaggccaccacacacagcctcagctctctgggcctcagtctccctttttagcaaatgggatcctttgagcatttatcaggctcaggtggcatcagtcagcagctgtgttgcatccctctgaccctccacagcacagggccatgagctgggccagaggaggtgctcactcttaccggagatgcctggaccaccgggggtggggagttggggggttggaatgaggaggaggaagaggaggctgtaggtagcctgcacacactgtctgtcacagggtgggccttcaagatacttactttggcaagtctggtgtctagagagcaaatattgactcaggacagagaggtgagggggcggtgcatcgatcataccaggtggttgggcagatgtggatttcaaccttggatttggcctggcattttgaaaagtcaatatttttttaaggcctgccagtgggcgaggtgtgggggggggtcagacgtgcttgcaaccatggggagggggccatttccaagagcaccttggtcgtgctcttgctgtgtgaccttcgacatgtgaatccacctcttcacctgtggaaggaacagagatggggaatagagcctggctggaaggtccagagtcccactgtgctgatgcccctccctgtccagtgtgtaccctcttctctcttatcagcccccacaagctccagtccttaagggttaagcacagtgagctcatgtgatactcgttcatatgaatcatccttatggctccttgtgcccagcctaggaaagggggcagatgctgtgcccccaagttgccatggcaaccctgcttgtaccaaaatgcaggcacctcagccccagacccacccttgagggaagctcagggcaggtcacctgcgtcctccatcctcgaggagaggcagcagggactgctgagcggataagagggggaaggagcttggtgggggaggcttagctgcttagctccgcaaggagatggaagccgaagggcgctgccgctgccgggagagggagacagactgacagccagccacaggtcctcagacttcacctgaagccctggaggctcgtgcggcagcggcccctccacctccccggggcagccgcctcccacgtacatgcccccacacgcgcgcactcacccgcgttcctgcacggtgctgcctggggtgggtaagcagtctggcacatgaagtccccgagggacagcgagcgagcgagttgagacttagggggagaaaaaaaaacaaaacaaaaaaaaaaaaactggggctgacgccagctccctgggcggccacctcccgaggcccctcctgcattcctgggctgtgcacccctcgccaagacagggggctgatgtcattccgggctgccgggccaggggacccgggctgggtggctgcctctccggaagtgagcgcgctgcctgctgggcggcaggttcagtcggcttcgggtttggagtctccagcctgaggactggagatctgcctagttcagacgagaagagcctggagagagagctggccggcggcggtgggcggtggctcccaggtgtgcatgggagttctccctgcatggacggaggaagtgagttgggggtgccagccccctcgcccagttcttcacagccacctgccccttgacttcatcagggttggccccagggactagaactggacgacctggttggttgactctaggctcctgctggtgaccccctgctgacccgtcccgtccctgtttcgtgacccgcacggatgcctgtcgggcgatgtttactttacttgcgctgatgttctctgccgggcttcccatcggagcccagaacttctccccaaggacggtcaccgacagaaggaccaggaccctggcagtgtcggcctcctaactgcctccgcctgccccctcctccaggctggccctatggagtacctgggcgacaagctttcagtggcccagacacacatgactcagtgggttggcacggtgaggcggtccttccaggaggctctgcacttggtgacggccacggtgggcaccgagcggagcggggagtccgccgctcgcaccccgttcaagcgcacctcctccttcagacacctggcctctcggagccgagagtccttccgccgcttctccgcacgcagccaacagaggttctcatccctccggaagagacagccagactctgaggcccctgatcttgtaagcttggggatagatgtgtgtggtttaaaatagcagggcaaccctgggaaggtcccttccctcggactcctgagagggggccaactcgtagaagcctcaggggaggacttttcctatcagtgatgatggccttgggatactgagggggatgtaggctgggttggctgctctgcaggtgcagcacccactgcttgaagctggtggggaacggactccgggctccttgtctgtgagcagggctgtgtgggggttgggggggcactgctgtccccacggcatgccggcatctctatttttagggaagcttacttgacacctgctctatctcctcttgccctcccagggtgaccaagtggtctcattgcctgtgtgctgatttaaggcggttgcctggttgccactgttcaaaagtgagacactgagtgacttccgaggggaggagctgtaggggactgggtggaaggtgatggcaggtcctgccagcctgggagcttggacttgtgtgaagagcccggccattgtggagcgcccaggcccagctattgggttctatgctgtgagaccagggtaatcatagccagtgagtgtaatctggagtgatatgaggcgggtctggagacagaacggtgacctcgtgggcatgcgcagcaaggtgcgggaagtctggctgggagagagaagcaggaagaacacttccctgcccaactcttggcagatggtttctgggacctctaatgacttcggggacactaacgtcaccaaccagaacgaagcttagttgcagtgcccaatgtcttcagatagctggcctctgccctgggctgagttgtcccagttttcaggggcgttcgaggccagacatgggttcagttatccctttttgtccccagagccagtgtggttatgagacagtgttgggcaggggaatgcagctgtccgcagagaccaggggactcagcagggcgcacacagccactgagccactaggcaggggctcacccaggccagaagccatgctgtgaggctgatcaggggtgactccttgtgtgggagtctgcactcctttgggtcttgagtgctcgcccattctccgcgaaggaagagctcgttctgtgtcagcttgtctgtctcctcctgccccgttccccagaatcctctccaggaacactagctctgttccctgacctctgccctagctcttcttgggctgtgtgactttggatgctgccctaagtctctgtgcctctgtgcatgtggagtgtgctcgcagtgacaggccagccacccaggtggcgagtgggtgaacataaatacacccagaagtagtgtggatttccaggtcttcccactcctgcttggcctctctctggggtgggcagagctggcattggctcaatccattcttaagtctcagtttcctcctctgtccagtgagggcaccatgtgcttgttctgagatgctgtcagcaccatgctggcacatagtaagtaaatacttgtaagtctgtcaggtgctaagatatcctactgtgtgtggtgggggacttgcgtcttgctgcaaatccacctgggtgagattggatagcagcctgcctcttcccaggagtgttactttgagtggatcagcggcctctgtcctttctgtgccttcactttcccctctgtggaatggaatgattggcagacaaggagcacccccaagtggtgtgtgtaatacctgggttctgtatggcccctgtgcgtggcagccaagccctctctcccaaaccgtgccttcagaggttcccaacgaagtggggagtccgcacacaccccctttcactctgaacttaaatgtttgtcttatgggtgggagcttcctaaggcaggcaggggcgtggggctgtaggcaatcttacccctcatccagaaaggggccccgggctgtgtctagaggaggatttgtggcagcctggctggaaagatctcaagccagccttgaagtcattggctgacggcggcctctagctgtcccagataagaaagaaggaaaataaaacggtgcttagtccaggacccgggaggcaggaagggtcacggtgcagagaaaggctgggtgtgttagaggcctagagacctgggtgggagggacagaatggggacttgggggcacaaaagtacacggaggtgtctggctcaggaggcctgggcgtgaggaagagcgagaagtgtgtatgtgtgtgtctgcatatgtgtgtgtctctctgtgtgtgtcactgtgtgcaaatgtgagtgtgtgtctatctgtgtatgtgtctctgtgtgtgtgtgtctgtatgactgtatgtatgtgcctgcgagttgtgtttgtgtatttgtatctctgtgttttcatgtgtgtgtatatctctgtgtgtgtgagtctgtatgagtgtgtatgtgtgtctatgtgcatgtgtctctgtgtgtatgtatgtgtgtcttgagtgtgtatgtgtttgtatctcactgtgtgcatgtgtgtatgtgtatgtgagtgtctgtgtgtgtctgagtgtgtgtctgtgtatgtctatgtgagcatcttgagtgtgtgtgaatgtctgcgtgtgtgttcatgtggttgagtgtatgtgaaagtgtgtctgtgtgtgtgtatgtgtctgtatgtgagagtatatgcatgtgtatctttctatgtgtatgtatctgtgtgtatgtgagagggaaagtgtgtgtgtgtgtgtgtgtgtgtgtgtgtgtgtgtaggaaggctggctaagtggccttagccaagtcctatcaacccttcctgccttactggtcccaactgtgaactgggctccctgggacttgtctggtaggtgattccagcccacctcctgttttaagaatccctgctgtaagcaccatcacttcctagctatgaggatgtgttctggacccctcatgggtaccaaaacctgagatgctcagatccatatggaggctggcacagcatttgtgcctcatgtatacactctgtcagctctaggtggatgcaggctccaataggacggacacacatgtatcccggggccactgtcctgctagcccagaaggcccttccttccctgtccactgcagtccgtccagcggatctagggcaaggtcatccccctgcctcaggaaggtgtgacttctcgccccgtgttctggctccgtttcccttccaccccccagtcctcgcctctgccctggggtaaactgaggcccaaggagaatgagtgactgggccttaggacacaggaagtctggcgtcctgtcctgtgcgagtcaggcaatggggagagagcatatcctgttcctggccatccctgtcacccgagtgctctcttgtagctcagggctaccagaaccaggtataggaagcaagcaggccacaagtgaccgggctctcagcgctcgggggcagcaggagcagttgaggaagtcacaaggtgatgctaagcccaccaaagaaggcctgaatagagaacattgaaaggcttggcggaggctggtgtgcaagaagaacccaaggccaaggtggctggctcagtgagtgggacaggatagtctgggtgacagggcctggctatgcagggctgagaacacgggtaagagcattgagtttgggaccaggaagtgctgtcatcattgtgggcctctgcggaatgctgggtgaggacagaattattttattgagcacctactgtgttcctaacatggttgtcacatcttttgtgtaccagatacagattcattgcatctcctaagcacctactatgtgcctactcctactgtgtaccaggtacagatgcatcacataccctaagcacctactgtgtgccttctgcgtaccaggtacagatgcatcacataccctaagcacctactgtgtgccttctgtataccaggtacagatgcatcacataacctaagcacctactgtgtgccctctgcgtaccaggcacagatgtattgcatctcccaagcacctactatgtacctgtcactgtttctgcatttctcctggatgctggccctgaggagagttcagccacacagcccctcttccctctcccagagccctcccaccccccaggtatccaggcttccagctgcaccccaggcctggcatgatgtcacttgtccatgcgggcgggcaggacagacagttttcttctggtgaggcccctcccaagctcaggtctcttttcaccgtcctggcggaggaatgatgtcacttcatagagaacaatggtccctttatggtccccagaggggcccaaggctgggtcgcagagcaggtgcctctggagttacaggcagggtagggacaaaggacttggctgctccccagggagccactgggctcctgctgatccccctgcccccaaagcggggcgtgttcgttttccatgtggaaaatacaggaacatgggaaaacaaaacacagctcacacggctcacacgctctcccagggttgaaatccacttggcatctgagctgcttccttcccctctctcttcctctcccaaacaaacctctagcctctgtctcctctcagagaaatggacagggcagtggaagcagctctatggagcactatcaggcccctggtgccatggtgccctgctgtgttcgtgagttccagtcctctgctctctgtctggacacttggcgtctatgggatgaagcctccctctgcagccgctctggcctttgtccgaggcccctgggctctcgcttcctctcccctgcagcagctccacagatgagatgttttgtacaaaggcctgttgcttcctccacgggaaactagtcatgtcagacaggaagcccggaatgttcatgtcgctgccaccgggagccttgtgttggggcagcgtgaggaagccatgggactggctggcttgcactaggttacctcagtgctgtgcgggcctcggtctgaagcgctgcttgttcctgtggtggaaacactgaggtgtcctcagacgcaagccctcaagccacagctgcttggtgctgctggctggggaaatgttctggtctgtggtgttttcactgtacacacatagacataaataatcacaaggtgataggttttcagccatggtgtctcgctcttttaatcctgctactaaggaggtggatccaggagttcagacttaacctcggctacatggggagctcagggctaacctgggctatgtaacactcagcttcaaaaagccaaaaacaaaggctaggatttcagcagttggggaaatgctggcctactgtgtacaaagccatgagtttattccccagcactgaacagtggtggtgctgcagtgtagatctgtcattagggctctcgctgggcaaagcctcagcaacattgttgtgccactgtctggaacaagagtaagccattaccttctctagtaacataactcaattgtaagtttctaatctgatttttagcagtggtgcaggtagggcttgagcctggactcatgtgtctgagcccttggtacccagccggtggcgcagttttggaaggttgtggaacctttaaggctggcagagctatgccccttgggacaggcacttgaaggtgacatggcctgagctgtctgttccctgagtgtgagatgtgagccactttggccccccaaccctcccgccatgacagtctgaaagtgagttgtgacagggcctctcagaggtccccctcaggtagcacactgttcagtccctggctcctaggatgcccccagccacctctggggtggggacttaggggctgggagttgaatcctggttcagtcccactctgaggaggtgggtacattttgtggtttctctatgcctccatctccctactctgaagctgtggtagagatgacttacatgcagttagctatgcacgagggatgcatggtgcagtgtcctccacatagttggacttccagaaccttcctgtcatggctggcgctgccacgttgtcacagagcagccagacactggcaggtgcctgtgcccacacttactggtgtcctgcaacacccgtgttgaggctgaggtgagctcttctgcagatgccagggctccctctccccctcctcctctgtcttggagcagttagtttgtacaaatggctgccatactcagaggatctcagagcaaccttgtagagaggctcacagggcagggattggaagcctcatgtcaccagtcactgaggaactggctcttcaaggctggttcacctgaaagcaagtccccagactgcaggtgcgacttggagttggccaacatctggcctccaacctcatgagagaccctgaggtagacattcatcaaatgccgtccttgatcgatagctctggaaaccagcatgggcacgaaccgttgtcaaggctattcgttatgcaacacaaggtgacagatacatacttctcactgagaccctcggggatagtagagtgacctacccatgatcccttttagtgtatgccttttttatctcttggggttcttgcctatgaaggaggctgtggtcgaagccagccatctctttaggggttagcggtaacctgctatgtggggctggagtgcatcgcttatatccagttgtatccaaagtgctcagcttcctatttagatcctgcctcaccgtgaaggcattgtgacctccacacacagtggcttctccccaggcaaggactcctgtcccactgccctgccccaggaaaggaagaccctgcagcagatgtttacaaagaactgaaggtggtgaaggctgtgctggggtggggctcagtggtgtgagtgcttgcctagacgagctccaagacctgagtttgatccctaatactgtacagactgagtgaatgtggtatcacacgcccgtgatcccagcacttatgtgggagagaggaagctgaagggccaggagttcagggccattcttggctataatgaattggggctaacctgggctaactgagggaatcctctgggtcccccacaatatagaaagggaaaaaaagacagtttctgacgttgcttcttcttcttcttcttcttcttcttcttcttcttcttcttcttcttcttcttnnnnnnnnnnnnnnnnnnnnnnnnnnnnnnnnnnnnnnnnnnnncttcctcttcctccctcctcctccttctcctcctcctcttcttcctcctcttcctcctcttctttcttctcttcttcctcctcttcctcttcttccatttactttataaacactgatctggtgtttcctgctaaccttacttggttgagagaaaatggggaacaaattgagctaattaaattggatgcagggcctggttttcccttccctcagtgttctgagttcaaaacctggcttggttgctaactacggggcttgagaccatcagtcactgtccttgggaggtgcttagcacagcttggtggatggtggtgctgcccagtgtccccaccagcatcctgcaggagtcctcttgcttcatgtggggccacagtgagaggcagcgggacttaggacataggacacagagtgtgacatctcagtgctgagtctttcagctggctcagtgtctctccaaggttaccttgcaggcagcctctgaggctgggctactatgagccctgtctaagaggtggagccaaagactgaggtcatctaacccggtaaggggacatcttgactcatggtgtctcagccaaccatggcctaagcaggtgaccgtataccttgcagtggccctttgagatggtgtcttagctctcaaagctgtgacaatactggacaaaaaggacttacagaagtgtcctttgggcttacagtctgagctggtcacacgccctcacagtcagggagctgggatgatctggttcttgatgagttttctcccctgtgcccctcctggaacgatggggtgtaccacccacagttgaggtgggtcttcccacgtctgctaatccagccccgaagcccccctcacagacataccctgaaacgtgtcaccagggtaacactgggttctttcactctgttgaccatcacaggtgggtgagaatcttgctggccttgttttataaattattaattcaggacccagaagggacaactccacagccgtgtagctcatagtctgtcagcgcaggctcatcccttctctggcggcctgggtggatcaagggtcctttccccacaggctgcaggctgcccaggtttgacactggggctagatgattctaatcttggaagatgccctacatgttgtacactgcgtgctggtcatgattttggatactggtggcagatctccctaaggctctctctagcctaggctggccttgacctcacagtaaaccttctgccccagcttcccgagtcttgggatctacggtgtacagcaccgtgcccagttctcactcactcactcactcccagttttgagagccacagatgttcccagacatcaaactgagaagataaaaatgacctcgtccgaggaccatcatggtgggcctgcagagtcccaaggaggagctggcaggtgagagggttccactccgtgctgggtcctggctggctgtgtggcttcggtttactgaccctgggcagagccataccctttgctgtggaacatcctgagttttagctaaagaactcaattcctgcagagccatgatgtccaacctagagcatatcaggataatgacatgttggttccagagcccagagagagcaggggacttggcctaagtcacacagcaaggagtggggcttttatcactattcactttacaagtcactgtcatgtcacacacgaggttgacaaacccatctgtgctctctctctctctctctctctctctctctctctctcccccacacacacacacacagcaaatgcctttcacagtctgtgagcccccccactttgggttgtggggcttcacatgcaagtacttgcttgatgccagagtgagtaactccctggcagttcctgcctcatctctcagcagctcttccgcaaggcctccagggcacacctgcaattccacatctgctcagtgagtagccgagagagcctgttctttatgtcaaggtatttgccttttgctctgaagagagaattgggtgggtacaggcaccgtgtgaggcagctgttctctccaccctcagcagatatatatatatatatatatatgggggggggtgcgcaggaaccaagaaggtcctggaacctctggtgctgggtttgaagagccgcccacattgtgttgcataaatggctttattacccatcaatgttccaagccccagaggccagaataaacactgcccagggcaggagcttggccaggagttcttccaggatggacttgggggatctccatggtcaaggctagctagccactgcagtgcagggaccctccctggagctcctgcttgggcagccctgtagtcatctctgtgaggggctgctgaggaaagggcattcactgcctcggggaagccctgagaagagttgctcagtggagccatcttgactccacctctctcccagcctgagtgctggctctggggttcattttcccacctgtaactggacactctgaggtgaccgttagagactcctcagtgagccagctcagagtctgagctttgcttatctgtgagcaggagccagattactgagcgagcctcagtttttccatctgtaaagggaaccttggttccaagtggtggagagtttgagctaccagcatagacctggatggagtgtgtgagttctcagaaccaggggttttcccacagggctacacctaccctgcccttcctcctccccccttccccctggaactggtactcttcccttcttctaagcatttacagggcacaccccccccacacacacacacacaacaacacacaggctctgcttgcatttcaaggctcaccttacttaaagagtactgtctgaccagaagaatgagacgcctctcagggtcaggagaaagatgaaaagggacccagacagcattgtcacagggccagtgtccccacccaccacctgttcactcgggttcccccccaccccacccccattcctccctagcagtcttaacccggttaagtgtgtttgcaggtttgcagggctcattcagctatggctaaggaggaagggcagtggggccgttaaacctgagacctggcttcagtttcagcagagtggaggcagatgtgtcccagcccatcctggagtcttttctgtgctcagtagatacaagccatctggggacagatgggactgggcagggcctcttagagccccacagaatgagtctcctcgtttggtgtaatgtatagtccagggattttcccatacctcagccagcagtgaaacctggagcccttctgggccccaccaaatgggtgatgagttgtctcactgtcgaggtagagactggaaaggaaacgacagactggcctggattggagtcctaatctaccactccctgtgtcagaccatggccttgacgtcttgtaactgtgatgcccttggctccaaagtgggctgaaagtgcacctgagggctggagagatggctcagcggttaagagcactgactgcccttccagaggtcctgagttcaaatcccagcaaccacatggtgacatagcaagcgggtgacggccacttgagcattcccctcatggaatagcgttgtggagctctctcaactctccagtgtttgtggagtacttactgtgtgctgtgtgaagtacttactgtgtgccatgtgaagtactgtgtgctgtgtgacgtacttactgtgtgccgtgtggtttgaggagctccatcagggaaaggggctgatcacagccctcacagatgatgctgccatccccggcacaaacagctcctcgagaacagattggagccggatgaacaaatgggggacacgatggccttacgcctgttctgactacagatgctcccacaccctctcccagttctgcctagcgatgcttttgcttatttcttcaagatgatgtgcaactcgttatgtagaccgggctagtctcaaacttgtggctagctatcctcctgcctctgccgccgaagtgtgctgggaagacaggtgctcatcaccatgcctggctttctactgttctccttagagcacagagcaacactttccctaagtattagccactcctgtttcatcacatggaaaactttggcgaatgaatgaatgggtgaatggatgaatgggtgaatgaatgagtgagtgaatgaatgaatgaatgagtgaatgaatgaatgaatgaatgaaatctcagaccatcaggtgaaggaccaggactctgagccgtgctttcttccctgggagtgttggttagagaggtagaatgtggttgagaagatgctgaggtcagcttgattggattaagaacagtggggggtccttagtgatgtgcataccccagggggcatgtaggaggtgagatctgccctgagtgtgtgtgtatgtgtgtgtgtgtgtggtaccttgggggggggtcgcggagtgctgagccctagactgggaaaaggggaggagaatgagagctgcaagataagcagacaactgtccgccctcactcttaggcctccgccattgagctgccttaccctcccccatcagactgtatcccatgaactgtgagccaagatggccctgtactggcctgaagtttttctcctccagtatctgggcacggcagagggttaacggatacactcggcgtgttgcagccaagctggcgactgcccccacccccataccaccaccaccactcgggttttccctgggttcttctttctgaactgatgagtgtgttgccaaaggaaggtttcagatttcttgggaaatgatttaaattcaggcctctgctcccttctgtggctcacgcatgcgtggactctggaccagggcgtgatgtgccgtggagttcttaaactggaacatgaccgaacccttctgatctttgagagaaccaaaagacagtgggttgggtatccttagtggccagtgcctttgggttggtgactttatagtttatttttacagcactgtctggggccgatagcctcctgtgcactgggccagtaccctaagctgagcctcactgtcaggccctctgattttttttttaagctgaatttttgagaggctatgatctgtatcaccaggcctggaagtgtcacaaggaaccggaaagtctcttttccttactgcagttggtaaaagccagagagtgtcccaggctcgctctggaaccagctcctagctaggcaccccagtgcaactccggataattttattagagtttaagagaaaaacatagcgcaggttaaatgaaaatcccggcagccacccggaggtggagagtcacacccctaagttacacctggaagagaaatgggagagctagagagatggttcagcagtcaagagccttcactgttcttgtgggagactcgggttcaggtctcagcacccacacagcggctcacaaccatctgtaattccagatccagggaaccgagcttgcttctgccccggacaggcactttgcacatgcacgcagacaaaacacccatacacgtaaaatatatcttttttaaaagaagagggacaggaaggaaggaaaatgaactctcaggagttagatgtgccagttggctggggagagagcctgtctgtttcttcttggggacagtatgccttccttcatgggctggccataaatatttttttctctctcctgtgtagttctggttatcctggaactcaccttgtagaccaagctgggctcaaactcttactttctagtgagtagttaatgagtgaatggatgtgtatccagtcaccatgtccggcttcagaactctgacggtggcctgggtgagccattctcactgattctgtccactgatgtttaaatgacatcaggacggctccacacaggcaaaccgctgaggaagaaggaaggtcctatctgggagccacgaggccatcggtgaggagtgtgaacagtcaccgctgcccaggtgtctgggctttgcctgcaggaacaggttctgaggtttacggtgcctaccatataggatgtgaagggcattgggttaaatggttggaagatggggtgggggcaagagggcggcctccatgtcccagccctgtgccttgccaccaagcccagactaggatctcccttaaagaacttttcctaagaggaagtaggaaacagaaaccccacaacaggcggccatccatcccttcatcagacaggagactggacagtgtgagggtctctgggagtgtactgtagacctggagacccaagaccggggacaggcccagatgtgtcttcttcttctctgcccactggatgtcctatagaatctactagaaacctctcctaacacaaagtaacaggatacaaaagcaaaacaaccagtaggcttcacatctaccaactgtgtagtctccgagaaagaaatctggaaaaaaaataccctgttcgaaataactccacaaatacattacataggaatatacatctaatcaaacagcgaaaacttccccaccctgaaagggaaatgagagtagataataaatgacggagagacctggcatgctcctgcaccagcagaactcatgtggtaaacatggccgccctgccaagattcatcgacagatttaatgcaaggcctaactggattccggtgtcggtgtcgtgtttcacagatttagaaagaacaatacagaaccagggacagccgtagcaattgtgcattgatagcctcaaattatactacagagctgcggtgacaaaggcaacctgatatggccataaaaagacctgaggacaaagcagaggacccagaaatgaactgataacgctgtgtccacttgatttgacaaaagaggcaaaggtacatattaggaaaagaaaaggtccactcactaaatggctctgataaaactggctatccacctgcaggaggaggacattaggcctgtctgtgtcttttaccttgagcaaaaatctattcaaaatgaaccaaagacattaactgaaaacccaaaatgcggagacttcaagaagaaaactcaggaatgctctttaagacattggggctggggagaactttctgaacagaacatcaacagaacagggaccagccccaagtgtcaacagatgggacctcgtgaaaggtttctctgctcggcaaagggaactgccaacggacagacagcccacagggatgggagagaagttttaccaggcacgcgtcagacgaggggcagatatccagaatgcatacaggattacagaacgtcagtgccaaggaaattaaaactgcccatcaacaaatgagctgtgggattgaggagacaattttcagaagaggggcaagaagaggacctacggacaggcagacagattgatggccaataaccgctttcaagtgctcaatatccctagtcaaggaaatgcaagtcaaaacttctttgagataccacctcacccagtcaggcatcaagaaacgccaggtctgtctgggtttaagctcacaggatgtgtgggacacacacattgcctgaggtggtgcccactgcttccagcttgatatcaggttttttttttttttttttttcctctccgggccagggcagctgactcccgactgctcattcccaagggacagaggatgaagtcaccgtccctgcccctgactggctggccagccctgtggccaggcaggtgaggaaccctacacaccagccagaggtgatgtcacctcaggaagacagatggggggaggagctccctcggatatttgcagggttgggggtggggtgcagccttgcttgtcctctggaaggggctgtgaatggggaggaggagagagacttgatcttcatcttgctgcctaaggatcaacctggtaccctctcctcacgcctcagagtacgaaggcaggtcagagttcaagctgcagctctgtgaccttccccagggtgctttgctgccctgtgctgccacctcttcctcattgaagagggtggtggtagagcctcttggggaagtcctaaagatgatgatacaatgtatctggaaagctatttattgcctgaggaactcccgccataccgttactacggagatagagtggttgtggggagggaggcgactttccttgctgtcgcctgcatcccaccaccttgctacaagataaggcctctagagacacagaagatgggtgtgaacggaccttctaaaaggctttgagggtcagaggtgggctttttctagtgttccctcaggatgtcagggttaggaagggaccttaggcaccctttccctgccgctccattgaaccttcacggttttctgccttcatttgtctcgtatggaacctctgtctttcctggagtccctggtctgtcgaacactgtcccatcaaaggagaataatcctttaataaccacctggttaagcctaaattgtcacgcaggaagtctcggatcttctaagtgtgcagctatgcaccagctacctccaggggtggcctgtggctctctgtgctcccgagaggagctgaggaagctgctgtggatgtgtctaccgacctgactggggttgtcccacggcagtgggtacacagctgtgaggtcccttttcagggttgcggacgctgtgtgtgacgactgtaggactctgtattgaccctggtattggtggcacttacctgtgttcccagcccccgggaggttgatgcaggggaatcatgaatatgaggccagcctgggtcctctaacaagcaagacgtgtctcaaaaacagacggaaatgaaacaaatccagagtgtgcagcctgtcctgcataacactgtaggaaacgcccgtggctacctttcccattcagagctacctaactggattccactggaagcctgttctgcaagctgtaggaagtaaacatgcctcccgtgtatgtccctgggcagagggaatgtgcagccaaatgtatcccacaatcaggagcatgcctgaaaggaccccgagatcccagaagacttctgtctccctgtgtccagagaggcaaactgagacccataaaacgatgtgaccagcagccagagtcacatgacccctccgtaaggagcccccaagcccgcatctgggattgaactgtgagacccatgccccagcctgtccccgggtagactccgtcctaagcgtgtggaggtctcctgaaccaagcaaccccataaaagtttaattagagaggctgccataggtcctggcagccagatgtgtttaccacacttggcaactgaaggatggtgtcgggggaggggggagggtgggacctgtctcctctgtgttgagagagaggagggagagagttgatgtctgtccatgctcctctagccacgtgattttgcatatgccctgcccgtgctcttatagccacgtgactgcatgaggcctgctccttgactgcgtttcaaggctggggattttatccttagcattaccagtttaccagttttgtcgaagcagaattgtgccccagggaccctgcagtcagtagctcactgtgctgcgctatgcagaccaaggtgcttgcagatctgtccccagcacagaggccctaggagtgaagtacactgggggtcctgggcttagagaggggaggcagccaggtagcatggtgggtgagttatatatctcagctcacacttcttccctctctctccccttcctcctcttttccctccccctcccttcctcttccttccttccctccctccttcctaggataagatcttagctctctcagcaaccacttctaatccccaccagcctgtccaccttccaggtggcacaccagccctagggagcatcccttgccggactctgggttaacacacaggcattagtttatgacagtccctgagtctctccctaggccagtgtcagccattgatggggatgtattgctgtgcgattctgacaccttgtaggctcagtgagatgaggatgcagctgtagccgtaggtgggtcttggcagctgtctgcatggttccttctggtggagactgggctgactgaagtggatctgaaggatgcagactctaggtccctccggtgccttcccctgcagggatggctgtgggcgactctagtagcggcaactgcctgtttttcctgctgtcttcacactcttccgacttccttcccactcttcaggctaaagaatcaagccagacgtgtgactaattagcgcctcttaattggggaaataagaccttttagacgttagggaagagacagcggctgtctgagggttgtcagtgctggaagagggcagagcatttcctcccgggggcagccaccgcctcactttgcccacacagtttcccagagagagtcagagacagcagccatagcacagcagggatgatgctggccagtactgcacagtgagtgctctgatggtctttaagtccacctattatcaccatacaggacaggcttgggagcagagcttcagaggggccaagtgatctgcctaaggtcacacagcaggcagggtgcaaactgatggtagtgggactcaggctgtggttctgcagccgtcctggactaagtctgcacaagccacagatcccttcacagatactcacgtagtctccaaggtaaaaggtataaccatgccgagtctcgaggtcacagaagcggggaggacagacatacagggacatctgaagcacagagctgaccacagagctgaccactgaggtgcctgtgaacttagcgtgagccagacccacttggtcagttttctgttttcctctctctgttgaatgacagttattaaccgttatgtctgtctcgagtgagttctgttcagagcaagataagtcttgcccacttccttctgagagactcagtcctcccgcagaatcttcccagatccctacagtgaagaatttatacgggagaggctgagttgctgagtggcttctgtctaaggctgctgagctaaaacaaaacaaaactaaaaaaccccaaacaaacaaaaaaacaaagctgggtccgagtctgaaacctgtttccttcaaaagttcctggccttacatccaccaggtggaccagcgtctctcagtgtacatttggtacaccccggctggttgttcacccatgttcctcaggcattgcttttgcatctgtcaggctagggtcagtctgtgttgcagtaacaagcatcaccaagcctaagtggctcaaaacagcttcctgagtactcagcactgaccgtggctgtgtcctggctgagagaccagcttgcctggggaaaaactaatggctgacagaaatattcaggaactggggcagtttctgcctggaaataggtgatgccacgcctacctgcatttcattggctagggtaaagtcacatgacctcacctagggcattggtcccagtgtgtgatctttatcaacccgcttgccaggatcagtcagagtgggccccagccttgcttccccatggcggaagagcaagctctgctctgctctccctggttcaccagggaccgggtcaggttgcacagcacagactctgagctatgcatctccatttatttatatttctcttgtcatttcgttcccagaggtgggctggtcactctgtgacggagaaacacagacatcagcgtgggtgctctcaggcttgggtcggccctgtcgcccatcacccctgtcccctgtcacccttccctgtgttccatccccatgcccacccctgcctgtatttaccctgcatctaccctatgccagttcctacatccaaccccttgagctcccttggcctgcgtctacccagcattctttgctgcttatcacaagcctctgagatagaatccatgcatttctgcttcctggtggcttcagtgggttcagagagcttagtggtggggtatgtggtctttggggtttgggatcccacgccctgccggctgccccttaggaaggagaaaactggcttacaggctgtaggggatatgttgggattcaccacagtcagtggcagtggcttggtgtgtgagagggagtttcggggactgcatggtcttggtaggacctggtaatggcttggcgtttaatctgtggggaatggcagccgtagagagctcttgagcagagagaactgatggggttcacgcctgcattccatgctccttgcacgcagtacacgcagttcttaaggagttactgattctcggtgaggacatggctgttgaaaggaggggagttagaatggtgccactctctttcaaaattggcccctgcatcttgaggatttctgaaatagttgttcagatgtaaactcagggttctggacgggacaggagccaggcctggtgttgccttcccgtgattccagtgcttgtgggtcagaggaagagggagccagcctgggctacatggatagttctatttagcctgggctacacaagagattgtctttaaaaacaaacaaacaaacaaacaaaaaatctggtgcagtgtgcctagcccgagatttcactgcctgggtgtgactcaatggggtgcacacatcccagtatgtcctaggccatgggttctgtccttggtattgcaagaaacaaaccaaaaaaaaaaaaaaaaaaaaaaacccttaaaactaaatttgactttttagggttttggggtgattccttttctagctgccccagccttcccagagccatctggagatggttgttatttaaagaaacggcacgtgggactgggttttcattttcctgcgggtgcagcccagggttctcatttagatgcaggttctggggcagccctgctgctcctgggcctgggcatgaaccagaccccggctccttgctgcacagctctatggccctgtgtgagcgtgtgagacccatgctctattcctaagactaattgggtggggtgggctgggtgcacgggaggcagcttctggagaccaagcaagcatggggacagacccttctcatttgtgccaatctggcacatcacccaatcaaaatccctggggagggggcacacgcacataagcagctcctgctgcctagcaacgggaagtcctcggtggggggggggggctcggatttatgagagtatgttaccccgagtgcaaccgctagttaggcacccaggagggagccagaggtacgcaccatgcaccactgatgctcagcaccttcccctcgctctggatggctgcctgtctgctggtctggctttgaagtgggtcttttgcgtccatgggggtctgaggtgaacataatgccaacctctaagggacagttcatatgatgtctaggacaccctccaaacacaaggaagggggagggggctgccacgggtttcctttctgaatgcttttaaaatttatttattccttgacagttttatactcattgtcttttttttccccccttggttttttgagacagggtttctctgtatagctctggctgtcctggaactcactttgtagaccaggctggcctcgaactcagaaatctgcctgcctctgcctcccgagtgctgggattaaaggcgtgcgccacaacgcctggctcatactcattgatcatgtcccaaatcgtccactgtcctaacacacttcaaatatttcactcctctcccatgaaacctccaacttgtcttcctcctgggttcatattctctctctccctctccctctctccccttctctccctccttccctctcttactctccctctctcaatcagttagctgactgtcctcgctggcttggtttttgcaggtgcccacagctgccatgaattccgtctgtaaactgagtttcgggagagctcctcccgggacttctgcttgcacattctttcagccagctcttcctctgagccctgacgacctatacagatgtcccccacacagctgagcagtcagggtcctctgcacattgcagagttgggagtctctgttctgtctactgctgaggtgacaggagacgctctgtctgcctaagcagctataatcagtgggtaaagcatgatatttgaaggacagtagaggggttgggcccagttatttactggtctctcaaaacaatcatttgtaaacaaggaccccccaccccacccgccgcgtgcgcattggccatagcctgcctatgtcacagataccagctgtaaggcattggcttagtgattgatgggggagggcccagcccttggtgggcggggccatccctgggctggcgctcctgggttctatgcctcaggtggttcactgctctcacacatcctactcacgcttccaacactgtgggtgtgatggtgtggggtacgatgcagcccgctggctgtgtggtgtgcttctgagcgtcctctctcactgtgctgggtcctagttgtatactttaacgctcccctggtccaggagacccagggtaaggtgccgggacaacagtggttatgccacgaatcccctgcctctggcatttctactggaccagtgaaccaagcgacagatggacacacggacgtgtagagggttagatgggaggcctgtgggtcgccagttctgctgatcatgggaggacatggggtctggtgtggaagggaccacaagacctccaatgccatcatgggagggctttagggaattgctgtgcccattttgaagggaatcagggcactgtgagaagctgtccccgtaccccctgcacagcctgctctggcctctataaaatgacctcaggtggggccctgcgaagtgctagcctcagcttacctcacctgctaagtgtttcctggctcagataccatcgcatgcgctccaggacacccacagcgtccactcctcgtcttcacagccggacattttggggtagagtttactgcagttctgctgcttgctgctgtgtggccttgggcaggcgaattaacctgtctggatcttggtttcctagctatactttgtagcaatatttatgttacagagtgtcttagggtttctattcctccacaaaacttcatgagcaagaagcaagttggggaggaaagggtttattcagcttacacttccatgttgctgttcatcaccaaaggaagtcaggataagaacttacacagggcaggaacgtggagacaggagctggtgcagaggctgtggaggggtgctgcttactggcttgcttcccctggcttgctcagcttgctttcttatagaacccaggactaccagcccagggatggccccgcccaccataggctggccccacccatggtgagtggggccttcgcacatcaatcactaattaagaaaatgccttacagctgggtcttatggaagtggtttctcaattgaggttcccttttccctggtggctatagtttgtgtcaagctggtaaagacaactgtgttgtggtcatcgtcgtccccacccaagggggttaggaacctctctcctctgggtctcccgttgattagccaggcctgccagagccctgtgtgggtgtgacctatgacctgacagtatcagtgtcatgtaaacacccacgctggaattggggtgtgtcccaaccactggaagccagacccccacagtcaggagagacccccttagcacctctgctgtggcattcctgtgcacgtgtggccgggctgagtccttccctttagggatcctcggtccctgaagccacggcctcatccccccccaggctgggccccatgtgggctccctaattatcaatggaaacagtgcaccgacgcgatgctctgtcacagtctataaatagggagccggaggaagacttgaaaatgccaccggctcttctgggcggaggagttaaaaacaacttcagagaaccagctctgtgctggaggcccagggtggggacaggcacgggcctagattggaccacatccatccccgtgggcccaggcacagggccctggggacattagtaatagggagaagtgaaacctggtgaccggagcctgtgcttccccatgagagggacagaagcctccactgcccactgggaacttcaggagccccatcacctgcataggccacattcacaccccaaaaacaaggccctggttagcttcagggccctcagaacccaggctggagagcagtgttgtctcctacagtggaggctttgtgtcctgttcctgaatggggcaccgagtgacacctttgggacctcacccaggttgtcatgccccactgactggaatgcctgttgtgggcagtgtgtggaatataatagtatatacacaatcattttagtagttgctactgtctggagaggtgaagccaagtgctcaaagccacatgaccagcaggcagcagggcctggagctggggtctctcagctgctcctgcaaggctacaagctgctcacatcataatctcctcccatcaatgtttgtatgtgtgtgtttatgtgtgtgtacatgtatgtatgtccacatgtgtgtgaatgcatgtgtgagtgcatgtacactcactgtgtactgtgtgtacatgtatgtatatacacgtgtgttggtgtacatgtgggtgtgtgcttgtatgtgtgtatatacactatatgtgtgagtacatgtgtgtaagtgttcatgtgtacatgtgtatgtgtgcatgtatgagtatgcacgtgtgcatacatgtgtctatgtgcatatgtatgtgtgcatgtgtacatgtatgtgtgtgtgcatgtgtgtgtttgtgtgtgtgcacatgtgtggtatgtgtatgtgtgggtgtgtcagagtgtctgccttggaagcgagtggttttctagcttgtgaaggagctgtggtttggagtggctagggtggagcgcccctgctcccaggtctaagtacacaggctggggggggggggggcatcaaggaacaggtgtggcttctcacctgaatagctactcccaggagcagccagagccaggtctcacagagccaaggagccagctggcccgggatgattgtcagcctgggacctctagctgcttgttgagtgggagtgtggtgtcttgaagagcagtttgctgggaggtgggagggtcctgtcacctggggtgctgccttcctcataattgcacaagcttgctgtgggggtagggtggaggggagtgggagggtcgtnnnnnnnnnnnnnnnnnnnnnnnnnnnnnnnnnnnnnnnnnnnnnnnnnnnnnnnnnnnnnnnnnnnnnnnnnnnnnnnnnnnnnnnnnnnnnnnnnnnnnnnnnnnnnnnnnnnnnnnnnnnnnnnnnnnnnnnnnnnnnnnnnnnnnnnnnnnnnnnnnnnnnnnnnnnnnnnnntcctgtgatttctaccaggaaccccttgcaaacccagttcctctggctactggtctgcctatcacagccatttctgagtatttcccgtgtgcccagcatacttctccacactcccgtgactcactagcccccacactgtagccttaatgctggacattgaagttcagagaggtgaagtgactggccccaggtcacacagcttctaagatccgtggagctaggaccagggtctgggtctcctagatgccaaggaacctgtgggagccttgtggtcagtgctcaccttcctggttctcagaggccttgttctttgcttcctgactctgaagctcctctggagccagagaggcactgggggagggccggtggggggtgctcctcactgtgctccactcagtcttgtccctggctccccagcttctctctcttccctgtcctttatttacggatttcctatttggtatatgctgtggtgttatttactgatttcctatctgggtatatgctgtggtgttatttactgatttcctatctgggtatatgctgtggtgcagatatggaagcacaggttttctcctgccccatgaacaccgcaagtcagacacagatcatcctacttggtggcaaatactcttacctgctggtccattttgcttgcgtgtcacctgttttcagtggcctcctggtttcattcccacacagcaaaatgctgtatgtgaatcaggcacatttataaaatagccatggggtagaattttccatcactaacagtggttgtgcaggactgcccctgggcacatttgtggtatgattgtgaacgtgtctgccatgtgtgtgcatttgtgtgcttgcgtctatattggtctgtgagttggatgcttgagggtatttgggagttctttttttttttaaagatttatttattattatatgtaagtacactgtagctgtcttcagacactccagaagagggagtcggatctcattacggatggttgtgagccaccatgtggttgctgggatttgaactctggactttcggaaaagcagtcgggtgctcttacccactgagccatctcaccagccctatttgggagttcttgtgtgtgcatatacaggtatatatactttgtagtctgtagttgtgtatgtgtgtgtctgcatttgaatatatatttgtgtgtgtgtgcgccgtgtgcatgcgtgcatgtgtgtgtgtgtgtgtgtgtgtgtgtgtgtgtgcttggggtgcacacatttgtgtctgtacccgtgtgtggcaggtatgtttgtacagaccagttttgagaattagtactgagtatggaaccacctggtgacattataatgtgatcatccccataagtcatggctgagtccatggctgtcatgcccaggagagactttgcactcactaaggagtaggagctggtcccgaggccatggtaacactcccagcttgctgctttctggtgggctcacacttctgagctggctgcagctctgtcgcctgacttgtcccttgcctgaaataaatcaggagagagttgacatgtgatgcttgaaaaaggaagtcaagtttggctcgcttgggctgttttaagaatctctggggatgggggtggggggtatgagaaggtactggnnnnnnnnnnnnnnnnnnnnnnnnnnnnnnnnnnnnnnnnnnnnnnnnnnnnnnnnnnnnnnnnnnnnnnnnnnnnnnnnnnnnnnnnnnnnnnnnnnnnnnnnnnnnnnnnnnnnnnnnnnnnnnnnnnnnnnnnnnnnnnnnnnnnnnnnnnnnnnnnnnnnnnnnnnnnnnnnncctcccacgaccaccggctgcttgtgttcttgcagtttcccagggcctagtacctttgtctgctttcagatactgtcttttctcttcccgaagctgcctctgtccctcccctgctgtcctcagtttagtaaaatgaatatcagagtgtgtgtgtgtgtgtgtagggagagagagagagagagagagagtgtgtagggagagagtgtgtgtgtagggagagagagagagagtgtgtgtgtgtgtgtgtgtgtgtgtgtgtgtgtgtgtgtagggagagagagagagagagagagagagagagagagagagagagagagagagannnnnnnnnnnnnnnnnnnnnnnnnnnnnnnnnnnnnnnnnnnnnnnnnnnnnnnnnnnnnnnnnnnnnnnnnnnnnnnnnnnnnnnnnnnnnnnnnnnnnnnnnnnnnnnnnnnnnnnnnnnnnnnnnnnnnnnnnnnnnnnnnnnnnnnnnnnnnnnnnnnnnnnnnnnnnnnnnnnnnnnnnnnnnnnnnnnnnnnnnnnnnnnnnnnnnnnnnnnnnnnnnnnagagtgtgtgtgtgtgtgtgtgtgtgtgtagggagagagagagagagtgtgtgtgtgtgtgtgtgtgtgtgtagggagggagagagagagagagagtgtgtgtgtgtgtgtgtgtgtgtgtagggagagagagagtgtgtgtgtgtgtgtgtgtgtgtgtgtgtgtgtgtagggagagagagagagagagtgtgtgtgtgtgtgtagggagagagtgtgtgtgtgtgtgtgtagggagagagtgtgtgtgtgtgtaggaagagagtgtgtgtgtgtgtaggaagagagtgtgtgtgtgtgtagggagagagagagagagtgtgtgtgtgtgtgtgtgtagggagagagtgtgtatgtgtgtgtgtagggagagagtgtgtgtgtatgtgtgtagggagagagagtgtgtgtgttggatcctatggagctggagccataggcacttgtgagcctcctgatgttgatgtgagatttgaacctgggttttccgcaagagcattatatgctcttaacctcccagggatctctccacatgctggctttcctcgggacactgtgtctcaggctctttgctatctaaatgcatgcctggctctctccctttaacctgccttcctaacaatgggatgattccccttagtgtgttcaataatttaggttaagtgcattttttaaaacccccgacttaactcttggctctttaccatagaactttagaaattattaataccatttctttgaacttaagagggaaatcaaaattacttctgtgataagactcaagatgtttctggaacgttggtccttgaccactgctgcctattggcagagatgtcctggttccctcagaatctgcttgtcttgtgtttgaaagatgtatccatctggcctcctgacttcacagccattgctgtggctccattcaaacagtgcttattccataaagagttaataaaggtctggagagatggctcagtggttaagagcactgactgttcttccagaggtcctgagttcaaatcccagcaaccacatggtggctcagaatcatctgtaactccaggtccaggggatctgatgccctcttctggccttttagagaactgcatgaaaagagtacacagacatgtatgtataagcaaaatctattaacctaaaatattattattattattattattattattattattattattttactgtccagttgttatcgccctcctggtccatcccattcctcccatttccaagaggatgtccccaccctacgtccaataaaataatttttctaagtcaataagaactaccatttaaggtagttaaatgtgtagggaaaaagacaccctatgacacattaagatttgggtgacaggctgaaaagcaaactatattcatagacactagagagcaggcaggtggtggtacctggatttgttcattcaatcaacattcagtcagtcaactacccagttttggtctcttctgtctcctggaagcatctctgagcatggctctggggtttaagggtaaacagaccctggcacccaccctcccttagctcatagttttgagcctctggggcctgcctagaggatgaagcttgattattatgttgcactgtgggtggcaccattccctaggctgggactctggactgtataaaaaggaagagtgagttggttaagcacactgcttccttattgtggctacagtgtggtcatctggtggatgctcttgtcaccgtgaccttccagctgtggtggactgtaccctgggaccgtgagaaaaattaactcctcttcccgctctccttcctccttcccttcctccccctcctccctctcctccctctcctccctctcctcctcctcctcctccttcctttttttgtttttttggtttttttttttttttttttttgtttttttgagacagggtttccctgtgtagccctgactgtcctggaactcactttgtagaccaggctggcctcaaactcagaaatccacctgcctttgcctctcgagtgctgggaattaaggcgtgcgccaccatgcctggccctcttctttttaaagatttatttttaatcctgtgtgtgtacacatgtgtgcaggtgcccttggagaccaggagggggcatcagattccctggggctggaggtacaggtggttgtgaactatctgacgtgccatgaatttaacccatgttaattcatgggttaaatgaattagagcaagagcagcaaactctctccaggccaaacttaacacttcttgatgaatcagactccagcgggtgtggtctcccactcgtgggctcttgtggactttcccttgttggaggccaagccgggctgggacctacagtggctgaggtgtgttcatggtattttccacttcagaagttttcttgagctgcactcatgtctcaggatgtagccctgatgtaagccgagagagcttttatactcttatctgacacacagagcagagcacaggccccaggggttctctgggccccagcctcctagcccagctgtcacctccctttttagctttcccgaaagcttgatccacacacacccaatcccgaaaccaaagccttctcctgcagaccagctgtctggtgtgttcctatcacttgcggaaaagttgtcccaaggagacggagacagggtgtctctgccagagccatctcgccacacagcccttgtgttgtatcgatggcttcctgcagtgcagatccgaagcccatactcattctcattctctctctctcttttggttttcgagtcagggtttctctgtgtggccttggctgttctggaactcactcagtagacctcagaaatccgcctgcctctgccccccccccagtgctgagattaaaggcccatattcttttacaaggtcttcgcctgctgccgttatggaggggtgggggcctgaccgggcagtgttggggccctaagggacctgttgggccttagctgaatggtgaacctgttagcatgctgttacagtgtttggtaagaggtctgggcagttggccaaaagacatgagcaccatgtcttgtactggactctgcttgtcactgcccaaatgtgtgtacaagccctggacagatatttaagagactcccagaaccctgagcaccccacaaccccttttccagatggggaaactgaggttacagagggttgttccagctcacaactggcagagctggcttcatccagggccgctgggattacagaatcttgctcagaacagttagcttgctccacacacaagggtagggacaagtctggcccaagtctgcagtgcaaaaggttgaggtttgagctgctcacggccagccccgattagcccatctactgagtgtttgtgaatccggatttggctcgagcccccaggcatgggcattttctcctcctttgaagctgcacatggctactgagatctgctgacttgctaggagaggaagctgaggctcggagaagggcagtgtgtagctagctggaggtctaggatgggagcctagtactcatgggtgtgtgggcgcatccagatccctgaggctcaggcacacaaacttctgtcccgagtgtgcctctgtatctctcctgcccggctgcagcttgtccaggtgtctctttcctcccttcctcccttcctcccttccacccttttactgagtactcccactgagtactcttactgagtactcccactaactactctcactctgcttggcccttgctctgagaagttgctgctgaggcctggctgcctcagagccagaaaaactaggaatgcactcagcccctggcatccatcaaacctgggctcacactccagtcctactgtttcctagacatgtgggtgatctggagcctgtggagtcccttctctggggctccgtctcctcccctgtgaaataggttcatgcagagtcctacatcacaggtccactgggatgagtaatgagtgtgaccgttgtgttcccaggctgacctgggcaccggaggggatgttgctctggagtaatgggacagagtgggtgttcccattgccagttaggtccatgactgcacgattccgcacacagctagggtgtagagtggcaggggaggggcaggcttctcgaattccttgaaactgcactgtcacctgcagccgcttgactcagggccctttcttaggaaatgtgtcagacacttaagtacatgcaggccccgagttctcctattcctcctccacagtatcagcttccctggtttggaaactcttccctagtttttaaaatatatatgcatatgtgtatatgtatatgatgtttgtgtgtgtatatatgtgtacaatatatgagtatatgtatatgtatgtatatggtgtatatgtgtgtatgtatatgatgtatgtatgtgtttatgtatatgatgtatgtatatgtgtgtatgtatatgtatgtgtgtatgtgcatatgatatatgtatatatgcatacatatatgtataatatgtatgtgtgcatatatatcatgtgtgtatgtatatacatgtgtatatgtttgtgtatgtatatgtatgtgtgtatgtgcatatgatatatgtatatatgtatacatatatgtataatatgtatgtgtgcatatatatcatgtgtgtatgtatatacatgtgtatatatttgtgtatgtatatgtatataacatgtgtgcatgtatgtgtatatatgtatgtgtatatgtatataatgtacgtgtatatgtatatatgtgtatgcgtatgtgtatgtgtgtgtgtatatatatatatatatataggatgtagatgtgtgtatgtgtatgtatgcatttccagagacatgtatccccaacgtatttactcagcaactactacaggcctggcagttccccaagggcttgggctgtggatctggagtcagcaaagcactgcctcggggcacatgcagtcttgccagcctcctgcttgtaatggagtttcacgacacttatcaggggtgctcatctacttacttgatgtatcagtcacttcactgtcactgacagaatacccaagcaaggcagcctgaagctcacggctggagcccatcatggctgcaaggcctggcagcaggagggtgaggtcacatggctcccacagtcaggaaggagggagagatggatgctggtgctcagctcactcactcctctctattcagtctgggagcccagcccagacatgcccacaggtgtctctcctgggtgatcctacatcctgccaagttgacagtttgtacaacaggacagcaggaaggagtcagatttgctttacccagtttcatctcagattcatccacaaagtgaaaccccaagcacacatgcgtgctaagtcaagttgcggtctgtaaggggcgatcccactcttagcacagctgtgagccaatttgccatggaacctatatgttttgtttgctgacacctacatgtattagtttctttagacaagatacgtttctggcatacgatccttggaacccttcaggcacatctttccgtgatggcaaatgttctgtatgcatgtcatttttaccacacagcgtggactctggattccatggttcacgccccttcttggtttaggctgttgttcatgttttgcaatgacagtgaatcctgctgggagcggctgtgttcgggaacctggcaagcgtgcttgcttgactccctgagatgaacttctgccactaaccctgctgattcagctaaacctgcaggttttaaatggggagacaaatgttctgacttgtttcccacatagacgttagagtgtgtgctagcctggtctctcagtgcaaaccttggggaggaacttccacctgtcttggtcctgggacttgtcagttgctgggccaagccagtagattttcaaattctagattcctgacttattttctttcctttccctttcccctccctccctccctaccttccttccttactttctttccttctctctctctctcattcattnnnnnnnnnnnnnnnnnnnnccccaccctccctccctccttcttcctctccctccctctcttccttccttattttctttccttctttctctctctcattcattcattcatgacagtgtttctctgtgtagctctgactgtcctagaactccccatgtagaccaggctggcctcgaactcacaaaagagatctgctttccaagtgtcaggatcaaaggtgtgcactgccacctggcctttcctgagggtttcaaacatcattttcttgtgtgtgtcattatcagaacctcctggtgcattggtgggaagggtagaacaagtaggttgccaggtggggggactgtaaagagctgtggatcccacagacgtagccaccccctactccaggccctgccgctcacccatcttgcaaaccaagagctacactctgcttagttcctgtgccttggtttcctcctctgcaggcaaagtgcagactgaatggcctctgagccccaccacccctgggtctgctgtctaggatttggttcccctgatttaagacttagcagaactacggcagagccagggtaccaagactttcctttttttttttttttttttttttgcctacttttgcttttaagcttttgagatgggttctttcaatgaagcttttgctagcctagaactcagtacatagctcaggctagcactgaactcatggccatcctcctgcctcaatcccctaagtgctgggattacaggcatgaaccgatcccaccaagcttgttctgagttttctgacatgccccacctgcctgggtcaccagggagcacgaggtgtcttttgcaggtttgtcatctctttgggggctgagagaggaagtaacagtgtagggcgggtgaaggcttgccgtgttatggagggagatggaagagaaggaagagaaggacctgttttcttggggaaagcagggctcagcatttagtcacaaacagggaggcttcatcgggaggagcctgaactgccgaggctcaggacaggtgaggttaaggtctgtgctgctgtagggagggaggaagccacactttgacttaaaaccctgagagccactggctttgcctccatgagcccctgcagcgagggaacccagtgttgcccaggaggctgctgcttcagaggccttgactcgcttgcctatctgcttgtcctgtgtttagggagcttgggcagagctgagagaacacacagtcagccgaaggtttcgccttcacgtgggctctgaacgtaaggctttctaggaagtataagagttgcgagtcccttgggaagcggctgactgtggggccttgtagccgtgacactgagatgctctgacatctgaggatgaacaccctgcggctgactgtgagtgtcaaaacagccagctgtttagcagccaccacccttgggactcttaggtggctggcactgtgtcccacacagagggatgttctctggccaccgaggggcgagcatgtggaggaactgacccaaagaaaatcccagactagagtcaaccagggtgttttatttgggtgatggactatttacaggtgttccctatgattgtgtacctgtgtgtgcctgtgtgtctgtgtgtgcatgtatgtgtacatgtgtgtgcatgtgtgtttgtgtgtgcatgtgtatctctgtgcatgtgtctctgtgtgggtgggtgtgcatgtgtgtctgtgtgcatgtgtgtctgtgtgtgcatgtatgtgtacatgtgtgtttgtgtgtgtgcatgtgtgtctgtgtgtgcatgtgtatctctgtatgtgcatgtgtatctctgtatgtgcatgtgtgtcttcatgtgtgtctgtgtgtgtgtgtgtgtgcatgtgtgtcttcatgtgtgtctgtgtgtgcatatatgactgcatatgtgtctgtctgtatgaatgtgtaggttgtgtgtgtgcgcaggtgtgtctgtgtaaatgagtgtatgtgatgctgacagatgctctaccaatgagccccccgccccagctcccattgcaactcctttgcaacagaggtgggccctggctctgaggccacacagaaaggctgctcccaatgctgctgtactctgttgctcggccaagatgttctgaagtgggaggaagccgcgccaggatgatcttctccctcctcatcccccacctccagagtcctcattgaaagaccgtagctgggagagtcatgaaaggccaggctgggaggccatctgaatcactgctgagtgagcagcccacccaaggccactcttggttactcttgagagctccagggcatagtggctggtttccatggtgacaatgcaagacaaggcctttctcacaccatccggatgagtggggacgtcagcagggcaggtgtcacactgactcatgagccacccctgatgtcaggcactagacagggcccacggctagctctgtgatgacctgtccccttgcttccagcctgcaagtcacaccactggtccagggcatctctttccctgttagattgagctctatgaggtggcctcacatcaggtgacttgatacaggctcagggtcactgctatgtgggtgcggggctggacagtgctgggaggtggtctggtaaatctggaatgtgggaacagccttcctggtgtttctagagtgttgaagtgggaggagatgggctgcactgtgttggacacaggcactgacagggccaagtgacacccatcaggaccctgtacctggctctaataagttacttttcttggtgctgtatcaagattctggctaatggagggaattctggttatctgagggggttctggttaactgaggggccctggctaatggcgtgggttctgggtaactgaaggggttctggttaacagaggggttctggttaactgagggagtcctggttaacagaggggaggttttctcctgcccactgctccagaaagcacagcccactgtggtgggaaggcctggccacagggcatgcttggtccttggtggtagaaatttgttcacatggaggatctggaaacggcttgggcaggaagcaggacagattcactttaagccggcctccatcagcccacgctgctggtgaagccttatgccccaaagatttcataacctccctaatggagaccaggtattcacacagaggtgctgcaggggacattcataccggaaccaagccacagtccatccagagtgcccatctgagcccagaaagtgctgcttcctgtcctgtctcagcagactggggtgttggtctcctttgcgctaacatgggaagcagcgggagccgggtactgtgagggcgtgtgtccatctgtgcctgaatccctcctcctgtccttgcagaaccagctgaagcagtgtttctccaggcgagcccctgaggccaaggatactgacaccctcgtgcaggaagccgacagccagtatgggacctgggcagaccagcaccagaacgggggcaggtaagactcacctaggtgatgctgcccggtcctcggtgacacagatgggacagaggctgccttggtttctgatgccgtgattaacactgtgacctaaagcaacttggggaggaaagggttttacatttccacatcacggttcactactaaaggcagtgagggcagggagctgatgcagaggccatggaggggtgctgcttactgccttgcttcccctgccttgatcagcctgctctcttatagaacaaagactaccagcccagagatggtcccacccacatcaatcactaattaagaaaatgccctacagccttgcctaaagtcttaatgggggcattttctcaattgaggctccctcctctcagatgagcttgtgtctggtggacataaaactattcggcacagagtctatgtgacagtctcagagatttctgtattttaggaaattgtaacaggaagaggcataagaaaggcataagaaaagctcaaaaagatggaaataaagtgtaaaatattgacagcaggcaagcagtctggacagtcaggagcgtgcagaggtaggcagacccacagggacagacacccacaaggacaaacgtacagacatagtaaactggaacactgctgtaaacaggaggcaggtcagcagtgcgggcagcggtctgggtaccttgtggtagcacagcattctgaggttcgtcaaacacaaggctccccacgcgcatccacacgtgccttaaagcatttatagacgacaatgccatattacagtgccaaagcctggtctctcccatgaggccaggctggtctctctggggccggctgcacagcgctgtagggtgtgtcactcctggtaagctctgtgtccggagtgcttttccactatgtaaacacactgaagatggatggacagacagcagccctgggtccaccccaagcccaggaaacaattatgtacaacaatgaacagtaacagccaacagcaaagtgtaaaaccagaaaaccgctattgggcctcagggtcacaactgcatttgtgtgtctgctgtcaggagtgtgtgtgtgtctgtgtgagtctgtgtgtttgtgtgtgtacacatacctgacgattcatggtccgcacactattctgtaagcagtatgagcatgtatgtggttcgaagaatcctcttctgcctggctgggaaggaacccttgggtcagctgttgggaactgcagatgggaggtggtggcaaacccatccctccctcatggggggtgcagggtcagtgagatgaatctgcccatgggcaccttcctcctccacagaaagggcaggtgcctggcatctgctgcaggcttcggtcatgcctgactgactagccctatggtctctggacatcatgccaggatgggaaactgaggctcagagagaggcagggacctgagtaaaaaaacactctatcagtggctaagtgatctgggcttgtacccgggcctccatctctcccaccgctcctaacctatgacttatgtgtgtagtgagcttcctcgagtgtttgtaagcatccctgtgggagcttccaactatctggttatctgtgctgtctccagagggaccctgagtccctgcaggaccccattcctccagcttctgtctgaagatctgagaccttggagcttccaatggctagtgccccctgctgtcctccaaaggaactgcagcttcctgggaccaggctctcttgccttggacagtggtgccccctgctgcctggaaggtggtacttccctcagcctctgtgtttgccctcttccctgttaacacccccatgcctcccagccatgaaagtgtttttgagttgggaaacagactagcactccagggtggaggattcagccccaggggtgtcaggtgagccctcctgtgcaatactgtctaagctccttgttctttcagtgtatgaggagaggttgtggctacaatgtttccatctgtggtggtcctggtgacttgcctgggtggtacccaaaatcccctcaagattccatttcccacatggtgcctggaagagtaggttctcaagtctccactgagcgtgtgagggagagagaggccgagtgtgtgagggagggagaggctgagtatgtgaaggagggaggactgagtgtgtgagggagggaggaccgagtgtgtgagggagggactgagagactgagtgagtgggtaactaagctagtgactgactggctgagtgagtaagtgactgaagtgagcaagtaaatggctgacgggagagagggaccactgagtgcttggatgagggagtgaatgagtgactgactagactgactggctggctggctgactcactgactgggcatatgaatgaatgaatgaatgaatgagtaactcactggctgactgactgactgactggctgactgactgactgacaccgaggaggtaactgaatgcctgacttactgattgggtgactggctgtgtgactggctgaatgaatgaatggctgacactaactcactggctggctggctgactaactaactaactgagtgggtgactgaatgcctgactcactgattgggtgactggctgggttactgactgggtaactggatgaatgaatgaataaatgaatggttggttgactgagtagctcactggctgactgggtgactaactgactgactgagtaggtgactgaatgcctaactggctggctggctggctggatggatggatgagtggatggatggatggttagttgacagagtaactcactaaccaactggctggctggccaggtgagcgaggcagctgttggtctgaatcaagaggcccgaggcccagtcttctgtgctggttattagggaccctccgacctgcctcgccgtcacccaggggaaacgcagcaggagctgcccacataggccctgcattgtgtcagctgtgcaggtcatcagggagtacacagagtgggggaagtgggttttgtctttagaggggtccccagggttggtgttagaagtggactgatgagtcccggcaggtccccacatggacggacctgaggtctgaggtccctgaagctttttttcttcagagccctgaagttcaccacatatctccccacggcctgtgttgcctctcattcattcatcattctctgtctgtctgtctgtctctctctctctgcctccccctgtgtgtgtgtgtttatatgtgtgtgttcgtgtttctaggaacaggtggttgctatatagcccaggttggcctccatcccctgaccctcctgcttctgcctcctcctgtggcgattcctggtgtgccaccatcactctgggttgggtcttggctctcctttgcaacctgcgctcagcagctcctgggttgggtggcgcacagtctctggagcagactgaggagcatccccgttctacacctgagcagtgtctcgtgggacaacggacccctagctactgttgccaggagtggagatcttccaggaagccctggtgtcctctgagcttgaactctgagccgcatgctcctgtgcttggggtttggtgtcctaggaccctcagtgacctctgtcaccttccaccttttcttgcagttttggccccgagtctccgtctcctgacagcagcgcagcgtccgtgggaaagcagccccctggcagtcacttgtcctcatataccgagtccacgtcggtggagcagcgtgacagctccagggaccggcgcagctccagcgtggaccgctccagttccgagctggagtccacagatggcccagagggaccgcctccatcagacgtctgccctgcccaggaagatgatttctccttcatccatgtaagcctgcagccagtggaagtggctgggctggaaacacatttattaaaagattgtcctccgggacaggctctgtatgccaggaacccctgcagtgagcatgggacagagcctttgacaggaaccctcctgtagcttagggcatcccttactagctgggcatcttggggcaaacgccttcctctctctagtgcttagctttcttactagtaacccgtatataactctatagctcaaaggtgatctcgggtgtccaaggtactacgtgccattgagcactcaagggtttgcctgtggtttgccactctcacctggccggccgtgcacagcccgggggccctgcctagagcaggcacagagaacaggctttccgggttctcattcggcaggcatggagcactgtctgacagccattccagtcgcaggccctcttcgtgggcctgaactgagcttgcctgggtcccatggcacagtcacccctcaggtgcccgctgtctcgagccccaggctgcacagtgttctgctctggtcttttcaggagcagaacagaacccgaccctgctccagaaaccctacactcctggaggatgcaggatggggtcacccctgtaccctacgaggaggatggaggatagggaccgtcacctgagtctacaggaaaatggaggataaggaactattgctagagcttccaagggaggggagtgatcattgatagagtctccgagggaggatagggaccattgctagaacctacaatgaaacttcactcctgatagccaagcttctgtccttactcttgggtaactgatgctccagctgaccttgaggggcccctaacaggcctccaaggggactcacagcctacacatggcaaggtctttcctgcggaacctctagacaagagtgtagacagaaagagctgagatcagcccccctttgccatataagcaggcctggcgcccacctctctgggtgttgtaaggatttcagtaggtgatctgttactcactcagcaactgagcactaagctctaactgctgctgaaccttgctgcggctcatgtgtacacacggcacgggtcacatgacacagaggtcttgctggacgttccttctggaactctgagcacttcctgttgtgctcttgtaagcagcagcggcagcaagcagccttgggaccccaatagctggcttcatcccgggtccacactgataactgaggggtgacatcccctgcctgtcttttggattagccggttgacagggctgctgagtctgtccatatgctggtggctctaagtatgaggtaaattgaggcgtatgtggggtgccaccatgacttgggtgtcctgtggggatcatttggagatgtcccagggtggccctgtggacatggaatgtaccccctttagtggtggtctgtaggtgatctctcccctccaacctgcaccctggattatcatggtggccacagtgagtatcagggactccatgaatatgattgttataaagaatgagagaatacactcagctattcatcagacagacagaaaacaggcacatattgagcccccagtctatatgtgcgcctgtgcctgagtgacatcacaggctatgtcctgattgcccacttgcattctagggcactgctcacatggcttccatggggaagccgaggctcacaggatcgagggtgctgttagaacttgatacatgccccccccccgtgcccctgagaacaccccttatgaacaaggctacacatagcctgcagaccctccgcttacagtttctttccttcttgcctcctcctcgccacccccaaagcaaacctcagtcctcgactccagtgccctcaagacccgggtgcagctgagtaagcgaagccgtcgcagggcacccatctcccactcgctccggcgcagccagttcagcgagtctgagagccgatcccctctggaggaggagtcacacagcacgtggatgttcaaggactccacaggtatgccagtgcagcttgcgtctgacccgcattctgcagtgatcaggaagactgtacgctaaaccctgggaagaacagccggctttagagggtttggaacacaagtcacccaggaaggctgtgatttcgcatcctgtagaacttggtgtaagcagggtcttgaatgtgttctgaatccatccatgtgtggtgggcggtgcccatttgtcatcccagcagtttgggacagaagcgagatcttcatgatgcaaagccagcctggcctacagagtgagctccatgctaactgtgactatataatatgacttaaaaaaaattatttattttatgtatgcaagtacactgtagctgtcttcagacacaccagaagagggcggcagatctcattacaggtggttgtaagccaccacgtgggnnnnnnnnnnnnnnnnnnnnnnnnnnnnnnnnnnnnnnnnnnnnnnnnnnnnnnnnnnnnnnnnnnnnnnnnnnnnnnnnnnnnnnnnnnnnnnnnnnnnnnnnnnnnnnnnnnnnnnnnnnnnnnnnnnnnnnnnnnnnnnnnnnnnnnnnnnnnnnnnnnnnnnnnnnnnnnnnnnnnnnnnnnnnnnnnnnnnnnnnnnnnnnnnnnnnnnnnnnnnnnnnnnnnnnnnnnnnnnnnnnnnnnnnnnnnnnnnnnnnnnnnnnnnnnnnnnnnnnnnnnnnnnnnnnnnnnnnnnnnnnnnnnnnnnnnnnnnnnnnnnnnnnnnnnnnnnnnnnnnnnnnnnnnnnnnnnnnnnnnnnnnnnnnnnnnnnnnnnnnnnnnnnnnnnnnnnnnnnnnnnnnnnnnnnnnnnnnnnnnnnnnnnnnnnnnnnnnnnnnnnnnnnnnnnnnnnnnnnnnnnnnnnnnnnnnnnnnnnnnnnnnnnnnnnnnnnnnnnnnnnnnnnnnnnnnnnnnnnnnnnnnnnnnnnnnnnnnnnnnnnnnnnnnnnnnnnnnnnnnnnnnnnnnnnnnnnnnnnnnnnnnnnnnnnnnnnnnnnnnnnnnnnnnnnnnnnnnnnnnnnnnnnnnnntagcctcagccccgagggagccgagacaaactgattcctgacggttgctggccagctcttctagctgaactggtgatctccaggtccagtgagagactgcctcaaaagaagaaaaaaaaaaagataaagcaaggagagattgctgtaggtcgccagcatcatggcatgtgcatatacacgggtacacacacatgaacacatacacacagactcattcatacacaagtgagcatctgttgggccagaaccatgccaacccacctggagcaaatgcagctcaccacagtgacaatgcacccagactccctcacagggacctggcagcaggacctgtggcttccatagccctgagcacatgctcggagatgtgaaaggctgaaaggctggggccgacctttctgagcgtgcccagtgtccagcttggcctggggctccagaggatgtgctgtgttccaccgatgaccagttcttagagaggtagaaactccttacccagcaactcatcagcaggaagcccctggcccagctaggggggtcattctttgaagagactctggagcgctccatatctccccctgttagtggaacgtgtctctgctccctgatctacctctgtcaaggatgacctattattcttccaaagtggcagaagcgagagggtcagctgatgccccaccccagagggggcgatctcacctgtggccggtgtttcccagcaggtggcagagtttgaagaagagaagnnnnnnnnnnnnnnnnnnnnnnnnnnnnnnnnnnnnnnnnnnnnnnnnnnnnnnnnnnnnnnnnnnnnnnnnnnnnnnnnnnnnnnnnnnnnnnnnnnnnnnnnnnnnnnnnnnnnnnnnnnnnnnnnnnnnnnnnnncatattcaaacagcctcccgctacctcttccggttactcatccgtttaacatcctctgtctccatctgccacctgagtgttgttttggcagggatgtgacattatgtctagcttcttctcccaggggtatccagctgacactgtcttttttcttttgttttgttttggttttggtttttttcgagacagggtttctctgtgtagccctggctgtcctggaactcaatttgtagactaggctggcctcaaactcagaaatccgcttgcctctgcttcccaagtgctgggattaaaagtgtgtgccaccatgcccggccacactgtcttaagttaccggtcacccctgctatgtgcctgtggactctagagccgcaggctctgcgtccttgtgcagatgcaggtgtgagtttgctggggccttcactccgatgaagctgttggtctctcatttctcagtcccatacttctggcctggaccaccccagtgccttgtgaggtgttgctgtgcaaacacagctacatgggacttgtcctcagacaggagacagtgacactcggccgtcttctctccccaggctcagctgcccaagaggtcagaagtggacagtcctggagactctctcagctggacaccccagcccaagagtcctaagtcgcccttccatcccggggtgctgggtagtcgggtgctgcctcccagcacagagaaagaggagaggtaaggatggggacgaagacacttcctgcatgggattaggatgctgctgtgcgatatgtggtgcgtgctgggtgctgtgtcgtgtgtgctgctgcgtgggggggagggggagaggttagatggcaatctgtgttttttctgcaagtgtattccgaactctgatagttagagttgcagcccagggggagatgacaggaaccccgaagcctctcttctccttcctcaccctcctgacccagaactccaggccgtgtttccaggaacccctgccaggcgcagccctccgcacatggatagaaactgaggcacccagcctcctcttatgtttgggaagcacattgacttaggcgagtcaggaggcctcgctggttggctgcccttcagggaggaggaagctgcctccacccccaaccaggctgattctatgcagcctaaccaggcctgattctctggcttcaggccagagctggtggtggtcatattgtgaggtgcgaggagacctgggaaggtcacatgaccgttctggggctcactctcctcatttgtaaaattggtttggtgactctgtgaccttggtcggctcacgacagctctgtggtttcaggtcagaggagtgctcgccccagtggctaaaagagctgaagtccaagaagaggcagagcctgtatgagaatcaagcctgaccaggtaagacaagttgtgctgaggcacagaggacttgggggggggggggctccggaggaaggaggttatacaaggagaccaggggtaagagagtctggggaagtgtatatagggtaaccagggctccgagcccatgatcctgaccttcctgctgccttcaagacctttggaaagcggggacatcaaaggccagcttagccagggaaatttcaaagttttgcatagggaaatctcagtatacaaaccatgcaattaaaatttaactcgagactgtatatagccagactcttggcatccacctgagatacagagagggttcactgacactgagatccggggaccctaacgtgctgcgtgtgaagtggcctagagtctgcatgaagccctcataatgatccccccgtgtacttgaaagcacctctcgttttttaaactgtatttattcgttgtacaagtatgtggtatgtgagggcgtgtttccatggtgcagatgcagaggttaactccggagtcagttctctccccccacccatgcgtggggcccagggattgaactcgggtctccaggcttgcacagcaagcttctttacccactgagccctcctgacggccctttaagtcacctggatggcttctgactccccaggacagtgtctctgctttcttgtcaattctgctcttgcctggacgatgctgacacatctgcacatgctcagtagaggcgcatcccgtgctttgagggagctcatcacagtgggctttctcttttggccctggggcttggaacctcatgctagaccagtgccctgcagatgccccatggggctccttcgcctggctctacccgttacactctagataattcccagcagaccatgcatctgactgcgggggtgttagagacatgtgcacagcacatgtcacataattacgtatatgggtggacacgtgatgggtacattcccaggcatgtctgcctcaggatggtagtggaggattcagggggccttgtgtttattctgtctattgtcggggctggagtgcagtttcagcatgtggccacaaggggagcagtgttgtggttcccacatgccctgtgcttatgaccagcagccagacagctcttgctttatggtgcgtgtccagagccttctgtggtgttttgaaatctgtgctaacaacaacccactggaggggagttgaggttctgaggtgatgctcaattgctcctggtcagaatgtcccagtcaggaaagctggaaccccgcccccacccccagtggctcctgcaccaccagggtatatcctgaaccccagcctaggatggaggaaggcctgacggtgagaaccgtgccaggtgctctgctaaccaaagactgtcatttctctgcagacaggatgtcaccacacccataaactcaagccttaaccgccagatgtctgaacctgaggccaagccgcccactcctccctgaccaccatgctcacgtgcctgagtcttcccaccctgaagactgccgtgctgagccacacccgggtccccacaggaagaccctgtcccgggactcgctccagtccacagaaagatctttcggctctccaggcctgtggatcggcctttggtgtgacagttggccttcctgccctctgcatacacctcaccatactccctaggctgggaaatcggctcttgggctcctgccctggcagcccttcgggaaggaccttgacaaacaagcttgaatggcttttgggtttgccaccatcagaggattacgctggggtctgtctcgcgggttgggtttgatttttttccccgcccttttttttaaacaagctcccctttccccactaagagcctaccttctgacttctgacttataagcacagctccgccccatcctgtccatacccttatccttcctgcgaggccccgtgcacagttggcctgggtcgcacggctttcatgtttgcttcagaggggcataaagcaataatgcagccaatttcccctgaactttggcaaagtgcttatgtctcagcattgacagcaggaagaggcaggcagtgtccggttgcctccggttacctgatcgctgtccaagcttacgaaggcttgtgacgttcacccttgtccacgtctgggttgctctgatctccgtggggggcagcctttgcccccagtctcgagcgttacgaaccttggttggaattgtccgtgccctggccactcacgtcctggacctgctctttctgaacacccatatcctgctggagagaagacacaacttagctcagcggagcagacgcgaccccaaccccaccttccatggctctcctggacaagtgattatctaggtcccatgtggatgttgctctaactgaaaggcccctgtactgggaggcccaggccagatgctgggccaagaatgaggtctatggtgtcctccattgtgctacctgcatgttcactccagggagtcccaagagcgtctgtactcctgtttacttttcttaagcctccaaggtggcatcagaagccccccagcaccagcggtcacccggacacacgaggccagctgcccgcagcatgcctgcagcttccagagacctttttccagccttgctttggcgacatgctcagcagttccaaggtggtccaaggtggccatggagggcgctgggtcgggtgttttgatgaatgcctgcctggcgcgtgtgcccaccgctgccctgaggtcctcagagttagaagttgctctctgtaaatccgtttctcacaggtggtatcgagacctgcctcccctgtccatggctgcccctctgtctcttgcctctgctccctcccacccgtcctctctgcctggtttcccttgggaagggtgtggtatgaagaacacatggccgtgcttggtgtctcggtttaggacggtcacctgtgcctgtgggctgaggtgttcagcagcaaggagacggcaggccccacctgtaccccaccttgtgctctggctgcaaacaggagccattgtctgtttaccctgttcctgactctcttcctcccctgagctagtggtgagaaatcacttgggcttctgtctccctgcagactctcccatggttgctgtttcctgttctgttttgttttgttttttaagatccattttgtattctgtggcaattttgatctagttgcttgccagggactttttttcaaacacactagcagggctgagagtggggctcagtggacagagtatgtatctaacacacaggaggtcttgggttctgaccccaggaccacatacatcaactgtggtggtacacatctgtgtgattctagcacctggcaggcaggaggaggagggaggaggaagaagagagggggtagtggctgcttagaagtctaaggacatccttggctacataagataggaacaagccagcctgggctataaaacactcaaacagaacaaagcaacattctactcatgattttgagtctaacttgtcttgactcctttcttctggggagtaggagcctagtgtagataaagaccatggtgtcagggagtgctcctgggtgtcagggagtgctcctgtctttagtatcagaaggcacggtggaattaaaatgggcttgccttgtctcctttgctaacccctcaaacctgatgagaaatcagcttgattccttatgaagacccacgtatggacagcagctctggccagggcaagcttctatgtctctcttccccctccaccctccgcccctccaatccaagctctgacagtttcactgggtggcgagtgacctgctgcaagttggctgtgtccccatttatagaattgatgcagctcagagagcagaggcccatgctttggatccttagccgagctgagcaagtcctcttttaaaaaccaggtgaggttctggggccaagtagtgtgctgaatgcctccccaggaccctccttgtaaaggaacctaatatgccttaatcaatgtgtgtacttcaggcacctgcatccctctcccccagccctccctcctggtgactctggctgttttcagaatctcatgtaggctccatcatctcctctttgcccatcagcattttgacatctgaactttgggtccacccctcccatccagtagataggcattctcctacatagtcgatatcctcaaacccagaggcctttgccctgtgaaatggagtggcatggtgctgtcgggtgtcctcagctccagcagagaaactgggtggtcctggggagtaggaacttagtgtaatgtgtatctcacaccccctgagttggatgcagggacagatgggatcagaggggtttgtagggtaaggaagtgtcttagggtttctacttctgcacaaacatcacaaccaagaagtaaattggggaggaaagggtttattcagcttacacctccaaactgctgttgatcaccaaaggaagtcaggttttgaactcaaacaagccagtaagaacatcnnnnnnnnnnnnnnnnnnnnnnnnnnnnnnnnnnnnnnnnnnnnnnnnnnnnnnnnnnnnnnnnnnnnnnnnnnnnnnnnnnnnnnnnnnnnnnnnnnnnnnnnnnnnnnnnnnnnnnnnnnnnnnnnnnnnnnnnnnnnnnnnnnnnnctgaataaaccctttcctccccaacttgctccttggacatggtgttttgtgcaggaatagaaactctgactaagacagggagcaagcatggagttctgtctacatgcccgttttccttctacaagacagccacctccaggaagcaactgctaaagtagagttggaaatagactcaagtcctcaacttagctgctgagcagggattggaaaaaatactcatgtgattccaaaggaaactcagctggtcctggtgtgtgtgtgtgtgtgtgtgtgtgtgtgtgtgtagggcgggagtagggataagggctgctctgtcaatcctgactttacagccactcatcctggtgcccacagatcacactcgggatctaggctcgattgaaaagtgcaaagccgctcccaccccttgttgatattcagccctggcaagtcctttgggcagcagagatgctgtgccctccaaatgtgcctttgtcccaccacctgtcaatagggagcagatctccaaatacccaggttcccggtgttgcagttcccactctgcatctctgagcgtgcctctgagagagggcctctgttgacgtttcaggaaggtcacattccagaaagcctgaagccatggcagaaggcaggagaatgtggcttcctctgtccctgtccctatcctgtgaccgcctcattacaccctagaacatccctatctctgtggctcccacagtgaaggacacctcatagcctgcatcctttacccaccaagagtctccttcagctgtttatgtcacctgtgctgtgacaatccctggcagctccgagccagctaaaaaaaaaaaacctgttagcctctagaggacaatctgcgttttaaatgtcatcccctgtcgccttacagaatctgttatatggggctcacagaggttgtatattgatctacagaaggcgtttgtaccagactctttcttactctgtcctagaatgatgacggtcctcctcaacacgcgttgtatgctggggtgggagaatggaattatatatatatgatataggatctattttcctaaccgttcctctgggtcctacctgggatgtgtgcatcgcgatggggaaggactcgactcgcaaggctgcagcattctgacagctgccttactaatccacaagctgcaggccttctgaatgacagcagatggtgggcactggagccagtcccaggaagaacctaactgcgtgactgagaattcatctattaaaaaaaaaaaacaaactatatttttactgtcaaaacaaatgggcttcccggacttcgcagtggccggatgtcccctgtgcttttatattttgtcactgtaagaggttttttggcacagacaagcaagtcagaaatccagctgactgcactgaatgggtgaactctgcatgtgcgaagggggcacacccagactccaaaagtagtaaataaagctttcctgtcagtggtaactctgaggctgcatgtccacaagacagcaacggggtgggggtggggggtgttctcttgggtccttgaaggaggagctgctggggctattggtgaaaagagaccaggggtgctaatcgacagcctatgcaaggatagtcaataacctttccttgatgagagcactgtggcctaaccagggaaactaatcaacagcctacccagtgatgcctagttaataacttacccaggaatggcaagtgctaacctattcagggaaattaatcagcttactgaatgatgttagtcaatacctacccagggatgcaattggttgacatctagagatacaacagtagcttactcaaggatgtttagttaacctacccagggatgttaataactgtttcaggtttgttttgctttctgttgctgtgatgagccccatgctcaaaagcagcttaagggaagaaaggtctgtttggctaacacttccaccgtccttcaattgagggacatcaaggcaggaatctgaagctgaatccatggaagtcgctgcttactagttggactggtttgtttacagacgcaggcttagctagtcgggaccacctaaccgggaactggtgctgcccacagtgtgccgggccctctgccatccttatactcaacacattcctatggagatgcccatcctggctggacaacccctcaaaagaaactggttctcagatgggagtctgttgtctcaggctgacagttaaggctaattagagcacaatgctaatcaacagcctatccaggcgtgttaatcaatagcctatccaggcatgttaatcaacaacctatccagggatgttagtaggcaacatgtctggtgaggctggtcaacagtctgctcaggaatgctcagggttttctagaggacaagaatggcgaaatggatgtatattcaaaggtcatttattaggttggctttcacaacgtggcccgggaaacctgacaattaggagtcttcacaccagagaagttgaggatgggtattcctcagccgtgacgctggcctcctcagtggtccttgtctggagccgaaggcctgggggatcactggaaagccactggtctgcagtctgtgttagaaggccgaagaagttgggttctgattccagcgaggaacggtggccgtcatggccgagagcagcagtcaggcaaatgcaaccacttgttccttagatgccgttctgtccgggcagcccattttaagggtgggagtcctagtttcatttctgttgctgtgataaaacactgacattgaacagtttggagagaaaggatttatttgacttataatcccagggtcagtccatcagcggggacgtcggaacttcagctgcccacagccagggtctagagcagagagagatggagacagctttgcttgttcctgctcagttcagtctttcaaccctcagcagcttaagaaactctgcctagggaatggtaccacccacatttagtacaggtcttagaaccggttgtattgctttggagagacaccatgaccaaagcaactcttataaaggaaaacatttaactagggctgggttacagttacagaggttcagtccattaccatcatggcaggaattacagggcagtgtgcaggcagacatggtgctgaaggagctgcgagttctacatcttgatttgcaggcagccatggggaggctctcttccacactggacatagattgagcacaggacctcacacagcaacaaactttcaccaacaagaccacacctactccaataaggccacacctactctaacattgccacacccactctaacaaggccacacctactctaacattgcacacccactcaacaaggccacacctactcaacattgccacactccaacagggccacacctactccaacattgctacgtttcccaatagtgccactccttagggcaaacatatccaaaccacatcacatcaattaatttaattaagacagttcctacagatgtacctgtgggcaactcagtatatgatccctcaattgagagcctaggttttgccatgcttaaatttaaagctaaccattataatagatttccttacttcagttaactttttctgggaaatccctcacaggtgtgtccagaggcgactcctgtgggtgattctagattctgtcaagttgacaatcaattttaacccccatagaagctaatcagtagcctactcattgtggttatcttagggttactattgctatgataaaacaccatgatcaaaataaaattggggtggaaagttggtcactcacagttccatataacagttcatcatcaaaagcagtgagggcaggaactcacacagggcaggaacctggaggcaggagctgatgcagaggccatggaaggatattgcttactggcttgctctccatggcttgcttagtctgctttccttccttccttccttccttccttccttccttccttccttccttccttccttcctccctccctccctccctccctgccttccttcaagatttatttatttattttatgtatatgagtacactgtagttgtacagatggttgtgaaccatcacgtggttgctgggaattgaactcaggacctctgttcgctccagccccgctcgctcctgcccaaagatttatttattattatatgtaagtacactgtagctgtcttcagacaccccagaagagggcatcagatctcattatggatggttgtgagccaccatgtggttgctgggatttgaactcaggaccttcagaagagcagtcagggctcttaaccactgagccatctctccagcccctcagcctgctttcttatagaacccaggaccaccagtccagggatggcttcacccacaatgggtggggtcctccccctatcaattactaattgagaaaatgtcctacaaggtttcctacagctcaatcttatggagccattttcttaattgtgacttcctcctctctgatgacttaactaattatccagcactgtggtaaacagccttggtggagatgttgagaagcagccccacccccgcccctcacaggacagcccctgattcccccctccaaatcccattctacccttgctaagagcacgtggctctgaacagcagtggtgctgatgttcggaactgtgggttagggaatggcagacagaaaacctcagatgtcacagtgctcaggacgattcagtgtggagagggtgccacgctgtctgcagcaccacccagccagtgacaactggctccatcacccgtggcaggaagtggccattaatgtgatcagtggtaggtgaggtcctgggggaatggaatcaagtgacagccatgtgatgtgtgctgtgctcacgtgacctctcatcgcgacagctcaggctgtcgtcaaccctgcaatggaggctactcttgaattcctgatcctcctgcctctggcccccgtcagtgatgatctgcggctggttgatttgtgtggaggaacacaggcctccctcgtgctaagccagcatacagcctctgagctacaggaagaagaaaccctgtactgtcacggaatgtcccccacaatctcatgcgtagagcatctggcttccagacagacagaagtgcaagtgccatttttggaaactggagcttttaggagctggtctgactggaagaagcagctggggtctggtcctccagagcgtcctgtccctgcccccttcccatgtccgtctccttgcttcggtatcttgcctcaaaacaaagaactttgtctactacacgccccatgtcatgacactctctacaaatatgtggcaaccagcaaccttggcttcagtcgtctaaaactgccagccaaaataaactgtccacccttgtttctgtcagacattttagccacagtgacttagtgctaaccagtacatttgtttatgggcctgggacgatggctaagtggtcgtgcaagcacaaggagcagagttcaaatctccagcaccccacgaaaagccagtggtgaactgggcagtgacgacacacgcttttaatcccagcacttgggaggcagaggcaggtggatttctgagttcaaggtcagcctggtctatagagtgcgttccaggacagccagggctatacagagaaactttgtgtcagtggttggggatggagacaggaagattgctggggctggctgtggatctagctccgttttcagtgagggaccctgtctcaagggaatacagcaaagcagggtaaagcgggggcaccagcctcttcttctggcatctgtgtgcacccaggctcactcagccacatacacgatgcatactcacacactgaaactcaattcagtttgtagctctgaccgtaagaactcagtgatttgcctcagtcgtggaatctgtaaaatggcaccccaaggatccgaaattgggatgtaggctgacttgaggatttgagcctacagcaaacagctttatgacccccaagtaactgatgtggcctctttcaaacacagtctcatcattgacatgtgtagtctggccagcatcccacaaagccagcaaaggccatcggttcccaggaagtcatcagacttgtgcaagaggtgactggccttagggggccttcccggacacaccattaggatgaaatggcccggacaggatcgggtggacaggatgctatctcagcatcccgtaatgtgctgggccaacagaacatgcccataaataggccagccttggaggcacgccagtctggagacaactggtcctggaagcaggtttgtactggactgggtgaggcaggggggagtgtactgttgaggaaggtgcaacctcgggtctctctggtgtgcatggcccttgtctggctcactcgagggtagggagggtgacctccaggaaccaagcctgccaactaggcccagccacagacagagctggtgaactgtattgtctgcgggtctgagcacgaggctgggtcccaattgtttgtgtgggctgaggaccaaggagtgggcagctctgagaaagggaatacccggtcatccccatgaagtgggccaaggcccatgtcctaatgatgcaggttagatacagagcagaagctgctggacctcacacaagtgtgtcatgagggaggagcgggtcagtcggggacaggtgttgtgcaggacagtgcatgtgtgtgcacgcccatacacccttgctggcgagcaaatgtctgcagacctgtgtcctaggtctctgcctcctgaggctaagagagacttccagggtccactatgcgagagcctagaacacggtaagcactcaatagtcagcttcacggtcagggatggtttccaaagacctggcccatttaatggctgctcagtccgtctgtttttcctgcctgctgtggtctgctgtccaccctggctgtcctgaggtccagtcctgggcactgaggctgcagagagcccatagagatacccagccctttacagggagcatttggttgtgtgtgtggggtggggggagagtgccatccagtttaagtcctttcttccctgtgttctcagtaaactggtctttcattactgggcctctgggattccccagtcccactgactggcccagatgcgtggcccaaagcaggtgtccaggaggtgtttgttgactgattatagatcttggccctcagtgctgtttgggtgggaacccaccagtccctgatcctgctggccgcagctggtgacctggttctcctccagtttgaggcagaagtatccccagagagatggcggagcagcacggagcacctgagcaggctgcagctggcaagagccatggaggccttgggggcagctacaaggtacctggctggatcttgatgggacctagagcccagggctgagggctacaactgacccagtggagttcccgggcaccaggcttcgggggatgtgggcttcaagctccgcctttcctgtgtgacctcgcttgagttgcttggtgtttctgggtgctgacagcttcatctttaaaaacaaaaaaacaaaaaaacaaaaacaaaaacaaaaaaaccggaagcgatgcctgttgtccccggtcccagaattgtcacgtgataaagcgggtggcctgagcatggttggtggatggggggagtgtgacatcgctcgctctgtccatcccaagcca

SEQ ID NO: 1683 - DNA, 1539 bp, Mus musculus
atggactactactattgccccagcctgctgaaactgctgcggtacctgtgggctggccctatggagtacctgggcgacaagctttcagtggcccagacacacatgactcagtgggttggcacggtgaggcggtccttccaggaggctctgcacttggtgacggccacggtgggcaccgagcggagcggggagtccgccgctcgcaccccgttcaagcgcacctcctccttcagacacctggcctctcggagccgagagtccttccgccgcttctccgcacgcagccaacagaggttctcatccctccggaagagacagccagactctgaggcccctgatcttagaaatggacagggcagtggaagcagctctatggagcactatcaggcccctggtgccatggtgccctgctgtgttcggacagaggatgaagtcaccgtccctgcccctgactggctggccagccctgtggccaggcagaaccagctgaagcagtgtttctccaggcgagcccctgaggccaaggatactgacaccctcgtgcaggaagccgacagccagtatgggacctgggcagaccagcaccagaacgggggcagttttggccccgagtctccgtctcctgacagcagcgcagcgtccgtgggaaagcagccccctggcagtcacttgtcctcatataccgagtccacgtcggtggagcagcgtgacagctccagggaccggcgcagctccagcgtggaccgctccagttccgagctggagtccacagatggcccagagggaccgcctccatcagacgtctgccctgcccaggaagatgatttctccttcatccatcaaacctcagtcctcgactccagtgccctcaagacccgggtgcagctgagtaagcgaagccgtcgcagggcacccatctcccactcgctccggcgcagccagttcagcgagtctgagagccgatcccctctggaggaggagtcacacagcacgtggatgttcaaggactccacaggtatgccagtgcagcttgcgtctgacccgcattctgcagtgatcaggaagactgctcagctgcccaagaggtcagaagtggacagtcctggagactctctcagctggacaccccagcccaagagtcctaagtcgcccttccatcccggggtgctgggtagtcgggtgctgcctcccagcacagagaaagaggagaggaagaccctgtcccgggactcgctccagtccacagaaagatctttcggctctccaggcctgtggatcggcctttgcttacgaaggcttgtgacgttcacccttgtccacgtctgggttgctctgatctccgtggggggcagcctttgcccccagtctcgagcgttacgaaccttggttggaattgtccgtgccctggccactcacgtcctggacctgctctttctgaacacccatatcctgctggagagaagacacaacttagctcagcggagcagacgcgaccccaaccccaccttccatggctctcctggacaagtgattatctag

SEQ ID NO: 1684 - protein, 506 aa, Mus musculus
MDYYYCPSLLKLLRYLWAGPMEYLGDKLSVAQTHMTQWVGTVRRSFQEALHLVTATVGTERSGESAARTPFKRTSSFRHLASRSRESFRRFSARSQQRFSSLRKRQPDSEAPDLRNGQGSGSSSMEHYQAPGAMVPCCVRTEDEVTVPAPDWLDVARQNQLKQCFSRRAPEAKDTDTLVQEADSQYGTWADQHQNGGSFGPESPSPDSSAASVGKQPPGSHLSSYTESTSVEQRDSSRDRRSSSVDRSSSELESTDGPEGPPPSDVCPAQEDDFSFIHQTSVLDSSALKTRVQLSKRSRRRAPISHSLRRSQFSESESRSPLEEESHSTWMFKDSTGMPVQLASDPHSAVIRKTAQLPKRSEVDSPGDSLSWTPQPKSPKSPFHPGVLGSRVLPPSTEKEERKTLSRDSLQSTERSFGSPGLWIGLCLRRLVTFTLVHVWVISVGGSLCPQSRALRTLVGIVRATHVLDLLFLNTHILLERRHNLAQRSRRDPNPTFHGSPGQVII

SEQ ID NO: 1685 - DNA, 142439 bp, Homo sapiens
aaggctagagtgcagtggcatggtcttggctcaccgcaacctctgctgcctgagttcaagtgattctcctgactcagcctcctgagtagctgggattacaggcgtgcaccatcacgcctggctaatttttgtatttttagtagagacagggtttcgccatgttggccaggctggtctcaaactcctgacctcatgtgatggtccacctcggcctcccaaagtgctgggattacaggtgtgagccaccgcgcctggcccaatcctgatttcaatgtgacatctcaccatgtgctcaggccacattctagctgccttcggttcacactctgggtatcagaggtcttgttattcacacttgttatctcactggatccttgccacaactctgggagacccacgggaaactgagggttggcaaaacgaactgacttggcccaggcttcgacactgggcaggtagcacaggtgggggctcaatccagggccgccagtttctgttttacctgcctcattctcctcccaggtgaaacaaggcactggttttcttgtgcatcattcagaaatgaccacaagagggtaggatggagacggtctattttccacatttcgttaatttgcttttaagccgttttacattcgggcctccattctaaacctgaaacatccaaattttccatgaccacttagattttcatcttttcatgcagcccactaatttcggtagatgtgtcactgtgctctgtccccaatgggccccatgtcagtttctattttgtgaacctgacatcagagctgcccagctgagcttaggatgttcctctgcagccttcacagccctggctgccccatttattttcatggatgatattttctcttccggagaaagtattttttgggaaaaaaaaattttgtttttgttttatttgtaaaaaagagcgtggggtatggatagccgagcctatagtgagaaacttatggttatagaaacagcatttttctcttaaggagatgtatttccagagatgctgaatcttctacttgaactcgaggtctcttgagaatagggacattttgtcatatttcaagcctgggttctgtgccaccttctccaagaagccctcctgggttgcaccctatcctgtgaactcctccattccaggccctctagcctctagtgctgtaatttattcccaagtgcttctcttacagaccgtgagccccgctgagggcaagaatcctgcctcactcatgtccctaatgcttcacactttatcctcagggccttcattgattgagcagttgcagtcagcctgctgagtgcttttctcatatcatctgacctctgcctcactgccatcctgtgagggaggaaattatcatgattgttgttgttattctcagcctcattttatgtctgaagaaaccgaggcacagagaagagaagcaggttgtcctggatgacagtgtgaggcagggctgtagttgggatttgaaccccaggcctacctgagtgcagatccctgctcccagcagcttcgctcccagctcctggtagggcttaatcatgttcactgactgagtggggagggagcgctccagccaggttgtaggcgctgctggccctgcgcatgcccaggcaagaccttctagcttgcttctccctcttttctcatcccttggcacggtttgctccttctccacttccttcttttcctcctcccttttctcttcctccctcttctcttcctcctgttttttctcctccttttcctcttcttcctcttccatttttatctcttcctcccttttctcctccttctgcacttttttttttctttttaaaaatcaagacagggtctggccatgttgccaaggctggtattgaactcctgggctcaagtgatcctcccacctcagcctcgtgaagtgctgggattacaggcctgagtcactgcactgggcccatctcctcttcctcctcctcttccccctccttttcctcttccacctttaccccttcctctcttttctcctcctcctcttttttcttcttcctcctcctcctccaatagcttattgaagtataatttacagagtataaaattcactcgattgaagtgtacagcaatttttagtaaatgtaccaagttgcccagggatcactctctagcccagaacattgtcctcaccccagaaggaagcactgtacctattagcaggcactccccccagcccccaccccatccagcggaagcccctggcagccactcgtctgcggcctgtctctgcagtcttgccttttctgcacatttcctgtcagtgggctcatgcagcatggctttgttgtgtctggctcctttcacgcagcacggcattttttttacgcatctgcgttggttgtatcaggacttcaggcttttcgactgggctgctgcttcttgctgggtcctgtcttcgctgaccccatctaccccatctgcccctccgcatggtggagagaaccgattggggccaggagggcagttgttgggtcaggctgggaactgagaggatggaaaatgtgtttgctgttccccccctcccaaccggcacccacccccgccccccgccacccgccaccgccactccctagttgtgtgttttcagtgatttcaaatgtgctgcagctgacaacactcttaagggctctgtgggttggctctgccctgggattggctcagagatgcctttttttggggcagataacccccttttctgatgggctggccccagtttgggctccctcttattgctctgctagccaagggggctgaagtggatatgccattgttaccagagaagagggtcttgaaacggaccccaagagagggttctcggatttcgtacaggaaggaattcaaagcaagttccggagtgcagtaagaagggatggttgattgaaagctaccctgttacagagtagagcatcctcagaaagtgagaggaggacccaccgcccgggtttgtttttaagtttttcttatagaggagtgttgtccatgtaaaagctaagctaaactgtgtctacttgcaggtgagcgcacggcatgacaaaattgattactttattgatttaaagaaacgtggcacgtatgtatacaccatggaatactactcagccacaaaaaaggaagggaataatgtcttctgcagcaacttagacggagctggagaccattattctgagcgaagtaactcaggaatggaaaaccaaatattatatgttctcacttacaagtgggcgctaagctatgagcatgaaaaggcataagaatgatatcatggaatttggggacttggggggaaggttgggaggtgggtgagggttgaaagactacatattgggtacagtgcacactgctcgggtgacgggtgcacgaaaatctcagaaatcatcactatagaattcacccatgtaaccaaaaacgacctgtacttcccaaaattattgaaatataaaacaatcttgaaaagcaaaacaaaaaccatccttgacattttagtgtgtgagtataccgaagcgtaactataattatcttgcaagcacatactgttatgggtattgggacacctggactctgtgctgatgtaggagtacgtccttgtaggtatctttaggctgtttcctcaactgtaaacatcccatgactatcttgtgaccagcaaggaatgtggctttttagtcttaagatggagtcgaattgaacatggccttactctggctctaccaggcgcctgcttccctaacacgaccaggcactcacagctaagattttttttgtttgttttgtttgtttgttttttgtgtttgtttgtttgttttttgagatggagtctcgctctgtcacccaggctggagtgcagaggcgcaatctcggctcactgcagcctctgcctcctgggttcaagcaattctccagcctcagcctcccgaatagctgggattacaggcatgtgccactatgcctggataatttttgttatagtagagacggggtttcgctctgttggccaggctggtctcaaaattctgacctcaagtgatccacccacattggcctcccaaagtgctgggattaggattacaggcgtgagccactgcaccccgcataagatgtgttgagcccttactgtgtactggattctgaacactttgtacgtagtacctcattcatgcctcccagcgaccctgcgggggcaggcactgtcatcatccttattttacgtgaaggagtgggggcccagagagattaaccagctagcaagtgtgggaatgaggcaatctaactccatccacacccttcccctgggcccagggatgcctctgtaataagacacctcatcctctccctagtcctcagtttccctctttgggaacctgttctgtctgcgccctgacctttcagggaatcacaaactgcttgaagatgggcacatgtctggcttccctgggtcccctttggtggccgacaatgcagtgcacacagtgggtctgccatcttcatgcctagatctaaagatgatttcattgtgagcaagactggtgctgggacatctgggaattctctgccttttggggaacagttacagaggacctactaaacccttggctggtgccaggccccgagaccacagagataacctgggacccaggctctgcccatggggagctcccagccctgtgaggaagacaggccatcctcacccagcacatcctactgtacccgaagagagggcgcagtgactcattttttgccgttggcattaggtttaaaagatggttgaacgtccacagaaggaaaaggaattcctggcagagggccctgcctgagcataggcagggaggctgagcagccacgtgtgcttgagcgctggtttggcgaggcagcaagcggcggctgtatggtgaagggtgttgaaggctgagccaggaatcaaggctgctggccacagacgcattgatgatggatgacgtgctggtggggctgagcacctgaaaaaaaagggtgtcagttcccaaagcagggcctggcatacagtaggcccacagggagagcatgaggaatgggtggccgcctggggtcctggagagtagtatttcggatgtctgggctgtgggatgtgggaggaatgtcactgagccattcctcaggtggcacatgccattcctgccccgtccccacataggaatgcgggccacttctcacaggctggaagatggccttgctacatgcgagtcttctgatgtttaaatgttggttagtaactaattcaaacaaaatggtgcaccaccttcctctttccccccaaaaaagaaaaacaacactcaaacaaaattatgtctaaggggactaccatttttcaactttttttaaagaattattattattattattatttttttttttttgagacagtctcgctcgtcgcccaggctggagtgcagtggtgcgatctcggcttactgcaacctccacctcccggattcaagcgattctcctgcctcagcctcccgagtaggtgggattataggtgcctgccaccacgcccggctaatttttgtactttttagtagagacggggtttcaacatattgtccaggttggtcttgaactcctgaccttgtgatcctcctgccttggcctcacaaaatgctggtattacaagtgtgagccactgcgcctgatcgagactgggtactttaaagaaacagagatgtatttctcacagttctggaggctgggaagtccaggatcaaggtgccagcaggtttggtttctggcaaggacctgcttgcttgtagatggtgttgtctaggttttctcatgtggaaatgagggaggggatggaaggggtgagctcaccccttcaagcccttttatttttgttttaaaattatttttattactgtttttaaagacagggtctggctctgtcatccaggctggagtgcagtattgcaatcatagttcactgcagcctcaaactcttgggcttgagcaatcctcctacctcagcctcctgagtagctgagactacaggcacacaccaccacaccaggctaagttttccattttttatagacacagggtcttatgatgttgcccaagctggtcttgaacttctcacctcaaacgatcctcccacctcagccttccaaaatgttggaattacaggggtgagccaccatgcctgacctcaagcccttttatatgggcatcagttccactcatgagggtggagctgtcatggcctaatcacctctcaagtgttccatttcttaacaccctcatcttgggaattaagttccagctgatgaattttggagaaacacatacattcaaaccatagccctggagaatccaggctgatctcacctcatgacccttaacctcgacatctgcaaagaccatttccaaatatggtcgcatttgcaggttctaggtggacatatgtttttaggggtctccattcaacccacttaggggaggaagcctactttcgacagcatgggcaaagtctttatgggtgcctggctcacagggtggggtcaagtggtgggaggtgcacaggggcctggggtgggagggaacaggttggattttctcccaagagtgatgaggaagcaaggaaagcatctaagatgtgtgtgtggagtgcctcggtcacatctgtgcttgcaggtggccccctgccatggagaagggcccctgggggcgggaagagaggacactgttccacttcgtcagcctctgacttctgatgcagccacactccccgggctgcctcggcccacgggtcagggtggtggtcagggcggccagagcaggataaccaggactgggcactgggggcagcttctcctgggggtgtgccctggtgcgtctgaccacctctggttgggagatggggacttgggggtctccattgttggcacctgcccagcggtgctcccctccccacaccccccacctggtcctagattggctctgtctccaccttggactcgccgggtcttggacctttgaacgtctctttttattcttagccccctgccctgtcaccattgtcactgccacctccagctttctccccggctgttcctggtgctctttgtccctgcccgcctcccgggccatcagtctggcttactttctctgacttcctttggggttcatcccttgccctgcctgtcgctctcccatcagaacccctaccccacccatctccctctcctctccctccatgtctctcgtctttctctttttctcctttcaccctctgtgttccctgtcttgcccttccctccctgtctcatgcctttcctgcctgtaacttccttctccttcctcccaccttcctccctctgccctgcgcctggcctgccatcctctcttcctctctccatcccgcctgtctctggcatcctgtctgcctccttccagcccctttctctccgggcatttctctgtcctgggctgataggagaccagacagtcaacccttagcagcctccatgctgactgtggcccctgtcagccaaggggtgtcagaaaggccctggcgggcccctgtgtttatggcaacagtcattcagtagggcagccgcgagcgctgcatgccccacttctattaatccctcagttagcggggcctaaccccagacttgacactcatcagccagtcagccaggacacgcagcgccaggggtacagccaggcagctggcatcatccctccagcggtgccgccagtgcagaggaaccagcccttttgctgcacttttgtcggtcagcaggacccagtgctctggctatgctgtcagctggggctgtcctctgactggtactgtcagctggtgagcagggctggcttttcagctgtactgtctggcagttagggagcagggccggccttccgactgtgccgtcagggagcagggccggccttccgactgtgccatcagggagcagggccggccttctgactgtgctgccagtccctggctctgccatcgctggggccaacccctgacttgtcaggcagcgagcagctgagacccagtgcctgctgggagtggggcgctgagaatcaatgaaaccacaggcctgcctctgaagagctttgaagctaccccgtggttttctcagctgctgcacccagcaccctctccttgttttttgtttttttgttgtttttttttttgagacagagcctcactctgtcacccaggctggagtgcagtggcacgatctcggctcactgcaagctccgcctaccgggttcacgccattctcctgcctcagcctcccgagtagctgggactacaggcgcccgcctccgcggccggctaattttttatatttttagtagagacggggtttcaccgtgttagccaggatggtctcgatctcctgacctcatgatctgcccaccttggcctcccaaagttctgggattacaggcgtgagccaccgtgcccagcccaccctctccttatttaagtgagtttcctgttagatgctctgcctggtgtccagtggtgaggctgaaggatgcagcacagatgggcccaggatgttgctggggcagtcagtgtgccaagctccagcctgggggcgggagcctggtgcagaacccagggcctctgcctggtgcctctgtgaacacctcccccgcctcagttttcccctctcagcagtgagaaggaccttgcctcagaagcacagctgtcttgcatccggcgctcacttgccggagtctctgggttatggcctcggcttatgaggagcaggtgttgagtaggggatccaggagcgtctggcttgtatttgaatccctgtctcactgtttagctgctgctcacctcaggaacctcttttgaccctgtgagttttggtttcctcatctggacagtagaagtgatgatactgccctcatgatatgaccatgaaaactaaactagatggtttggcaggattctaccttgttgaatcctcaaagccctgaacacagggataatttgtcgcattttacagaaggggtaactgaggctcaggaggatgaggtgacttgctaaaatcatgctcttttgaaggaaacatctgggaaagtttgccttggatttgcccgaggtgtgcttttattgcattttaatctctgaaaattgacattctcctcactccccacctggtgcagctggcagctggtgcctcagggagctgatccctccctttgccagcaccccactccccatgctgggctgggtgtccacaggagtggacgggcccaggaatcatggctgggaggcctgggttccagccttgctttagctaccaactcaccgcgtgaccttggccaagtcccttgacttctctgggcctcggttttcctctctgtaaaatggggatggccacaccctccttctggggggatcagaagcttagctgagtttaaaaggaacatgactgacatcaaaggagcccggtaaaccaatgggatcctgagttgatttccttccctgtaacgagtggcagggcctccttctcctcatgtggtttggggaggaggaaccacatacatttgggctcacacgcacagcacacagtcagtccacacatgcacaaaacacactcgtatgcacacatgcacacatacttgactccacgtaaaagcatgtacacacacactccttcatgcataaacacacacacacacgcgtgcacacattcagttcccgggcatcaccttctctcttcttgccttcttgccgtacaactgaaaaccctaaaaccctccgtgcctacggctcccgggagggtgagggtccaggcagctgggttcagaaggatccacccctggacccgccccactggacgagaagccagagatgccccgggcggggctcataggaccgagtggtggcttctcagttccccaggcagccgtggccattagtggagccgactggctggtcccctggccgtgagccggcttctgaatgatttatgccgccttgaacttgactccagcgtgacaggagtgagaagagccgctcccgctagaggaaagctggaaaccgtactgtgctcaccacataacctctgggtgctggaaatggagtattactactgccccagcctgctgaagctcttgcgctacctctgggtgagtggcggggggcagtgcaggctccaggacggggtcacgtcctttccctctcctcctgcttcctgtcaactttgctttttggctgtgtctggttagcaatgtctctgttttctttaagaaatggtggaggttacaaggaagagagaatgttggggaaaaaggaaacgggcttggtttgggaggtagcacaggtttgtaggaagagctgagactcctgaacaggaatgaagatcctggatccgatgtgggctttcctccagtcctcaagaaaacaggaagaacgagaaccacttcagtgagtttttcagaaagcaacatttatttgatttaaaggactattctttattctgaaattacatccctcttgcctctgtgtgtgtaagaatgtctgtcttctatgggatgaaaataatagattttgctttccttttcctgaacctacacagtgatagaagaagttgggaccccttccccactaacactcacactgtgctgtctcctctggataacagaggaaaaaaaccagaacattttctgatgaaatgccaaagtcagggaagctgtgcagaagtgctttgtgaggtataaaatgctttcaggtctcactttgacttcgcaactggtctgttttctgtgcctgggcaagttacttctcctctctgggtttctgtttcctcctctgtgaaataaggagtgggtgtaggtgattctgggttgtgtgacatccatcagggctctgggaatagagggacttaccgaagaattgtcatgggctggtctcagagttttccagaatatttgccactggtttcagcacacccaaaagggaaagtcttaggaaatattatctttcccattgctgagtgtttgcaaatacttcagatgccttcttgcccagagaattttccagcgctcctaaaaatacaactttaggaaacattgccttttagccgccagtcccagagtgtctcacctccctcctgagccccccagagcagtggggaaacaggagatccccccagtccatattgttcaatcattggcctatgaacattcttatataataaatgtaaggcaacattgattgattgattgattgatgttttaattacaaaaataatgcatgtgcatggtaaaaagatatggaaaattcagacaggcacaaagaagaaaagaagtctccaataatcgtatttttgaattgtgtggtttgcaaggtctggataaccttgatgtgcctggctgcgtgttgggctctgggctccatgctggagatgcagagatgactaagatacagtccacggtccccagaacttagagcttggcataggtgttgaactcattgacaaatggctacgatctcatgttcattcagcacacacttaccagcagtagtttggagctagcgccagatacttggaatataggagcaagacggcatggtcccctgaccgcatggaacttagtctggtgagaatttggactttgctcaaggaactgaaacaaggaccatgtatgtgttaggatgggggtggtgcacagtgcctcaagggatatggtctcgttggggtgcaggggccaggagagcctccccaaggaagctgagtgctggaggatgcctaggagctggcagttgatgctagggtaggggtccagggaagtgtgtgccaggcagagggaacagcatgtgcaaagggctggggtggatgtcagaaagagcaagagcccatggcatgcccatggtacattccaggtactggcctaagctcatcctggccagtagaggctgggcagtaatgccctcagcctcctaggggcagctttgtggagtgacagagtcacagctcctcacctggctgtgtcccacctctctagtgaccttgggcaagtcttttcctctctgggccttggtttccccatctggaccatgaagaggtaggatgaggcagtttagaaagtctttcctagatgtgataatgagagagattttcatttgtccgctgctttctgtgggtgaccaggtcctgggggagtgaggagccacataggcccaccgctggttttgcaaattacccacaatttctctgtctctctgagtcactgaagacagcctggcacacgtgttaacaagaccgggatcttagattagcccaggtgtctgcacttctaaactggaaactcttgcttgacctctcaaggaagcttgggaatgtggacctggattctgaggaagccccgtggccttgggaagtccatttcagcttcccaaacttcagcttcctcatctgcaaagcgaggccccgctgccttcctgatttgcttcttggggcaattcctttgaattctctagctcatttctgaaacctagaagctgctcccagaatgtcagttcctcctgcttcccaggaggccaccgtcagatttggtgaccagctaaccaggaataattgcagagagccaggtggaggtgctcgctcccctgccactcctgtagcttcgcatagcttgaacatgcgttcatccatcatttcttcagcatgggcccctcctcactgcccctgggccctggtaatgttgcccattcactagggtcttccctggtgaatgacccccttcccttctgcattctttgtcctgttattctacctttttgtttgtctgtttttagagatagggtctcactctgtcacccaggctgcagtgcagtgaatgatcatagctcactgcagccttgtcctcctgagctcaagtgatcctcccacctcagcctccagagtagctgggactacaggtgcgtgccatcatgcccagctaattttttaactttttatagagatgtggcctcactatgttgcccaggcttgtcttaaactctggagctcaagcgatcctcccacctcagcctcccaaagtgctgggactacaggcgtgagccaccatacccagcctgcaaatttttaaagttttaaataaattttaaaatgttgtatacatttaaagtgtgcaaccagatgttttggtatatatacatatacatagtgaaattagtactgcagtcaagcaaattaacatacctatctcctctcatagtcaccttttatttatagactggtaagagcacctgagatctactctctcaacaaatttccagtatataatacaataccattaactatagtcactatgcttcaggtctctagacatactcatcctttagaactgcaactttgtaccctttaacatctttccattcctccccctacacccctctgccccattctgggtttgtttgttttttaggtagtcttgctctgttgcccacgcaggagtgcagtggcatgatcttggctcactgcaacctctgcctcccaggttcaagcaattctgtctcagcctcccgagtcgctgagactacaggtgcgtgccaccatgcctggctaatttttgtatttttaatagggacggggtttcaccatattggtcaggctggtctcaaactcctgacctcaggtgatctgcccgcctgggcctcccaaagtgctgggattacaggcatgagccactgcgcccagtcctgccccattttgtttttatgtatttgactattttagattccacatataagtgagagcatgtagtattttgtctttctgtgcccggcttatttcacttaggtcttccaggttcaatcatgttgcaaataacacgatcttctactttttaaaggctgtataatctgttgtgtgtatgtgtagatatatatagagaggatatatatatattattgaatatatatacataaagaaattgaggggtggctcatgcctgtaataccagcgctttgggaggccaaggagggtggatcacttgaagtcagaagtttgagaccagcctggtcaacatggtgaaaccacatctacactaaaaatacaaaaattagttgggcatggtggtgtgtgcctgtagtcccagctactcgggaggctgaggcaggagaattgcttgaacttgggagccggaggttgcagtgagccaagatcacacctctgcactccagcctgagcaaggctgtgtctcaaaaaaaaaaaaaaaaaaaaagaaagaaagaaattgaggcatatatatatgtatatgtgtatatatatgtatatatgcatatgtgtgtgtgtgcgtgtatatatatatatggaaacatgtgtccatgaaacatggaaaattcagatgagtacaaagaagaaaagtctctgataatctgtatttttgaattctgtggttcacaagtatatttatcatctatctgtctgtctgtctgtccaactatacaactatacatgccacagtttctttatccattcatctgcaactggacacttcgggtgtgtccacctcttggctattgtgaagatgctacattggagcatgggagtgcagatatctttatgggatactggtttcatttcctttgggtatatgcccagaagagggattggtggatctattctcagttttttgaggaactatcatactattttacgtaacaacttattttagaatacttgagaaaagttacaaagatagtagcgggagttcctgtatacccttcgcccggttcccctaatgttagcatgttactataaccatggttcagttatcaaaagaaagaagttaacattggtgcattactgtgaactaaactccagactaaattccagtgggggtgattttcccctgcaagggacatttggcaatgtctggagacatgtttgattgtcacagctgaggacaggggtgctactggcatatggtgggtagacaccaaggatgctgctttacatcctataacgcacaggacaggtccttccctcccctcccctcgacagcaccaagaatgatcctggccaaagtgtcaattgtgacaaggctgagaaaccttgtcttattctactttcaccagttttgtcacgaatgttcttttttggttccaggatctagttcagggtcccacattgtattttttcgcttttagtttcatccctagtagggcctcatcactgccagctgaatgagtgaatcagtgcgcatctttttttttttgagatggagtctctgtcacccaggctggagtgcagtggcgtgatctcggctcactgcaacctctgcctcctgggttcaagcgattctcctgcctcagcctcccaagtagctgggactacaggcacgtgctaccacacccagctaattttttgtatttttatttttagtagagatggggtttcaccgtgttagccaggatggtctctatctcccaaagtgccaggattacaggcgtgagcactgcacccagtcatcagtgcgcatctttttttttttttttgagacaaagtctcactcttgttcccaggctggagtgcagtggcgcgatctcgactcactgcaacctcctcctcccgggttcaagcgattctcctgcctcagcctcccgagtagctgggattacaggcgcctgccaccatgcccggctaatttttgtatttttagtagagatggggtttcactgtgttagccaggctcgtctcgaactcctgacctcaggtgatccacccgccttggcctcccaaaatgctgggattacaggcgtgagccactgcacccagcctgtcagtccttatctttttgtgtgtccactggcagcataaaaaaatctgccatgttatttaaaaagtttgtaaccatgatatttaatagctgcttaatattcctacctgttgtcagccttggtttatggggtactggtttcatttactttggatatatacccagaagagggattggtgaatctagtagccaattctttgtggttggaaacttaggttattcccaggtgtttattgtatgcataattgttccccgccttaaatcttgattcacatttcgagctgtctcctgtgtcagcttcttagaagtggggccaagcgtgggctgcaacaggttttctgcaaagttgtcacttggtggtgggatgtttttagcttcctgttggcagcctgagtccttctcatagctgcacttctcttctggggggagaaaccactatcaccatcaagcttggtgctggtccagcaacagttggggcatggggagagagattaagtttctctttcaaactattagtaagaatagctgagggctacagcctctggtgtggctgttgtgagttatttaatctcctttgttgctgagataacctcgccagacggtcccaaggcctgtggccttgctaggggcatcaagctgctctcttggggttatcaattacagcagtagtaattagtgatataagcaatagtcatatgatgataaaagtcaccatcaccaccaccactcctactgagtgctcacaaaatcctgagcctgtactaaacgcctttcagaggggtctcattatatccttataagaaccccaatgggttgatctcattattacctgcattttgcaattagggaaactgaggccttgaaaggctaggtatctcctccaaggtccccggctaggaagtgctagagcctgtatttgaacccagctctccctctattatttttactacttcgtggagtctgatcttctggtttctcagatggggaaactgaggcccatggtgttgaagcaacttcccagcctacaggaaagctttctatgcatatcaagctttgcaacgaggaggatgacagaagaatgtggcactaggcgaggcggggctctggagggagaaccctggcctagaatcctggccctgtctctactgggtgtgtggcttttggtaaatcacatcatggctgtgggcatcagtttccctctctataagtggcagtggtcagccccaccttggaggaactgtgctgaggattagctaagaataaggggcattagtgtccttggcacagggctggacttagagtgggcatttaatatggagatggtgtttgttgggagctggggagggctctgatataatggcagggacccccacctcctgtcccatgctcttcccagctgcctctccagccccgcccagggtctgtgaggctgactctcgcaggcttcctctactccagcctcccatggcagaggtggctgctttgagtgtagtgaggaactgctgagtggcccgtggggcgtgacaccccagctggggcttctgatagcttcttggggaaggtgcagatccctcacctgcccttttaagatcctcctgcagggtccgtgttccatgccttagtctccctggagatgggaaatcactgtggttttcattgtgtttctaagcttcatgtccccacgtttgactctgtgaccagatttttgaatggaaaaaatctaaatgtggttagttccactgttttctccccagaccctcttgctacttgttcatttggctgtggccctcactcagcgtgtaatcacctctaggtgacagtagtaataataatagtcatgaaacagcaaaagatattatcctctttcacgctaagtgcctcagtgtgtgggatcttgattaatcctcacaaatagccctgaggggtggattttattattattttaccgaagagaaaactgagattctgagaggctgagtaaccaccagatatgcaacagctggccaggggcagagctgggatttgaacttggaaatctgactccaaagctaatttgatgactacatgcagtctctgtcaggcagggaggttgcttgtgtgtttaccactgaactctcagcccttggcccagtgcctggcacataataggtgcttaatagatgtgggctggccaggtgcagtggttcacgcctgtaatcccaagactctgtgagatcaaagcgggaggattgcttgagcccaggaatttgagaccagcttgggtaacacagcaatactcagtctctacaaaagaatttttttttgaatagccaagtataatggtgtacgcctataatctcaaatactcagcaggctgaggcagaaggatcacctgagcccaagagttcgaggctgcagtaagctaggattgtaccactgcttcccagcctgggagacagagcaagaccctgtctcaaaaagaagtaaaaaataaaaatagatgtgggctgatggaccaccctgttgacctgacatgttgaaagctattgtggggacaaatggccttatcgtagtgcctggcactccatacgcacaccgtaagcaattactgttaccagcttctgaatctcagatcatagtggcttcagtttgtgccaagggtctggtttggctttgtctcagcaatgtctgtggctgaaatagaagaactgactatttttgtgctgtttgagttgggcctgaggtttgggccatggaacagtttgcatcatgagagattttcatctgacttgagctgtgggcgcctttttagacccagtcatggaggcaaaaacgggcttggagtcagtctctcctggcttctattccctactgggccacttattaatagagcatggggcctcgagcaaatctcttagccctcccagaaactcagttttgccatctatagagtagaaatattgatagcaacttcctcgtgggttggcctgaggactcagtgaggcgatgcaaacaaagccaggcatacagtaggtgctgaataagtggtggcagccgatgctggtgctaggcacctgatgtgtcctcagttcagttcagttgcatgcaccaggccctgttctaaaggtttgggatacatcagtgcacaagacagccatgtttcctgccccagggactaacttttttttttttttgagatggagtctcgctctgtcgcccaggctggagtgcaatggcaccatctcggctcactgcaacctccgcctcctgggttcaaatgattcccctgcctccgcctcctgaggacctgtgattataggggcccggccagaactaacattctagtggggtgttcaggcaatcaacaatgggtatgtgtaagaacgttgtatagtatgtcaggaggtgggctgtgctggggaaagacagaaggaaccaggtaagaaggttctggagggcttgggtgtgtggggcctctgcctctctaaaaaggtgacatttgaacagagactttagaagcagggagagcataggccaggggagcttggggggaaacaggaatagtcagtgcaaaggctttaaggcccaagcatgcacaggcacatttgcagaacaggagggatgccacggtggctgcagcagactgggtgagaggagagagtgggcagtgagagcagggaggtgaccatgccgggccttgcagtcactctaaggactgtgcctcgtgcttggggacaccagagccatgggggagtgaccctttgaataggactgacacaacccagcttggcctttgagtaggtccctctggctgtcatgtggggaacagactcaagtaaggggaccagtaaggaaccactgcagtggtccaggtgggagatgatggccgctcagactggggcaggagaaaaggagaagtgggcagattctggatctagttggaaggttgagccccaggatgtgctcatggattggacatgggataggaaagacttgagtcatggatgaccctgagagtttgccatctgctaaaagatggagctgtcatcagctttcattaggaaaactgcagggtagagggtcttgggggcagatcgggacccaggtttgcacttgttggttgagtttgaaaagtcagttagataccggtgtcagcatacgttctccacctcttcccgtagctccccttccccagctgtacaatgggaagggtctttcatgccctgcccatgcctaagagttgttgggatactcaggtgggaggggaattgtaaaggattaaaacacagggattaaaacaccaatccctgttgtgagattcctcagccccttggaaaatcctcaccatttctgagctacaggaagaggtacccagagcctttggagcagaaggccctgctcacatccactagagggtttgagaattcagctgagcccaggccagctcctctcagcaccttcctcactgtgacaatttcagactctttgttttttatttatttttatttttttagagacagggcctggctctgtcacccaggttggagtgccatggtgcaatcatagctcactaaagcctcgaacatctgggctcaagtgatcctcccaccttggcttcccaaagcactgggattacaggcatgaaccatcacacctggccaatttcagactctttgtctgcctgttatggcccctccaagcaggaccactgccctgcctgttagtccacagggtctttgccatatgtaaaatagattgctttttacagtaataaaaagagagccatgtggtaacaatggctccccaagcctagacttccactttttggttcttggtgggcctcagtcaccctcccgtgctgttgggagctttgtcctgagaggctgaagtggaccccactctcagatggaggtctttgaggccccagccctaactgttccaaagcagtcattgctgggtgtcagacattccagggcttagagcagttagaaggggcatgccaatctcgtgactgctgaaaggaaccgtaaatgcaaggcagaagcttgggagggctggacatgtgggcaaaatacttctaggagccaggattccaggatgcaaatgccatgtgaccctgagcaactatttgccctctctgggactcagtttctctgtaggtataatgaaagattggactggagtctcttaaagtttcttcctgtgcacaatctcccaattctaagagtccagtaaggagtggagcttcagagtcagacagatgtgggttctaatccagccctcgctgctctgtgacattgaacaggtgacttcgtgtctctgatcttgtgtctcacctgacgatgagaaactccctgtctcaaatgaggattgtgtaagcatttcattgtggagaccagtggggagagcacctagcacacagtaggtgctgtctttccacatatccaagggaggaattgaacccacagtgtagaagttgctggctgcctcgagggtggaatgacttctcgattgaggcactagagggcacccctgttctaacaacaggggttagatgggcagctgcttttttttttttaagcatgtgcagagctacacactttcacacctgagtgtgtgtggctgtctcaacagccagtgaggcaggggttctgactgtccaaattttgcaaatgaggacaccgagcaaaacctgacttgtccaaaggttgcacagagcctctggaaagtccaacatcaggagagaatagtgtggagtgtaaaaagaaggaaggagaagggaggatcatttgaggccttggagttccagaccagcctgggcaacatagcaagactccatctctacaaaaaatgtaaaaattaccccgctgggtagtgcatgtctatatttccagctactggggaggctgaggcaggaggatcacctaagcccaggagttggaagctacagtgagctatggaaggcttgatgcaggttgatgccctctccgtgccctctacccgcactgtttgctgctggtaggcaaatggattttccagagctgaaaaaggactcagatttgggggtttcaagctgagtggacatgtggtttctgtgtttgagacagagttgatgagtgtggagccaggatactgtgaccttgtgccagccaccaccccctctgggcccagcatcttctttgttgaaatgcattaacttatctcatagttggcttgccgtgcacgtgtattgagtgcctaccctgaactaggcctgagctgggtcttaacacctgagtaggacaagagaagatgggcatccaagaggctgaaccacaatgcgcagaggccaggcacctctggaggaagtgggagatttgagggtgtcattgattttatcactgtgattggagcccagaggacacaatgtaaccatttcagtggttcagtaatgcatggatgacaaggttttcaaggaatttggtctgaattattacagtttaagaaaacctgatgttggccaggcctggtggctcatgcctgtaatctcagaaccttgggaggcccaggtgggaggatcacttgaacccaggagttagagaccagcctgggtaacatagcaagaccctgtctctacagaaaatttaaaaattagctgggcgtggaggtgcatgctttcaagtctcagctactcaagaggctaggcaggaggatcacttgaacccaggagttggaggctgtagtgagctatggttgtgccactgcactccagcctgggtgacagagcaagactctgtctctctaaagaacaaaaaaacaaaaaacacctgatattttatatagaaattctgaggcagggacatacaactgcaggtgtttcatattgttttaatatttcatatcaaacatttatattaataaaatataggcatgttcatgttgacctaatattttgttgctataatataaatgtaataatatcgtaatcagagatttttattttgctcctcctatgtgctggtgtattagttttccagggctgccatattaaaaaaccagagacttctgaatggcttaaacagaagaaatgtattttctcacagttctggagtttacaagtccaagatcaaggtgttggcaagtgtggtttctcctgaggtctctctccttggcttgcagataaccactttctctctgtgtccttacaccatcttccctctgcgtgtgtgggctcctgtctgtgtttccagatttcctctaatgacgttaacagtcagattggattagagcccaacctaacacccttattttaaacctaatcacaactttacaggccctattttcaaataatagtcacctttgatgtactagggggttagggcttcaatatgtgaatttggggggaatatatttcagtccatagcagccaggtactaggaaaagcactttagaatgtttctttttatcctcacaacagtcttagaagggaggcactgttattatgtgcattttacagataaggaaaacaaggctcagagaggttaactcacttgcagaagatcacacagctggtcaacagtggagccaagatttgatcccaggctgtcttactctggagcctgcactgtgttagtttatgtctttaatttgaccttaatcctagggataccttttccacattctattgaatttaccaagctgtcctcatgcctcattttactctgccctctccctgttaaggcctagattggaaaagacccagatagcagggaagaaagccctttgccagaccccctgctgccccagcttgcctgggccccacctggcctgtttggctacctgcccaggggggagtgcctggggccacccccttccagctctgccctgaccgcccctatttgccgagagcagcctgggcccagtgaaagccgcctttgtcctccagttcattcctcctggagggatgacctaagtcttgtcttgaggacaaagcggcggcctgccacgtgagtgcaggtcagtcccagtagtctgcagagtctcccagcctaactgatgggagtggcagccttagttatggtttgccaagtttagtgtggtcaggaaggctgcagagccccctctgtgtcctgagagataatgccagtggctcctgtgtgtatagaacttgacagtggcttacgtctgtaatcccagcactttgggaggccgaggcgggcggatcaccgaggttaggagttcgaaaccacctggccaacatggtgacacttcatctctactaaaaatacaaaaattagccaggcatggtggcgcacgcctgtaatcccagctactcaggaggctgaggcaggagaatcgcttgaatcgggaggtggagattgcgccaaagcactccagcctcagcgacagagcaagactctatctcaaaaaaaaaaaaaaaaaaaattgacaatgtataaaaggtattttatggtttctggtttatctgatcctcccagattctgcagggtgtgcagggcagggacctgttgaagaaatgcctccaggccagttatcagttgccataacaaacgactccaaaacagcagtgcaaaccaaccactgttcattatgtccatggatcctgtgggtcagaaattaggcagggctcagtgagagtgtctgctgcctgtctggagtgtcagctgggagcctcgaacagttgagtgatagaaccatctagagtcttcttcacccatgtgtttggtgcatgtgatggttcaaaaaccatctagagtcttcttcacccatgtgtttggcacacgtgatggttcaaaaaccaggcttccctgggactgtcaaccagagcactgaaacacggccactcctggtggcgtgggcttcctcacaacatggcagcttagggctctggaagtgagtgttgtggcaaagaaggcaaacgccacacttccctttatgatggctgcagccacaggacttacatagcgtcacttctgttctctgctgggccatgcagtgacaaggggaggggacatggacccccttctcagtggcaggagtggcagagaatgtgtagccacattcaaaatcactgcatcttgcagtagatcagatgtgcccaggtgacattcactgagcacctactctgtgctgggcactgtgccagggacttcatgtggacgcttttctcagtcctctcagcagccgattcaaagccattgttttcctggcaggcatttggcctgggagggcagaggagccaaggggaaccaacactgctgctggcagtttggtgttgagtatgccacagtcagaagacgtgggccgatctttttctcttcctcctctgaacttagaatattccttgagttcttgaaaatcctcactgagatgtctgaatcacctcactcaccaaaccctccctctggtgtatatttccagcagtttctctctcccagtgtgctgaggggcccccacctccccccccataaccccctgtccgtcctgcggctctgtaggagggacgtgttgcctgctgctgggagcttttgaggaaccattgggtgggtcctcatggccctgacaggaaccaaatgatgctcaccctgtgtgtgtgagctggtgtgtctatgacttccttcagatccaggcctgggattcattcctctgcctccgcacagcctgatagacagtaagtgtccaatatatgttgagtgaagcaaactgataagtggtgaaggaaggaagggaggaagggagggagggagggagggagggaggaagggaggaaggctgttcaagagcagagattctctcgtatgcacatctgtgtccctgacacatagtaggcactcaataaatactcactgcactggaggaatgaaagaatgaatggatgagtgagactctttgcaagcagaaacagcccctatctttgtatccctgtcacgtgacacagtgcctgacatccaggagtttccatcaatgaatgttatgctgaatgaatgaatgaaccactgaagtgaactctatcagtagtggctgtgtcttgtttcatatctatatgcacagtgcttagcagagggctgagtacacagcaagtgctcattaatcatttacagaactgaatgaaagagtgaaagaaaacaatgaatgcgaaaatgaaacttttcatcctcagagagcatgtcttgttcatctctgtctctccacttcctagcttaaggtcttgcacacagcaggtgctcattaaatgttaatctgaatgagcgaatgagtgggtgagtgaaaaagtggttcttgtgggtagggacatgtcttgctcattagtttccccacttcctagaacagggcttggcacacaataggtgctgaataaataaatatgtgttgagctgaacgcaggagtgagtgagtgcataaatgaacttcttgaggagaggaatgtatctcgttcatcttttccctcagatcctaatgcagggccaggcatagagcaggtgcttagcaaatgcttcctgcactgccctgacctttgtaggagcatccatctgtgaatgaattgagaagggaagcccagctgggtggacctcgcccatctgcatctgccccgtcccatccacccaaccccactgcagacttttcctgttgttcggtctgcacaggtggacaggaaatcccccaaaggccggccagagagctgtttccatattttctccacaccaggctggctctgagtgtgaccaaggcgccagtccgaatcccagcgccgtctggctgtggaacagtaacccccagggacccctcttcctgaccatgttagcagttctaaatttagagccggctgagcagcttgcaccaggcaagtaaagccggggaatgttctactcacagccagcctaaagttaccatgttcagcactggccaggcctgttaacccccaaacagctgagcagtaggcatggagagaagagttaaggctttggggtgcaacagaacagggttcaaatctacctctttgacttcaaatttagaatccatgacaacaaaaatcacttatgtgagcctcagtttttctcatctgtaaaatgggcataataaacctttattctgcccctcccaccccccaccccgccgctgcctccgggatcttatttaccaacctcagctacatgtcttgcttttccaaacttctcatgctgaatctgcccactcttagagatttagtttggaatcagtggatacccagaaacagtttaaaaaactgtgttcctgctgggcacagtggctcatgcctgtaatcccaatacttcgggaggccgaggtggtggattacctgatctcaggagttcgagaccagtctggccaatgtgatgaaaccctgtctctactgaaaatacaaaaattaggcaggcatggtggcgggcgcctataacccagctactcaggaggctgagacaggagagtcacttgaacctaggaggcggaggttgcagtgagacgagatcacgccactgcactcctgcctggtagacagagcgagactcctccatctcaaaaaccaaccaaccaaccaaacaacaacaacaaaaacaactgcgtcaccttgttgattttgcagagcagtgtctcaggtcgggttcccagaagcagactctgaggtggggatttgtgtggatgtgatttagtgacaacagcttgagtcaacgtggtccattcaggagctttggcgggtgaacagcatcacaaaataagtcctacttcagagcactggggcagctttttctccactgcccacggtctggaggagagggggctgtgagccatagcagccagagcccccagcacctggggaatgggcgccccagccaataaaggagatctggcagggaaccaacagcatctaccacctttagcgaggcttcagggtattgactcaattaaatgagatgctgggtataaattggctagcatggagtagttggtgctctgtgagtggtcatttggtaaaatgaaagctcttaagaagatggaagtggtttcactggtgttaatgatgtctttcttttctttctttctttcttttttttttttttgagacagagtctcaccccgtcgcccaggctggagtgcagtggtgcagtctcggctcactgcaacctctgcctctgaggttcaagcgatcctcgtgcctcagcctcctgagtaactgggattacaggcgtgcaccaccacacccagctaatttttgtattcttagtagagacaggtttcaccatgttggccaggctggtcttgaactcctgaccttaggtaatccactggccttggcctcccaaagtgctgggattacaggcatgagccaccacgcctggccaatgttgtctttcattcctcaaacacttactgagtacccaccaggtgccaggctctgcagaagggtacagaggtgcggccaccacattccccaccactaaggaaggggtgacagacacataaatggatacacgtgtgatgatgcagtaactggactgtcttcacacactggagggaatttaagtcacctttttagggacagaacatttaatacaagtgatgaataaacattaaaaataaataacttttttttaattggaaaagtaatacacagacatgtttaacatttccaacagtgcaaaacagtgttctaaagagaaattggtctccctgccatcacctccaatctgcagtcccctcctccggaaactggtgacaggttcatgtgtctccttttgaaaatattctctgcgtacataagacaatgtctgtgcctatatctgcgtctgtaccctcccatatgtacatatgtacacacacacacacacgtgcacgcacacatgcacaatttgccctttgtatccatggtttccgtatccgtggattcaaccaaccatagatcaaaaacattcgaagaaaaatgtatggttgtatctgtactgaacatgtactgacttttcttttcttggcattattccctaaacaatacagcataacagctatttacttagtgtttacattgtgttaggtataagaaacctagagatgatttaatgtgtgtaggaggatgtgtgtaggtcccatgcaaatactacccaattttatgtaagagacttaagcatctgtggatttatgtatctgtgggggtcctggaaccaatcccccacagataccaaggggtgcctgtgtgtgtgtgtttaattttttttttttttttttttttttggagacagagttttgctcttgttgcccaggctggagtgcagtggcgcgatctcggctcactgcaacatctgcctcccgggttcaagcaattctgctgcctcagcctcccgagtagctgggattataggcactcacctccatgcccagctaattttgtatttttagtagagacgggttttatccatgttggtcaggttggtttcgaactcccaacctcaggtgatccacccgcctcagcctctcaaagtgctgggattacaggaataagccaccgcacccggccatgtgtgtttaatttttaacacaatcagatcttgctatgcatagttatcaatgtcctgacttttctttttctcataatgatgagatttttctatatcagcataataggtctatgccattctttgttaatggctttatattcttccttgcactgtaattttttgaaccagttgcctctagacagacatgtcggtcatttccagttgcgtgcactataaacaattctgcagtgaacattgttgtgcagacacctttgcgcccttgtgtgttttgctgcaggagaaatgcctggccgtggcctttctgggtcatctaaagattgaacaggggttttctaggtgggctgggactggcaggggtgatggagctatgctcaggcataaagaacggcgtgtgtaggtacagaggctagaagctgagaagagggtggtgcgctgtcagacataaaccaggtctgctgtctgcctcctggctcctgggctccagcctgatgctcaaatgcccccacctctgccagggtttcactccatctgtgaggatccagggagtgcgggcagctccttagaagaagtctctggcccaccaggcttttcttgctgtcaggcctcagggtttgcactggagtgtgctgagctctggagcccttagctctactgctatgccggtcgagagaccgtaatttctttcgtcagtccctgaagttccagtctcaccctgcacgtggccggtgtggtgagaagcccacaatggcaggctgttctcagcatcctccatcctcatattttggagaatttagctgggaccccaccctaaacatgttcaggactctggcctcatttgttatctgggtagctgttaggttaatctgtttcctcttccctggcctttcctgcacatttattttgaaagttgaaatctcaaatgtctcccagactccctcagtcctttagaacataggcagtcctttgggaaaaccccacactcggagaacttttctgaggccttgtcgagagaaacagccaggggctggccccttctgcctctgtaaggcaagaagaatgactagttactgggtgcttgctgcatatcagacaccacacaaggcactttttctgtcatctcattgggtacacgtagcaccttcatcaagcaatattgttatcatcattttatcacaggctcagacatgtgtagtgacttgcccaaggtcacaaaaccaatggatggtggctctgttatcccacagggctgtctttctgttctactgtgtttctctccactattccttattgggaattccatgctgtgaatgttcttccattggacatctgtcctattggactgcaggctccacaagggcagggatcctcatctgtcttggttcactgctgtatccctggagtctagcacagggcctggaacacagtaggcaatcagtgaactcttcttaaatgactgcgtgaatgagtgaaggttagataaagtactagtccatttttttttgagatggagtcttgctctgtcacccaggctggagtacagtggcgtgattttggctcactgcaacctttgcctcccatgttcaagcgattctcctgcctcagcctcccgagtagctggaattacaggcgcccaccaccatgtctggctaatttttgtatttttagtagagatggggtttcaccatgttggccaggctggtctcgaactcctaacctcaggtgatccacccaccttggcctcccaaaatgctgggattacaggcatgagccaccgtacctggcctggtccattctatttcaagcaaaggtgttgtttgtttgttgatgatggtgatgatgatgaagatgattttgttctacctctcagaattgaactcacgctgccaaaaacaaaactcttctttcttcgtaaaccagtttaccttatgggaatctggtattttgcatttttcctctccaagccaaatgagaatgcctattctatatcagcagagatagaaatctgaacatttcctttagaaatttctgcatagaaaactaaagcgaggcggaactgcgcttgaagatttcagttgccatggctacgggtaatacagtgaatcatgttctcacatgcgttcttccttgggccttcaattgctgtatctccgttacaggattttgactattaaatgcattttattcagtaaggggttgagaggagatgcccgctgctgagcccccgctgactgaaatgcttcaaccagcaaggatttattgagcatctcctaggctctggttcatcagggttcatcttcatcactgtcttgtgggtgttggggttaccacctctgttgtagagatggacaagtacagccccatagagtttggcttgtgtgtgtgttcatttattcatcctttagtttatttggtcattcatttactcctttgtttatccactcaacaaatacgtattgagtcttttctctgtgcccgacgctgttatagtcaccaagcatcagaggggaatacgaaaaacaattcctgccctggctgagtgtgtgttctagtgggagagacagctaatatatatgaaagataaataattccaaatacagataaatgcatgaagacaaggaaacagaatgatgtgacaataaaacaggtgatgagactgggaggaagcgtgactggaataaaatttgggtggagccctgagggaaggagccagccacgcagggatgtggggaaggaggctgcaggcagagggaacagcacgtgcaaaggccctgcattgggaacaagctgagacaggttgaggcatagtaaggccaatattgccagccttccattgagcaagtaggggaagcaagtgggagccttgtgggccagggcagaatatgtagagtttattctggctgtagtggagagatgagggagcatttttggtggaggctaacctcgtaggatggagaactgtcaagcccagccaggctgatgtgtggggagtggactggaggggcaggaggtaaagcagggaggccagcggcagtggggacttgggtccagtgctggggtgggatgggaagcaaggagaagtgatcgggttcaggctgtagtttcaaattcaagccatgggaatggattggaagatctggggagaagaggaactacggagggtccccagtgtctggcccgaataacaggcgagtggtgccaaattttactgcaacagggaaaagagtgtggagggagcagctttagatgcaggggagctgttgcgagttggtgggaagagatggcatcagagcacaagaggagaggctggcctgggctgtgagtgtggcccctcggccccctgcactggagggagtcagggtggcctcccagatgcagggaacagggagggtgagctcaaggtcaccagctgagtatggatgggggagttgcagattagtggaaagagaatttactgagttttggaagcagacaggttcctgggtttaagtccagccggcaagtgactatgttcattgagcacttactgtgtgctaggtaatctctaggcagtgtctcacacaaccctcacacaaaccctacaaagcaatcgctattgttatccccatttacagatgaggagactgaaactcagaggtgcagtaacttgtctgaagtccacagcgcattggtggaggggccagttttgagcaggcagcctagctatgcttcacagcctaggaaccagatcagaggctcagatttctcatctttcaagaggagagacaagaccttgcagggctgttagtggaatgccataaaataatggatggcaacccctatagagtgcctagcactgtgctcaggcacaataggtgcctaagggacagccactccctcccctgacctgtttctgtccacttggtttccattaagtgacactcactgctggcagttcattactgcacagtgtgttcaattgcttggagaagtccttcctccaagggatctcattaagtccattttgaaatgagaacacttggtggggagcggggaggcagttattattataccctgaaaatcagttgtttgagtaagaatggagaggtaccgggatcttccctgccccccgacacacacacacacacacacacacacacacacacacacacacacacacacacacactctctctctctctctctctctctctctctgtctctctctctctctctctctctctctctctctctctttctctctctctctctctttctctctctctctttctctctctctctctctctctctctctctctctctctctctctctctcccttctgcttctgcttctgcttctgctcctgacagtgatgctggtttgcaggcactttgccagcccccgccttgcctcccaggacttctcactttgggttaaagaagggagggaggacagagagatatatggggccaccctgaggactgtataggtgtccacatccaaacacgaaggctgctcccaacttaaagcatcgttcttgttttcgaagaaagcgaaccatcaactcagaccttcttgagagaggagtttttctgtcaaagctccaaacagggcattttctgttgccttcttgagacttgggatgaatggtggttaaacgggagcagggaggcccagtttaaatgcaggtgtgggtcatttgcccagagcttggagccctccagagctccctccagagggactggcgtgttgtgctgcgggtggtacatgcagacccccagggtggctttgtggagtgaatgaatccgggatggagacctgaagggcccttatagatcatcatggcaacccctccttgttggctgagaggacacaggcccaggtctgtccaaggcccctcagcaggtgggaggcaagcaggccctggggtgggaagtaaaaggtgagagtgagaacacccctcaagagaacttgaagaaggagcagaatgggaccagtgagttcattttagtgaaggctgatgcagcataacccccgggccttcctccagcagcctctccaggcctccttttctttctgaaaggtcttagggaggtaggattaaagctccagacagcgttgtaagaaaatatgtcatgtgccttgagaaaggtgattgtgaaaatgaacacttaggaagaggtgtcaccattaccgtctgagcctggccccaggaggtacacatccgcattctcacgactttgtgttttcatgagcacagcctgtgtcctgggtggatctgggagcatcaggaagccagcccttccttcctctctctccctcctccctccctctgattctcgctgagcatcattatttgctatgtccacttgtttgttccccagctctttattgagtgttttaaggagtggggatactgtagtagacaaaacagacagatatgagtgcgctgagtctgtctcaggtggtgtttcttgagacatgaggaaggccccctccagagtgtatatacaaaagttcaccagccttcagaccagacaagcccaggtccaggcctcatgcagtcatttcctagctgagtgaccttgagcacaacaccgaacatctctgaacctcagtttccccctctgtaaaatggcagaggtaccatccagttcactctgtgattctggagattctgtggggaaaggtaggtgtggttcttatgaaaggcagggtgccgtgcggtccagtctctgcacagactcacattccagcatctgggagcaaaaaacaataaaaattacaaatgctatgcatctctaaaagaacatcaagaggccgggcactgtggctcacgcctgtaatcccagcactttgggaggctgaagagggtggatcacaaggtcaggagatcaagaccatcctggctaacatggtgaaaccccatgtctactaaaaatataaaaaattagccaggcatggtggcgggcacctgtagtgccagctactcgggaggctgaggcaggagaatgacgtgaacccaggaggtggagcttgcagtgagctgaggtcgcgccactgcactccagcctgggcaacagtgtgaggccacatctcaaaaaaaacaaaaacaaaacaaaaatcaagaaacatgtaaatgatgataagctgtaggaatactgatgactgctaagcccccctagattcatccccttatgcccaatctcgcacaacctcatctttgctccttttcatggttctgtttcctgatcctttttgacttagcatgacctcaccgttctggttagccttcggctttctcctcccttgtttctgctcctgttcttctgtagccaagataaaaaatttctttgaaggtgcagcacccaatggaggaagcctaggttttctgctgggcctgacagcaatagcactgtccctgggatcagacggagagggaggatttggagctgcagagccagatgtgttccctgcctgccgcagatggtagttggggagctaagctgggagttcttcctgtcctctctgtgatgagtcggggagaaaaagcctagagctcctgaggaattctgttgtgtgtccccggccttgtcagatgaggagagaccatctgcagggtacacggcgaacctgacactcgacacaccaactctagcatctcagaactccaaaaagtgcttgtggctgtttggcacagcccacacagggccttgaggctccttcgccccactggggtcagggtggcagtggcagttacagccgcttgtccacgggctgtctccgagggctgcctctctgtgcctgttcaccaaagtagctgaggagcctggtctcactcgtcctcagctacgtaggagtggacagaggtggtcttagcagtcactcaagacacacaagatcttgtggggcccctggcttctcaggcttccatcttccctccctgttgcccgtccgctggtctttgggtgtttcccatttgtctaagacattcccatcccatgtcctttgccctcaaagttctgcctattacaagagccaacaccattattattttttaacagttctgaaaaaccctaattgacatacaataaacaacgtttcaagtgtacaatctgatgagttttgacgtatgtgtattcccgtggaaccgtcacggcagtgaaaataataagcacgttccacactccctgaggcctgctcctgcctctttggaatccacccctccttccatcctgtcctcaagcaaccatgatctgctttctgccactgtggattagtctgtgtgttgtagacatgcacgtgaacggagccgtgcactctgcagtcttcttcatcagtgtctctcacttagcataattattttgagatgtgttcacgttgaggcacatatcaataactcgttccctttatcagagcacttttccattgcatggatgtgccagtgtattcatcccttctcttgttgaccggcatttgagttgattccagtttagagctattatgaatgaagctgctatgaacattcctatacaagtctttgtatggacaaatgctctcgtttctcttgggtaaatacctacaagtgagacggccttatcatatggtaagtgtatgataaacttgttaagaaactgccaaaccctgtcaaagtatttgtagcattttgcactcccaccctcagggtatgagaggcccagttgctccacatcctcaccattgtcatttggtacaatggtgttgtttcatcagtagagatgctgaaagtaacaaagacccccataaaaatgggtctgacaataaggacgtgtattacctcgcacagttcaccagctggtattagtatggggttcggcaaactatggcctgtgaaccaagaaggagttttgcaccttcaaaaggttgtaggctgggtgcagtggctcacgcctgtaatcccagcactttgggaggctgaggcagatggatcacgaggtcaggagatggagaccatcctggctaacatggtgaaaccccgtctctactaaaaatacaaaaaattagctgggtgtgatggcgggtgcctgtagtcccagctactcgggaggctgaggcaggagaatggcgtgaacctgggaggcggagcttgcagtgagccgagatcgcgccattgcactccagcctgggcaacagtgcgagactccataaaaaaaaaaaaatcgtaaaataaaccaaaaaccactcaaaacacaaagaaggtatgacagagactgcatatgacttgcaacacctgaaatatttaccatatggccctttacaggaagttttccaagtcctggatgcatagatccacccaggttcttcccatcttcctacacttttcttggcatcttattccctcatggtccccaaatggctgccacagttccagccatcctcaggagcccggacaacatcccaccaaggaggagggtgcatcacgaggaagacttctccctgtagtccacccagcagacttgcccccaggtccccttggccaggatttggtaggcagagggttgtgaaaattgacacttacaaaatggcaaagagaacactgtgatgggagaagcccaggagttgagcacagagaaggcactttacttggaggagagagcagcagagaaggcttcctggaggtggtgacatcagcacaaagtagaaattggccagagaaaggggcagggaagagaaggcaaatagtagttcttccatcccctcccctcccctcctctctctcccctttcgttcccttctttacttcattcatttatccattcaacaaagacttaccgaatgcctccagtgtgccagggacagggggcaatagcagagactaagacatagaagatttctgttcttataagccttccttagagggacagtaataaataaacaattagggaaataccaagtaattataattattaaagtgtaagcggaagggtgctgtgatagggtctggagagtaaccttagagctgtgactcagaagcaagaagcatcaaggctgcgtaggatctgcaggcagctctgggttggaaacaactgggtggagggggcgggggggggtttgctctgattgccctgatgccaggggctctggaagagactaaatctaggctagcccaaggtctaggactctgaggctgtggaatgtgcattgtacccaaaagatgggctgccatggggacctgtggagtgacactcctttgtcaagatgccagggctgcctggctgccccattccctgccctctccgcccaccccagcatggctcctggaacagcgtgggtggcgcaaaagagaggctccccatgtgcagagaagcaaggtatgtgagaacagacctccagctgggtcaggagaaagcactcctgtgtggaggcgtgctctgcaagtggagaccattcctcacagcagctatgagatgagagagaggtgggggctgcacagctgagtgatggaaatgacgggggtggggcgtggtaccactgttgccttgcccagagagcggaagctgttgagcacaggcctccaagtcagactttgccactaagccgctgcacaatctccagccttcactctctgcctcagttttctcctctgcacagtggggatgcttgttttgttcccatgagttggtcagagcatataatgttaccaccactggtaagaagggtaccgtttttctccccttttaaaggcagagaaggtgaggctcagagaaggtaagctacttgcccaggatcacatagcaaggagctggagggccaggcagtcagactttggagccctgccctaaaccgtgcttgtgaggatgacatgagatgatgtggggcctggcacacacaatatgtcctgtcagctcttaggaaacatgtaccctatcggagcagcctttggatgagtgttgatttagcctggggaaggggggcatttctctttataagtttgtctttcaaaatgtgggtttttttgttttttttttttttttttttttttagatagagtctcgctcagtcacctaggttggagtgcagtggtgcaaccttggctcactgcaacctctgcctcccgggttcacaggtgtgcgccaccatacctggctaatttttgtatttttagtagagatggggtttcaccatgttggtcaggctggtctcgaactcctgacctcatgatccacccgcctcggcctcccgaagtactggtattacaggtgtgagccaccgcacctggccaaatatgggtacttaagccacactcgttccaatggtgggattccaatggggcagtccccattggaatatccatgcctgttgctgggggcctcctgtgtgctcttggcttgcactgatacctgggaggtaggtgtcatgatttccatctgcaaaaggaggcagctgaggcaggagaaggtggtgcaagggccccaggccatacagtatttgtaactgggtctggtggccttgcagaggaaggtggaggattttgagttggtctttcctgtggtcttcctgggtaacccccttggggaatcacgtcccagagaggaggggagcattgcctggggccccacagtggtgtggggcagagcctggctcttcctctccattcagcctgggcaggagggcatggaagatgccctctgaggccacccagacctgctggtcactggagctgtcgatgtggttgagttttcgtcagaactgagtatgggagggggtccccaaagccatgttggtgaaccttgtgtttttcaccatcaggcttcagttggggttcacaaccaatctaagtgtgagtgggagaaagccaaatggagtggaagggaggaggaacacagggcaaggtcttccctcctatgaccacatcttctgtaccccataatccagctgacacaaatgggggtattcacaggggcagggtagcccggtggttaagggcccaggctttgagttccacccagccgtgggttgtgtcacagctctgcacatagcagatgcatgacttggactagtgatgtcattgtccagagcctctgttgtcccatctgtacaatggagattacagccttcctgggttatacctgtcaacgaggcagtagggcgcacagtaggcccttggtgaatgacagctactgtgagttgagactatgcttactacaaaccccaagtaaaatagttgcacaggctagggattgggtctttggcttccctgctatagtacctggttcatagtagacactcaagaaagtgcctgttgaagtcagaaggatgggagggaggaagcaaggaaagaaggccagaaaggccttctcattttttcaatcttttatgatactcatggagacctttataatctcggagtgttgcttagagggcagttcagccaagtaaagcaaactcactggtcagaaatacattgcttaggggaggtcatgtgttccttatcccatttctcatttgttgtttcccaagaacatcttgctttgttttgctaaccgagccaacagtatggaacttcagtcgctgtggtggaaagaaacgtgttgtccagccccaggcagtgtggccaaagataccagcagagctcccctcctctttcccagggtctgattgcccccagaaccaccgggtggcccagggagataagtcaggcaggggaattaggtgggggcctgccgcctgcctttttccattttagagaaggccagggtttgcagccttgtaagaggcctggctcttggaagaggggctgtaattacagattggctttgccatgccaggcagggccacatggcagactctccacagcatggaaaacgctgctttctacttgagctgagggtggggcctgataaagaaaggtgatgagtttctgtctgtttctagaaagatttccttgctagatgatttttattgattgattgattgattgattgctcatcccaaggttaaagacatcttaggtcactaaaatgactatttgaagaagaatgtgataaattaacacaaggaaataatcttgggcttggtttataaataatctgggattgacttgtaaaatcaagtcatttctatttttttttcttttatctgaattcctttccctgttgccttggaaacaagtctcccaagaaggatgtttggagtcctgtgacttgggttcaagcctcagtgattccttcatctcacacagtgggtacgatgagagcctcttcaggatgttgagtgtcaagggtggacaggacacgtccctgccgcccacaggctcgggacctggaggggaagactgatgggtaaaccaaattatggccaggtaaactgtgtgattcggtaggggttacataggcagagtgggaccccagaggtgccccctgcccccatggatataaggaaacgggaggtgtctcagaggcgggagtatctaagctgagctgtggtggactagatgctggccaggtgaggaaggggtggaaaggtgtcttagccagagggaacagcatatgcaaaaggctgaaccagagatgtcatggcacattccaggattaacatctgtccagtttgttcagggtagaaagaagctgggaaacaggtaatatgtgaggttgcagacgctgtcaaagttcagatcatgcacatttcctaggagatatcagagagggcgcctgctgcagatggactgtgaggccttagggcagccctcggtctgggcctgtttcttcagtttagtgggaaggttggcctaggttggtccctgctggtgtcttgattctgactgtctagggtcctgtgattcatttgaacagtgagatgataggaattataatagaaaaacgatcatcccttgtggtcaccatttattattttgttgttgttgttgttttgagacagagtcttgttctgtcgcccaggctggagtgcagtggtgcgatctccgctcactgcaacctccacctcccgggttcaagagatgctcctgcctcaggctcccaagtagctgggactacaggtgcacaccaccatgcctggctaatttttgtatttttagttgagatggggtttcaccatgttggtcaggctggtatcgaactcctggcctcaagtgatccacctgcctcagcctcccaaagtgctgggattagaggtgtaagccactgcgcccggccttattgagtgttaactatgtgccagcggcacaaattatctcagttgttttttttgtcacaaccttttgaagggggtgggcctcatacaagatgagaaaaccatgactcaggcgatgcaggccttacgcggaagccctgtgccatccgctgccttctgactgacggtgttgctccacctgaaagagagaaaaaagtaggttgaagctgagttcatgagccagcccttcccacacgtagtcctgggaatttgtctccaggccagtcgacaagaaagggaaactaatgcaattggcaactgggcaagcccttctgaaggcttttcctgaccctcacaagaggcctggggaacaacccaggtaagtgcagagaaatgaggtggtgaaaggctttgggatcagacaggtctgggttcaagtcccagagccctcttgccagctcagtgaccttgggcaagtccccccccaaccgcctttttttttttttttgagaacggcgtctcgctctgtcacccaggctggagtgcagtggtgcaatctcagctcactgcaacctctgcctcccaggttcaagcgattctcctgcctcagcctcccgggtagctgggattacaggcacgcaccaccgcacccggctaaagacggagtcttgctctgttgcccaggctggagggcagtcgtgtgatctcagctcactgcaagctccgcctcctaggttcacgctattctcctgcctcagcctcccaagtagctgggactacaggcgcctgccaccacgcccagctaattttttgtatttttagtacagacgaggtttcaccgtgttagccaggatagtctctatctcctgacctcgtgatctgcctgcctcagcctcccaaagtgctgggattacaggtgtgagccactgcacctggccttttttttgtatttttagtagagatggggtttcaccgtgttagccaggatggtctcaaatgcctgaccttgtgatccgcccatcgcggtctcccaaagtgctgggattacgggcgtgagccaccacaaccagcccagggcaagtccttttggctttttaaacctcactggcctctgcaaaatggggaacatcactaatacgactcacgctcaagtgttgttttgagggttaatgaggtgagatgtgcaagtaaacgtttcctgggtacacagtaaatcctccattagtggttattatttccactgtaccaccttcttttttgtttgtttgttttgttttgagatggaatcttgctctgttgcccaggctggagtgcagtggcgcaatcttggctcactgcaacctcggcctcctgggttcaagcgattctcctgcctcagcctcctgagtagctgagattataggaaactgccaccacacccagctaatttttgtatttttagtagagatggggttttgtcatgttggccaggctggtctcgaactcctgacctcaggtgatccacccgcctcagactcccaaagtgctgggattacaggcatgagccactgctcctggccccaccttctttattaacataatattagtgtacctcttagtctaggatgcacagtcctggaatgtccaatcttttaggaagcaggatgtgaagagggtcatatgagtgggacctcctgcgggagatctggaaaaagccgaaggttgtcttggaggtgggagaggaggggaaggcagctgtaggcagggatgccacatgtccagaactccgagggcaagactgaacgtgccccgacttcctggcctttgcacgtggtgttctcaatttcagccctcttggaatactcctatttatccttcaaaaccccacccagatacccttcttttgattgtaagtctttaataagtgatcatttccctgtgaccttctttcctcaacctttgaatttcttggttggggttcaccctccctattatgttcccatagcatgttattcacttgttcatcagaacccttggcaattgttcattttttttttcctatttctttcttccaccagaccagggattcttaaaattatacatttttgtatttgattttggggagaaaatgggatagcctcagatttgagttggccttccacccttaatggctaagaatcagatagatacactgagctcttcagagaccataggtcccctcaagcccaacactgaacttgcagaaagtaactgtccagggaatgtttgttgaatgaatgaatgaccgacatattctgatttcttctttctctttctttctttccttccttttcttttttttttgagactgagtctcgctctgttgcccaggctggaatgcaatggtgtgttctcagctcattgcaacatacctcccgggttcaagcaattctcctgcctcagcctcccaaatagctaggattccaggtgcccaccaccactcccagctaatttttacatttttagtagatatggggtttcgccatgttggccatgctggtctcaaactcctgacctcagagaatctacccacctgagcctcccaaagtgttgggattacgggcataagccaccacgcctggcccattttctgatttctgaaatcacacgtgattgtctagaaatggcgatctctgtgtctcgcctcacattgtaaaagaaattcccatttacttcctggatctcagcagcttctccagcattttttggattaattatgtaagaaaaagatggttttctttcttttttgatgcccaaaacatcccaagagtttcctggagagaacagaagactttgcagaaaaagtcctctgggggggaaaatgcttgtgctgccccagttttcaggaagcgaagctttttatagtcacacttgcagaccgctctgtacctaaaggaagccaggagggaacaagcaggaatctggctttgtagctcacttctgcacccctctcccctttctggaaggaggcagaactggatgatcccacctgccatttggtctctgcttttctgggcgcttgtcgccatccagactgatttggtgagggccaggatatatagcttgtcacaggtatgaagttggggggggggggtgccaaactccaccacttaatagctgtgtgaccttgtgttggtcatttcacttctctctgccgtggtttttccatcagtaaaatgtgagtgataaccatattaatagtatcagcctcctttcattgttgggaggagctgatggtgtaatacagtgatgcaatgtaatgcctggcacatagtaagtgctcagttagcagtagtgatggtggtgatggtggtggtggtctttggtcaggttccctagaagcagagactgacatgaggattctggtgcagtgattcattgagggaaagctctcaagcgaaacccataaggaagaaagggcaacaactggggcaggggacaaagctaactacagatgtggtttcagctgagccccagcctcagcccagtcccatggggacccctagagtgtgaattgcatcactgagttggtggtgccttgaggcaaggagacctgagtgttgtgttctgtattggtcagtcattggctgtgggcatctggacatagccttcagtaagggcagttctccagaggagggtagagctctgagcctttcgtaaccagcattcacagcagctgacgtgtgtgtgtgcaccttctagaaaaggggatcttagtcaggggaggtactagctgcatcgatggaaatgatgagtttgatgacttcatctctgaaaaccagagaagtcaagtaacttgttcaccgtcacacagctaataagagctatagctgggtctccaaacccttaatcatgatgctatacttatttagcaaggacggggtgggtctagaataaggcaagtgaggtgctcacatagggcacaaaattgggggacatcaagaaaagtcactgatcactgaataatatttcaattgtttttaaaaaattaaaattaatgcaaaaatttgtgatgagaaaggaatcagaactataaataaaaacaggatgagtattacttatttttttccttttgcctctggcgccagcatggcttgcactgcactgagcaagtccctttttgaataattaggttcttacaccttttcatcattatctatgtgactgtgatgaacattcttatagcaaaatgtttgtatattattattgttatttccaaaggaattcctgtgtgtggaactggatcactaactatagggtcaaaagttggacacagtgcccccccaccccaaccttttgttatgaaaatgttcaaacatatagaaaaattatataggaaaacacccatcagctagattctataaaatttgctatgtggctggggtgcggtggctcacacctgtgattccagcactttgggaggcggaggggggcagatcacgagatcaggagatcaagaccatcctggctaaaatggtgaaacccccccatgaccaggtgtctcacaggaaacttaaaaatacaaaaaaattagccgggcgtggtggcaggcacctgtagtcccagctattcgggagactgaggcaggagaatggcgtgaacccaggaggcggagtttgcagcaagctgagatcacaccactgcactccagcctgggcaacagagtgagacttcgtctcaaaaaaaagtgctatgtgtgctttataaaaatgtagccatccatccatggcacttttttttttttttttttttttttgagacaggttctcactctgttgcccgggctggagtgcagtggtgtgatcacagctcactgcagccttaacttcccaggctgaagcaatccttctaccttagcctccagagtactgggactacagggttcaaacaatcctcccaccttgggttcccaaagagctgggattacaggtgtgagccacagcacccagcactccattttttgtgtgtgtgtgcatttcaaaataaattattggccgggcatggtggctcatgcctgtaatcccagcactttgggaggccgaggtgggcggatcactggtcaggagttcaagaccagcctgggcaacatggtgaaaccccgtctctactaaaaatacaaaaattagccaggcgtggtggtgcacacctgtaatcccagatactcgggaggctgaagcaggagaatcgcttgaacccagtgggaagaggttgcagtgagctgatatcacgccattgcactccagcctaggtgacagagcaagactttgtctcaaaaaaaaattatagatatcagtacatttcagctgtacatttcaatatgtatgtcattaactggcaagccattattttttaagacttttgatttagggtgttaaatttcttccaggaaatatatatcagttttcatgtccatctgctgtggacatatgtgtcttgtttcaccacaaccttgacaacactgggtatgatcattttaaaggtgttttactttctattttgatttaacatttttcctcctgaggaccccagtggatttcccaccccgatgtccagatggtctgttaaaaagctgtgtgccattccagctttctaggtatttctggtgtgacttttctggggccaggggggaggactcagctctttctcaggtctgttcctgtttccactctggacgtcctgggcctgcgtaatgagggagcagaccatgaagaggacttcatggtgtaggagctcactatgggcaatctgtgtggggaaaatggacaaactttggaggcccactttggatgccagaagtcctgggacctaggaggctgcatgtggtggagggtggagccaggcactcatggaagtgcgacctagccctgtgtatgtttcctgtgtatgtttcctcacctgcatggtggagtaatacttctggatatatcaatgtaaggtatataggctgctgcaagagccccccaccccatctttgccttcaatcttcagttttctcatggaccagttacctacttgcctctgggcacttgtatctctgtgatgtctatgggccaggaatttgggagcagtgtggctgagtgactgtgacttggaatttcttatgacgttgtactcaagatactggccaggtctacggtcagctaagggtttgactagagatggagcatctgcttccatagtggctcactcacatggccagcaactggtgctagctgtttgctgggggcctcagattctctccatgtgggtttctgtgtgtgactgcttgagcatcctcacaacatggcggctggctttccccagtatgacctcagagaagaaggtagaaaccatgatgccttttatgaccaagctttagaagtcctacactatcacttcttttttttttttttagacggagtctcactctgtcacccaggctggagcgcagtggtgtgatctcagctcactgcaacctctgcctctcgggttcaagcgattctcctgcctcagcctcccaagtagctggtattacaggtgcctgccactgtgcccggctaatttttgtagttttagtagagacggggtttcaccatgttggccaggctggtcttgaactcttgaccttgtgatccacccgcctcggcctcccaaagtgctgggattacagacatgagccgccgcacctggcccatcacttcttctttactcagacgtgagccaccgcgcccggcccatcacttctttattctgctaaccacacggaccaaccttgattcgttgtgggaggggaccacaccaggttatgaataaaagggggcaaggattactgatggtcatcttggaggacatctatcagccataaccttggtacatgatttcacctctgtggatctcagtctcctctgtcaaatgggttcatgcaaaaaaattcattagttgattcctgtgaatgcttagaaatggtgttggacatttagttacctcttgataaatattagccaccactgtcatcccctgctgggctgtgagccctctgctcttaatctctatgcagtgcctggctcagagtaggcaccctctgaatctttattaaatgaatgaatgaaagaatgaatgaggctggatgtggtggctcatgcttgtaatcccagtactttgggaggctgaggcaggtggatcgcttgagtctaggagttcgagaccagcctagacaacatggtgaaaccctgtctctacaaaaattacacacacaaaaaaattagctgggcatggtggcacatacctgtagtcctagctaccgaggaggctgaggtgggaggatcgcttgagcctgggaggccaaggctgcagtgagctgtgatcatgccactgcagtccagcctgggcaacagagtgagatcctgtatccaaaaaaagaagaagagagacagggagagaaagagaatgaatagctgtaaggactgggaatacatagaaaagaaagagatctgttggccatattgccagagagtcctttgtgataaactttctcaagtgaggccctttgaccagtgtctagaaaacaaatatttgttcaaaactgaagtgaggtggtggtggaaaggacataggatgcattctgagcgacctgggtttcaattgtgtacttggtgtccgaacaataaatatttacagagccctgactctgggccaggtaccatgtcagacctgggaaaacctggggtgggagcagctctggtgcatgcctggtgacatccttgctgtgtgaccttgggcaagtgaatctatgtctctgaatctgcatttccttgtctgtaaaagtagtggggttggggggacatggatccctgctagaaggagaaacctcctttaacaggtgtgcctgacctccaggatccagctgctgcccacccccttctaacaacccctgacatgtttgggatctccaggcagaggacagaaaacctgcatgggtcagatgagcggggcctggccgaggacagtgggtgttagggtctagtcgtacccccaacccctagtactccagccctgtaagggttaaaacccagggagctcacgtgacctagtgtaaatcatgaatcattcccattgctcccagtgctgagcctgctgcccaggacagggcagatgctgtgccccgggttgccatggcaactccgcctgtactgaaatacagccctccccagtccttcctgggggacctcagaggctgtctcacctggatcagtgttgccttccagagagggagggagagacagctgaaaaggagagagagaggagagaagcttagagacaagcaagtggaagttgagacacagggagagggaggagagcgaggctgagaaatcaacagagaaacagaccacgagagggagacagactgacagccgaccagaggtcccaagacgctgcctgtaaccttagaggcagaagccgtttcccagcagtgctaaccttcccggggctgccagatcgccgacatacacgcacacacacacagagtgcacacacatgcacacacgtgcagccgcatttcctggtgcgcttgctgtgagggcacaggggtgggtaggctggcaggcacgtgaagttgccatcagccccgagggaccgtgagcgagttgggacttgggggagaaaaaaatgggggcggacgtcagctccctgggcggccgccgccaccgcctccgcctccccgaggcccctcctgcattcctgggcagcgaagcccctcgctaagacgggggctgatgtcatcccgggctgctcagccaggggacccgggggccctggtggctgcctccggaagtgagctagccgcctgccggccgacaggtttggaatctccagccagaggacagaaaacctgcatgggtcaggtgagcgggctctggccgagggcagccgggcagggggcagcagggtgcggcagcttgcccaccggaacctcccagggtgcacctcaggggggctgcctacctgaagggaagtgaggacgagggtgcccaaaggccgccccctccacccccacccccatccccatcccccgcctttcgggaccgtcacgccctggagtgagtgcagccggcttgttcctcaaagctccttgtctcggccgatcagctgggtgagccctggaactggaacctggactgcccagtgtgttgactttataactccgctggggtggactcccagcctggcacttagctgcctcttaattctgagcggcacccgtggatgcagccggctcctggctcagggatgtttacttacccttggtttgcctgaagaaagctgctgtttttaattttttttcctccaagcaagcccaaaacttccatgagcaaaagagtccaaagaggcaagaggacactggcgttttaattgctctctccctccctaacttccttcttccctctcctcctggctggccccatggattacctgggagataaactcacagtggcccagacccacatgacccagtggatgggcaccgtgaggaggtccttccaggaagccctcaatttggtgaccaccacggtgggccacgaacggacgagtgcagagtcggccagccggacccccttcaagcgtacttcctccttccgacacctggcttcccggagtcgggaatccttccgccgcttctctgctcgcagccaacagagattttcttcactgaggaaaaggcatacagattcggaaccgccagatattgtaagcttattatgttttaaaaaatattaaaacaacactgaaagctcctcccctccagtcctcccagggagggggtcccagacatcaaaccggggaagttacttcttccagaatagttgtcagtcaaagcccaggcacttcctgtcccctgtacctgggaaagaggcacgtagcaataattcctctctcctgaagtcagtcaggacatttttgctggagtcgacgtctgtgtggacagggccagcacgtgagttgggctgaatttgccagttgatttatgtttaagtgtgaacaccccaacccccgacacgaaagctcatccttctccctatttttagggtggattagtggcacctgcctcatctcctctcaccctcctaggaagcacaagtggcggtgtcatgtgcacgctgagttgtagcttttgtcgttccaccgagctttcattggattgccaaggaaagggtcttaggagaccgaggtgtggtgggcgagtttgcccgctggccgtgaaccttgggtttggtgtgagtgggccagggagggaggccttgatttcttactcaggcaggctcgggagggcttggattgggacagcagggtggaatgacagctaatgattaaaaccttggcctgtgtcctgctaggcgacagtgcagaaacaatcgtaaggtccttctgatgatttggagaggtgggactgggcccagaaagcgaaagtgcctactgtgggggaagcacagtgagtgagtggcagagccaggtcccgaaccccaggctctgacctccccattcacggctctttgcagtccagctcccagcagatgttctccccagaccctcccaattaattcagggctgcccaggtcactgaccagacctgagcctaaagagagggcctgccattttcacataggagacttctgccacctgactgtgttggcccagtttatgggagcacttgaggacaggcgaagggctaagccagcccctttttctgggttcctcctagccaggagtgctatagtcattaagggacccagcatttagggaggagccctgagctggccctccctacactcgaggtggcagggctcacagctgccctgccaggtgcaggggctcagtatcccctctgctgacccagaggtgtgactcaccccaggtcacgcagcagccagagcaggcagttgcaaatgcaaggcaggagccgagcacttgggcatgacacgtgtctcgttcacaggacgtctccttcacagtgggtctgtgcttctttgtggcccagaacaaattagtggggcttggatttatgagacagattccccaacctctggaaggtgtgacttgccacagggaaagaaggcccctcattcattctgtctccctctgtgtgtatctctgtctctgtgatgtgtctttctgccttgctctgtctctgtttgtttctctgtcactcctgttctctctcagggtatggggttggtgacaggcaggctctgttggcatccctctttccccaccctggggagtggtgtgaccatgggcattggcatgaatcccctaggcgtcttaccctgtgttacaggttggtgccactggcaggagtggcctctccagctggttgaataaatgaagttgggtggtgcagagaaccattccgtgttgcgtcgagatgccaccaagagtgtaaatacatgctaaatacattcaagcttcaggctccttcccatgtagccaccctactgggtggtaggcaccagctggccttggccttgacagcttgaatcagactcctggctgaggagccctgacccattcttaagcctcagtttcttcctgtgtccaatgaggagaaccaaggccttggtatgagattgaagcaagcccccagcacagtgccaggcacacagaatctgcacacttgtgaatgctctctctctgttgcttgcctagatactctgcctgagcaggataaaggcagagttaggataggaacatgtgcagtgttgcagataagtcaacgaaacgcaaggccagggaccccctgcctaggggttgagtcctggctctgccgcttcccagctgtgtgatcttggacagactccttccctctctgtgccttgatttcctcctctgtgaaatggggatgatcgtgcattgatgtgctggtaaatgtgtggtgagcgtggccgttcttagcttgtggtgcttaaaaattagttcttgtggcaaccaaacctttcctctcaaaccatcacttcaaagattttcaatgagctggaaaacccacacacgccctttttactcagggacttcacttaaatattcgttttatgggaagaaactttttaaagccacagacaattacttaagagtttgggacaacagcagtatccgtggctggggctgggagggggcaggattttagtctttctgaccttgtacatgatttatctaaataatccattcatttcatcctggttcctgcctccggcttgtatttactcagagcagtgtagaagaatctattgcgggcacaaaataaccctcaaaggcgtgccctgaaatgttttctaaagccagccttgaagtaatttgctaatggcctgcctgcttctgtgtccaagggataaaagggggaaagagggaaaacaaatgctttgtctctgagccacaaaggcaggaagaggcacgtttgtgctgcactcccatgtgagcctgagaaacacgcctggtactccaggtttagccgaggagacaaggtggactccagttagaggccagacagaaaattccagaacccaggaacaatggcagtggcacaggggccaagactggaataaaagcgggaagtggggggtctctgaggccatggggtgccgcaccaaggagggctttggagtcagacagacttaggcctgagtctcaactcaccacgtgcaaactgagtgaccttgggcagcttaaatcacctcttgcagcctcagtgccctcatctgaaacatggagattcagctgggacttgtctggtgggtgggtcaatgggacagagtggactaagagcaagcatagccctggcatgcaggaggtgctgaataaatgttcgttccacgttgctttttggggggctcagactgtaatgtgagtcctaccttcctagaaggctagactggtgcctcagggaagcagagtaagagcctgatcaacctgtgtttgtatttactgtgtgcagggctccatgctaagcatcaggtgcatataacttgcatgtcttcattaattcactcatattttcattcaaccagtatttatttttatttatttatttagagacagagcctcactttgtcacccaggctggagtgcagtggcacagtctcggctcactgcaacctccacctcccaggttcaagtgattctcctgcctcagcctccccagtagctgggattacaggtgccctccacaacactggctaatttttgtatttttagtagagacagggtttcaccatgatgaccaggctggtctcgaactcctgacctcaagtgatccacccgcttcaacctcctaaagtgctgggattacaggcatgagccactgtgcccagcctattttcatttacttattttgaagacaaggtcttgccctgtcactggagctggagtggagtggcacgatcatagctcaccacagcctcgataccctgcgttcaagccatcctctcacctctggaatagctgggactacaggcatgtgccaccacacccagccattttttttcttttgtgtagagacagggtcctgctatgttgcccaggctggtcttgagctcctggcctcaagtgatcctcccacctcagcctcccaaagtgtggggattgcaagcatgagccactgtaccccaccccctccaccagtatgtatgtatgtatgtatgtatgtatgtatgtatgtatgtatgtatgtacgtattgagatggagtcttgctctgtcccctaggctggagtgcaatggtgcagtcttggctcactgcaacctccgcctcctgggttcaagcaattctcctgcctcagcctcctgagtagctgggactgcaggcgtgttccaccacacccggctaatttttgtatttttagtagagacagggtttcaccatgttggccaggctggtctcgaactctggcctcaggtgatccacccacctcagcctcccaaagtgctgagattacaggtgtgagccaccacacctggccccctcagtcagtatttactgagtatctaccacaactctggtgcaggagaaatggctgtgaacgaaagagacaaaactcctgccttcacagagctgccttctagtgaggctgataataaaacacatcagaatgtaaatatgtcatatatgtgctgaaaatgagagaactatcttaaaatatcaagggtctgtctttaacctcaaactattgctgtatattagagtttctcagcctcagctctaatgatatattgggctacataattgtttatggctgtggggggtaaggggtagagtctgtgcattgtaagcttatccctggttcctacccactagaagccagtagcatcccacagttgtgacaaccaaaaatatccagacattgccaagtctcttgggggcagaatcacaatgccccctcccagcccccatccaggtttgagaacactgtcgtatataatgtggtgtggggcacaataattgtagctggggtatattctcccagtgacttaaatatggggagaagggcagggatcccacatccatgagcctctcctgcttgccaggaaccacacagctgcccctgtggggtatagccccatactttgtgaatggagaaatctgaagcacagagaggggaagtcacaggactggggatccatgaagtggggactccatccagcatgtgtcggccttgctgggagcatgaccacaccctgcactggggattcactattaaacatcggccccagagctgagcgttcagtcctccagcccaaggccgagtgggagtatttgcttctgtgttaattatggactgtaatggaggcttaaaatattcagcagggctcagcatctcccccaaccacacacacacacacacacacacacacacacacacacacacacacacacacacacacagacacactgcttcagcaagtgggggagaattgcaaggaaaggatgtatagaactcctgccttcagaagctgcatttcagccccatctccatcagtactctctccctactggggtcctccggctctgtaacaaattaccacaaacttggtggcttaaattaatataacttcatctctcacagttccggagtccagaagtccaaaatcaaaatgtcagcagtcggccgggtgtggtgactcacctgtaatcccagcactttgggaggccgaggcgggcggatcacctgagatcgggagttcaagaccagcttgaccaacatggagaaaccccatctctactaaaaatacaaaattagcccagtgtggtgacgcatgcctgtaatcccagctactcaggaggctgaggcaggagaattgcttgaacccgggaggtggaggttgcagtgagtcgagatcacaccattgcactccagcctgggcaacaagaatgcaactctgtctcaaaaaaaaaaaaaaaaaaaatgtcagcagtcaacgcctccctccagaggctctaggggagcatcctttctcacctcttccagcttctggtggctccaggcattctttggcttgtggccacatcaccccaatctctgcctctatcttcatgtcactatctcctcttctctgtcatctcctttcctgtctctggtaaggacacttgtccctgaacatgggagcctcctggattacctaggatgatctcacctaggatgatcacctcaacctcccaagtagctgggactacaggtgtacaccaccacacctacctaatttttttgtatttttaatagagacagagttttaccttgttgcccaaggtagtctcaaacttctgggctcaagggatccacctacttcagcctcccaaagtgctgggattacagacgtgagacactgcatccagccaacgtatctttttaggggccactgtcagccccccacacactccccacagcttacactctggcccctcccatccagtccattctcctcccaacaacccaagagatcaggtcattcccctgcctcaccccagacttagatgcccagttttcctgtgcgacctggccctgcctccctgctaacatcagctcctacctctgtcctttatgctcactctgaccttgcccctctgacctcctgctcttcgtcagtcaccccctgctccttccagacgccaggactttgccatcaccattccctctgctgaaatgcccttgccctctcttcacctctgcagagaggcttcccgacgttccaggctgtggtgaactccctgcgtttccctgcacccatcctacatttcttcctgggacctatctcattctatacttatttcatgtcacttgttccctggtttattctctgactcctctactaggatgtaaggtccatgagggccagggctttggccgtcctggttcaccttgatattgccagtacccagaacagtggctaggagctcacagagtatctgccttcctgaaatccactgtccttcattcttgtgtccaccctgtgacaccacctccatattatagatgggtaaactgaggcctggagaggataagtgacacagccctggtgtacacctcttaagagatgacaagaagtgtacggccacatcaccctgaatgctcccagtctcatctgatctcagagttgacgccaggattctagtccagggaggcctggagttctttccctgtagagggcaggatggaaaatctgaagtataatggtaataaaaaccactcattcattcattaggaatttttaattgagtacctgttttgtaccagatactgtgctcagtagaggagaaaacaggcagggtctttgccctcatgggactcataggagcagggagacacattaaacaattaagtaaaccaatgaatgaacaaagaaagtactctcagataatggtgagggctctgaagaaaatgtaacagggcatggggacccatgggagtgtattttaggaacagtggtcaggaaagtcttctcaggaggtgacattggagcagagacctgcatgagtgaggggatgagccccagaaagtttggagggacattgggacagcaggaaaggcagtgcaaaggccctgaggcaggttcgtgcctggtgtgtttgaggagcagcaaggagcccagagtgactggagcagcacaagtcagtgggagaggtgagctcagagaggtgggccaggggccaggccggatagggccagggagggggattctgataggatgtcagattttagcattggagggtactgagcaagggagagctatatctgtgcctctgtgtggagtgttggaagagaagaacagaataacaactctagctaccacttcttgagtgcctgctgtgtgccaggcacaggttgttactaatacatttctcctggagatctgggcttcaaagaactggggtccagctgctgtgtgcccttcccccatctcccactgcctgtgccaactgccaactgccacctgctacgtcatgtctagagccctgccaggtgccctggtctcgggctgcaccttggggtttggattcaaggggttagacttaaagccagccccaaaggccagcatgatgtcacttcattctctgctacagtgtcgccaggcaggcaggacaggctgctttctttttggctggcctcacccaatttcaggtctcctttcaccctcctggcagcagaatgatgtcacccagagaacaatggttcctttatagatctagcctgggccaaagtctgggtctcagagtaggagcctctgggagagacctggagtgaatggaggggcagaacagagggcttgggtgctccacagggatctgcttttgttaagtaatgttaatctcctttcctgtctccccaaccaacaaaatacggtgtgctcaatgtattcttggaacatatagaaaaatgtaaagaaaacaaagcccacccattctcctaacatcacattgatgaaaaccactcctagcattggaatgcatttccttcttgtctttttcccccctcttccaaacaaaattgccaaccctctttctctttatatcctttaaaaaatgtgaaagttttgtatgtctttatgacacttttaatgcccttgcaacatttgtgtgctccataatttattaacctgtctggctggacatttgggtaatttcccgttctgggctaccaggagtgaccctgcaggggcggggcctgcatgtgtacttcttcatctggatttctgagaggtccccgaggtttaagtaagctcacgttgctttctgtgatcagaaggcccctttgttactctcacttttctctccctctccctgcgttttctaatctcagatgttttgttcagacaaatgcttcttgcttcctcatcaggaagtcagaaatttcaggaaggaaatctggattgatacgcatcacagggagtgttacgttttcggatttcatgaagaatggagtctttagttggccgggcgcggtggctcacgcctgtagtcccagcactttgggaggccgaggcgggcggatcacaaggtcaggagattgagaccatcctggctaacacggtgaaaacctatctctactaaaaatacaaaaaattagctgggcaaggtggtgggcgcctgtagtcccagctgctcgggaggctgaggcaggagaagggcatgaacctggggggcggagcctgcagtgagccaagatcacgccactgcactccagcctgggcgacagagtgagactccatctcaaaaaaaaaaaaaaaaagagaatggagtctttagcaagagaagtccttacaagagaaataacagattagttgtaatggtgtgctggtaaaatgtttaacaaccccgtcttcttggggaaaaagctttgattggtagcatttgcgcaatttggtggtataaatactcccaccatagccaattgtaagcttctaactagttttcactaaacacaaagttggggaaagatgggcagtagattactgttctttagtatttttaccacacagatataatagacataagtgacggcaagcccgtggaaaataataaaatgtagcaaagtaattaggaagtgatgagatgggaatatttattacttttgcttttaatgtgatttctttaattgtaagtttagatcgtttaatcttcagtaatggctgtgtttaatacctggctcctgaaaattgcagttgtccctcaggggccaggacaagccagctccagtatacgcagctggttaagagagtgaattgtgggatctgggagttgtgagtttgaatcctggttctgcgtctcccttgctatgtggctttgggtagttttcctacttttttaaagcctcagtttcctcttctgtaaaatgaggccaataatattattcccccacaattgcagtatgtggaactgcagcacaacgcttggtgcataatagtgaggtaggaagtgggactcgactccagaggcggggctcgggcaccggaccacattgaggactagctaaaacagaaccagggcagaagcagctttccaatcagacacgcttaccagtgtgacatgtcggtttaccattgattgccatggtaacacctgggagttactgtccctttcccattgattgccatggtaacacctgggagttactgtccctttccatggcaatgacccaatgacccaaaagttactaccctttccctagagatttctgcataaactgccccttagtctacatgttattaaaagtgggtataaatgtgactacaaaactgccctgagctgccactctctgcctgtgggatagccctgctctgctggggctgtcacggagctggaacactgccacttcaataaagctgttttcttccatctcagcttgcccttgaattctttcttggacaaagccaagaaccctcatggactaagccccactttgcctgtcctgtatcagtaggatctcagtgaacagtcattattggccggttgcagtggctcacgcccataatcccagcactttgggaggccgaggcgggccgatcacgaggtcaggagatcgagaccatcctggctaacatggtgaaaccccgtctctactaaaaacacaaaaacattagccaggcgtgatggtgggcgcctgtagtcccagctactcaggaggctgaggcaggagaatggtgtgaacccgggagacagagcttgcagtgagctgagatcgcgccactgcacaccagccggggcgacagagcaagactccatctcacaaaaaaaacaaaaacagtcattatcatcatcaccattgttatctgatcagagcttaatagttggcaaggcacagtcaaacatgatagcctctaaggtggtcctctcagtgattcttgccttcagttattcacactgttgtgaagtccccttctatgctgtactgggttggtcagtgtgaccaacagaatacatggcatcacttctgagatgaggttttttttttttttttttttttgagatggagtcttgctctgtcgcccaggctggagtgcaatgacgcaatctcggctcactgcaaccaccccttcctgggttcaagtgattttcctgcctggggacagtagctgggattacaggtacgtgccaacacacctggctaattttttgttttttcagtagaaatggggtttcatcgtgttaaccaggatggtctcgatttcctgaccttgtgatccacccgccttggcctcccaaagtgctgggattacaggcgtgagctaccgtgcccggctgagatgaggtttcaaaagacactgcagcttccctcttgatcactccctttcttggagctttcactctggggaaagctgctgtgtcttgaggaccctcaagcagccctgtagagaggcccatatggtgaggaactgaagcctccagtccaccaccagcaaggaactgaaatctggcacacaggtgagcttggaagcagatcttccagcctgcaggtgaaactgcacctctggccaacagcttgactccaaactcatgagataccctgagccaggaccattcactgaaatccttcctagatccctggcttccagaaacggtgtgagataataaatgtttgttgtttccacccactgagttgtggggctatttgttacgcagccagagataactagtacacatttcttctcacttacgcttgtggaaatagtccaaggatggccagggagtattatttaatgccttgtcttgcagatgagtaaattgaggtgggaagacctgcccatggtctgtaatgtgtaggtgttggtattcccagtggatacctttcttgtctcatgtgttcttgcccataaaggaggctggctgctcagccagcctggggtcaggctcccaggggcttttgagcagctcaccctcttaggagttggcatgaatctcccagcatgggatggaatttgtttcttggattctaagtgcccattaccccacttaactcatcaaacattcattgtaagagctgggccataaacagcagcgaccgctatgcagagatatgagagcatggtggcttttctccagcatcagtttctagtccagagaagttctgtcagattgccctgctcccttggaaggagggtctgaagcataccttattactaagaattaaaaattgcagagtttgtgaacacctttgacttttgttttctaagcatagatttggtatcttctgctgttctttcttgatggcaagaaaagaggggtgcaggtagaattagctgagtacagttcagagcttggctctcccttcagacagtccttagtttgaatgccagctttgccactagtcagctttgggacctcagacaggtgactttaattctgcaagcctcagatgccttgtgaagtacccagcatgatgcctggaacctcggaagtgcataataaatgccaggcacagttgctatccttacaaccttgatacattagtcagattagagtatgctatgctgcagtaacaaactgccagctctcagacacttaacaccaagtgtgtgtttgttttgagagagggtctcactctgttacccaggctggagtgcagcattgtgatcatagctcactgcagcctcgacctcccaggctcatacgatcctcccatctcagcctccccactagctgggactacaggcatgtgtcaccatgtctggctaattttttgtagtttttgtagagatgggggtctcactatgttacccaggctggtctcgaactcctgggctccagcagtcctcctgcttcagcctcccaaagtgctgggattacaggcatgagccactgttcctgactgttggtttcgtattcatgcaaagttagctgctggtccaggggccatctatagcaggcgcctctccaggttgttcgcatctggcatctaggccatctgggaagatgtgacttctttgtaaaaatttcagaggaaaaaactggagggccacattcaaggaagaggctattgtcccattttacagatggggaaattaaggcttaaagagtaacatattttaagcattgaccatgtgccagccactgagctaagcagattgtcttaaatccctatagaaaccccatccaagaggtattatctatgtcgggtctgttttacaaatgataaagttgagacttggggagaggtgagttgcccagagtcacctagttcatagtcgaccaagcatggactccagcccaggtctgctgacgtctcatttcttgtgcctcccatttgaggaagtggattgagagatttggggttcgtttcctgagaggtaccatggtgtagaactgggtttcacaccatggtgacattgacgttcggggctggataattctctgtcatagggagctgtcctgggcactgtaggatgctgagcagcatccccggcctctgcccactagatgcctgcaccatccttcccatccccagttgtgatgcccaaaaatgtttccagccattgccaaatgtaaggggcaaagtcaccctggttgagaaccactgatgtagatcgtaagagctcatcctgggatgtgagttcacacccctgccagtccttaagtaaccatgtggccttacccaacagattctggacaaggccaaagtattagtagtaggcctttggaatacccttttaggtaatagaacctttgattcctggtgtaattttgggcaagtctgtctgctctgataaagcgtttttcttttgctacaaagtggcgcaaacaatatcagttcacggagttgttacgagagtgacaggagatgctggtggagggcacatagttctttataaacagtggcttttattgtcattctagttatcacctgtcaaaggggaggttcagatgggggcagattttctggtgtttggaagtactcttcacggtctattaattcccagtccctcatctcctggctccatgtccaaatatttgctttctgccaaagccagaagttatccagcacctcacgttcccaccatcaccagcctgatttctagaaacagcccttccctgggcacacctatgatttaacaccggtaattccttaattcgtagctaggagcctgttcttttcttcttggtaattgccttctgctttgggaaggatgagggttggatgtggcagccacgttgcagacatcttggcaggaaaaacctgggatgttctggagcctctggtgctgcatttgaagagcgtacaaaggtagccatgctggcagatgacgtgttgagtttcattatccataaatgtttttaaatgagccctaggtgcccatgtaaacaggtagctgaggggcatgaggttggtgtggaattgttcttcatggaggagttcctgagccttggttgtcagaacatctagatccttccagttcacttctttttttgttacagctgaggaagccaaggcccagagagggagagagacctgtgcaaggtcacacagcaaattgatgacagacacaggactggagcttgggtttctaaattcattgttgaggcattggaggccaggtgattctcaactttgacatcctttggagttgagccacagacaattactgagctcctatcatttgcaaaaagccctgtagtcagctgtgtaatatgttaaaaataatgagactccgtccctgcatttgggtttttagaaaagtgagcatatgtgtatcccagttgtgcagctttgaaccaatgtcctctccattacactggctatgggcctcagtttccccatatgttttttagaggttgtggtgtgacctcttaagatctttgcagtaaaatcagctcagattcaaatccctgctcccctgtctactagccatgtgactttgagcaagactttgagcaagcctcagtttccccatctgttaaaagggaatcataatactcttcatggtggtgagaattccatacagtaacgagtgtgctgggcacactggtaggtgctcagtagcttcactctgcctggcctcccttttggaccaccagggctgctcacagcttggcaacaacattccttcctcccagcttttgcacaagctgttccctctgcctggaatgacggaaccgtggcacaggctccactggtgttttaagagggttaagcctcttcttcaaatggtgccattttctctccagagtgacccccagcctcgagtgttttagttgttagaagggagtgaggtggacacatgggcctggcatagagccagcagccccatcctcttcttcccggcctcttttgcatccacttggcttccctgccccccttgcaagattcttcccatcccatcctgccccaccccacccctaagttgctacttgatgatcaaagcatatttgtgtgtcattaacagccacggctaattaggaaggaagggttaagtaggaggcattcctatacacgcctgggagctgaacagttagagatttttcatatgctatgttggattttcttttcctcttctcatgcataaatacaagtccttttgtgggggagatgaaaaaagaatggaggtcattagagatctgcttagtgagtttcctaatcttttcatgggatgcggagccccgtggattttcaacaacttagtgccattggttgaaaaatggtttctgagctgaattgtggtgaagcggctgctgtggttcagtggtgtctgattgctgggatgggggtggaggaggagacaacaggggtacagatgggcctgagttcaaatcctggcaccacacttctgacatctaggaccttggccaagggcctcaacctctttgagttgtgatatccttgcatttacagagggctaaagatatgaagattgaactcaaacttgggtgggcatcagatatatcttgggtcctggtgccacgaggagagtaccaggcaggtgccttgggggtctgaggaaggacccagaatctgctttgtgtggcaagagctctaggtgagccccaggtagagatggttacgtggacaccgccctttaaggaccaatcccttaatgtttcttcatgttcataaaaataagtaaataaatacatatctgatggatgaatacatgaatgcatggaccagtgcatgaacggatgccaagctcctagctggcttcacaccaggtgttgggtggatgatgagggcccagcagagctgtgctatcttgccaggaacatgatttggagaggctcaagattataattctgaatttcctgttcaacagcaacttgtgtccatgagggcaagtctcccttctctgaggactacagaagactgtgggtctattgtggtccagtctcaagaactcaatggtcagtccttgtcctgaccaaccgagaaagtctggttttgttctcactcccctaattggtaccctccaggctatttgggcttttctgtgggtgccccagccccagccccatctctttgcacccccataagccattgctttagacccagagattctcacagcaatgctagactcacagatctccatttatgtagctgtgtgggactggaatcaggcagtattccccagagtgaatctggaatcctttctgaattaatataatacaaggcttctgattagctggtttggattccgtccttggctcatttatgcagctaacctacccctgtcaagcacctgctgtgtgccagctgcagtaccgggtgcattcgcatacctgatgttggacgttacttaaccctcataatcctcctgaggatggagaccaagggaggcagccgcacttagtgccagggccctgggtgcagaggctggggttctccctgctgtctgtgctctgtcagtcctttgagccaagtcagtggtcctttgttatgtttctctcccaagcatggagtgccatgaggatggtggcggcatggtgggcggggcggtgggggggctccctattttgcagagttaaaaaaagactagttagtgctaaaagcacagattctgggctgggtatgttggctcacgcctgtaatcccagcactttgggaggcggatcatgaggtcaagagttcgagaccagcctggccaacatggtgaaaccccatctctactaaaaatacaaaaattagctgggcatggtgtcatgcacctgtaataccagctactcggaaggctgaggcaggcgaatcacttgaacccgggaggcagaggtttcagtgagccgagatcgtaccattgcacaccagcctgggcaacaagagcaagactccatctgaaaaaaaaaaaaaacccacagattctggagccagaaggcctgggtttgaatcacagcttttcccagctttgcaatctaccagcatgtgacttaagcagcttgcttgatggcatttgtgcttcagtttcctcctcctttcttttctcttttccttttttttttttttttgagacagggtcttgccctgttccccaggctggagtgcagtggcatgatcttagctcacttacttcaggctagaactcctgggttcaaggactcttcctgcctcagcctcccaagtagctatgattataggtgcaggttaccatgcccaacaatttccctagctctaaaatggagaaaataacaatatgttatggacatgttgtgaagaatacatctgttgacgtatacaatgctcatagaacagtgcctggcacatagttggctctaaaagtgcttattaacagacagggtgcagtggcccatgcctgtcatcccagcactttgggaggctgaggcaggacgttcgcttgagcccaggagtttgagaccagcctgggcaacggagtgagatgtcagctctataaaaatttttttaaataaataagcaattattatcaatatgattatatttactgctatcttataagaatattataaataaatacataaactgttatacataaatattttggaggtatgatttacatacagcaaaaggtatatatcataaaggtatagcttgagttttgacaaatgcacatgcccgtgtaagtcacaccctgttaagatctaggacattctcatctcccagagaaagttcccttagcccctttccacttagtccctgcttttctggctctcaatagacatttcttgaatgaatgagtaggttaaagaatgtgtactgagaatccatcgtatttgatcccaaacctcttcatgccaattgtactacttgtaatcgtcattacataacccgattagctgttatataaatgtatgagatacaactgcaaagagaaagagatttgtcatactctgaaaacttaattaaacactttgaaaagattccatacaggcaaattgctaaaaaaagaagtcccatcctgtgaggggcgggggacactgtcaaagacaagggtgaggaatcgtaaacatctagatgagttctacactccctgcttccttggtgtctgggcctccactcggagctgtgcctttcccggcacctgcagcacaggtgacccagcctctgggtggagagctcctctccccactgccctcgaagcctgtccctcctggggaaatagcacagcttagaggcttagagtcccatgcctgaatgtcaggggcaaggcatgggtgaccaggaagacagaggtaagattccagggccccacctcccataacttacccaccacaccccaaaccaaggttgctccttgaggtttttaatatattggactaatatgattttgcttaaagagattttttttctaaagctcaaaaatggaaaagaaagtagaaaaccagtgatgtggtgctggtcaccacccccagtcagaaatgaggagactttcaaacagggtgggggccttgcccagtgacacacagggattgctctggaagagactgggcttccaactcagagttcttagcatttcgtatggtgatttccatgcagtgatgaggagggtgccatctgggtgttttccagccctggagagctgaggccatgctcagggaacacacctacagcctgcgaaggtcccttttccctccctgcccccatggtaccctctgcagaactggagttttgcacaggtttggggcttaggatgcacaaagtgcccggcacgtgcctggtacctcttcagctcacaggtagtgcccacacccatgggcctagcaaggtccctgctgcttctaaggggactagggtctttggctcaggttttctccctctggggcctggcaggtggcacggggctgctcatccctgagggaaagttagggatgaagtcacccttcaggtccctggcctggtcaggcgcacaggccatttgcatgggctcaggctgatgtcaccctgggaagccattcaacactgggggccaccttcagccctggctgcccgcctgcctgttgcatgtgtcctgttttgtttgtcgtgtggggcagggtcagggaggagccctgtggtggagacagttttctgtgctgtctgagaacagggtgatgccatccttcttctcactgaagcatctcaggttgggagcaggctggttccctgttcagatcccagctctgccatctgccggctgggtggctgtgggcaggttactttgccccttggtgcctcactgtcttcccctctgaaggggatggccggggcataaccgcatagagttgtaagattgacacgagttgatgggtgtgaaactctttagcgcagcattggccattaggaacacctgttagccattgttgttgtgattatggtggtggtgatggctgtggtaattgtctgggagatgtttatgagtgctgttatattattcccagaattgattgaagtcacacttttcaaagaaaacagacacatttgtcccttcttggatccccacttgttttaaatcaatgcaacttaacaagacacatataatctgtaagcaggggcttgcattgtttccaaaacctttactaaagctctcactcacccttccagtttgcaaactattgttagagaacggaggttctcaaacaatgcaagtacccaggccccacctcctagacatctgacataattggtctgagatgcagtccaggcggttggagttttaaaagctcctaggtgattctaaggtgcagccagggctgagacccactggggtcagggggcatagcagaaagaacacaggctgtgcagtaagaaaaaccccagatcaaatcccagatctgccagttacctcctgagcgacccgggggcaagtttctgcccctctcggagcctcggtttctttatctgtaatgtgtttcaggagtctgttgggaagtacgtgagattcatgtgaatggtacctcttatggggctggtgagtccaagtggacatttcatagatacatctccagaatatcagggcttggaagtgaccttagaccctgccagctgttcccaccttgtctctctactgaagatccctgttacaggttctcctcactttcacagcctggacatttcccagagttcttcatggaagcaccttaatgagtgttccatggataaagaataccaacgcctgtaatcccagcactttaggaggccaaggcaggcagatcacctgaggttaggagttcgagaccagcctggccaacatggcgaaatcccatctctactaaaaacacgaaaattagcggggcgtggtggcaggcacctgtaatcccagcaacttgggaggctgaggcaggagaattgcttgaacccaggaggcagaggttgcagtgagccgagattacaccattgcattccacctgggtgacagagtgagactccatctcaaaaaaaaaaaaaaaaaaaaaaataccagagacaatatatttaagaatcacttggttaaacaatgtttttaatgcaggacttttcagagccttttattatgcaaatatacattaggaacctccagacgtggtccttggcaccctgctgtatttctgagatctcagatgagagaattgttgcagatttgctcactgacttgattggggaaatctcactacactgaacgtacacaccaatggtaagatttccactttcagaaatgctaagtctgggggagaaatgtgcctctaactggaaggtttcagtagcatgtgttgaccacagaattcacaaagcatttcactaggttgtatcttgcataacacacttcaaatgggcctggtcattttgttttccttttagaagtagatagattagcttccatcaaaagactctgttcttcgaattgtctttatatagtcaatgttagttccttcttcctgtatttttatttttttgtttgtttttagagacagtctcgctgtgttgtggaggctggagtgcagtggtgcaatcatagttcactgcagcctcgaactcctgggcttgggcgaccctcctgcctcagcttcccgagtagctgggactacaggcacccaccatggtgcctggctaattaaaaaattttttttcttgtagagatggggtcttgctatgttgcccaagctgatcttgaactcctgggttcttgcgatcctcccaccatggcctcccaaagtgctgggattacaggtgcgagccaccgcatcctgcccctccttgatttttattgggcggagaggaaggtacatgcatagatgtatacatcaccctcagtctagacattggtgtcccttccagatgcaaagatactggcctgagagggccttgagattccacaaggggaactttccatctggtacaggaccccctttatttagagaagagagcctcagcccagacaaagaaacaacttggccaaggtgacaccgcctctttggagcaagcctgaaggcagaactttgccgcagagttgggtttccttttgctgccctcccctgtgactgagtaccttgcatgctgttttttcagcctgagcctggttggcctccagttattattgaaatgagtggatgtttccgggaacacagcaaatccatagagtttaattaatgaatgtgccagagggcttggcagctggattcttgtgtttaccatgggtttggctggcaggcaattcaggaagaactttaaggagggtggggtccatctccctagccctgcttgctctcctggtattggtatgtgtgtgtgtgtgtgtacccgaaatctgattctcccaacacttttataggcatgtgatgcatacggttttttcattattgtttttaaaagtactggcattttattttttgcatttatcaatttgtcaaaacaaaatcatctccacaatgaccttggaaatagtagttaaatgtctctgacttacacagacctaagtaggagttgtgttgtctcttctgtcgtcccagttggggttgtgaaatgagcaataaagctcagatcaccttgcagcctccagcccagagagttggaggcagctcaggagagcagcagcctagccatgctgccgctctgcagctttgcaaagctgggaggcctagtggtttcaaggcttggattgagacagaccagaatttaaatcccagacccaccacttgccagctctgtaacctggggtaaactccttaacttctctgaacctcagtttcttctcaggtaaattgaggataataatatacaggcagacctgatgtaaagattaaataatacaggtaaagcacttagcaccatgtcacgtagcagacactctatacatgttagcagttatcctaatcatcatacgtacattccattttctaggggtgaccactgagttctgggtagattcattgagttgccaaaggattgatgtaacatgacagtaaggcatttgtttgtgacagtccctatccctgccccatctcatttagtttatattcacaagaatttgagggctagtctgcactttgggctgttagtgccagtggctttccctgcatggattttgcgattttagttttgttttgtttgagatgagtctcgctctgtcacccaggctggagtgcagtggcgcaatctcagctcactgcaagctccgcctcctgggttcacaccattctcctgcctcagcctcccgagtagctgggactacaggcgcccgccaccaagcctggctaattttttgtattttttagtagagacggggtttcactgtgttagccaggatggtctcgatctcctgaccttgtgatccacctgcctcggtctcccaaagtgctgggattacaggcatgagccactgtgcccagctgattttgggatttttgtgtgtttctttgtgtagtattggctgtttgttcttccctctgtgttcacagttttgaaatttccttcccactctcgaagtctaaagaattgaagtcagacatgtgactaattaacacctcttaattggggaaatatgaccttttagatgttattataataaaatggcagctacaaaaagaaggtgattctgcccctcacgtggctgtctggtgggtgtcagctccagaaaaggacagggagagcacatcctcttgggctgtcctctttggttctgcgtttccagttcactgcaaagtcagacagcagccacgtcacgacagcatcaccacagtactgatggctgacgtgcattgagcgcttaccatgtgcccagggcactgtgctaaatgcttcaagtcctttgatgctttgcatccttgcagccaccctgcgaggtaggtattatcatcctgctttacaattgtgggaactgaggctcaggaaggtgaagtggcttgcccaaggtcacacagctggcaggctacagaatcagcatttgaactagggcttgcacttgagaccaggagcacagcctatcccagagttgtgtactctgcagctaacttgagctctgagtaggaaacttccttggccctatttagaggagaaagacagggagggagctcatgttccttaggtatctaccctgcttcatgtgccttttatatatctttcatttcattcttggttttaaacaccccctcctctctctctctcatacagacacaaacacaatcagcattatgatccttgcttttcagatgaagaaatcaaggctcagagacaacaaggggcttcacccagatcacacagccagtaagcatcagattttgaacccaggtgtggctgattctgagctcttgcttttttctacactgaaccagactgtggcatttctgattatgttctcaaaggggagaagggataatgtgaattcagagcttggcatcacgcaaacagccctaaaccgtgagtcaggaagcctgggatttctgggcagtaccctgctgggatttctgtggcagtacccagaaaatcctgcccatttttgcctccatttgtcccatttgtaccacagggacgtggtctcccaggtttctgagcctcttctgcatgtcagcatttcgtgtatattctgattatagccaaagatgcttgtctgtgtatcctggaggagatggagcttggggcagagctatagacctttgagaggatccctggagtaggtgaatgtagcacatcatgcctctcaaggcagaacttagaccaataatggtttttttctttaaaaaccaaagagaaacttttccctagttgggggatagacaagtagtgagtttcccattaaaagggtacatttttgaggcattcagaatgatacggatacttcaggcattaggaaatgtgaaatagtgaggtttagcaagtagaggctgggcactctagatgcaaatacctttcagctccgcaatcctattattctgttcaaagataaccaggtggtgagcctatagcagggtaccaagtggctttccctatatttgctaactctaaatgactgggagtcgctgcctggggtgcagtgttagggattctctgagattatctaagctcacttctgtaattgattattgatgtctgccatgggcaagggagtgttactgactttctgatttcatctttgctgttttcaaaagggtacccctttgtgtttccaacacgaaattgttactttttttttcaatcagggaacaggaggacatggatgtcagcaagaataggaatagcagtcaccaaatcccacagcccgaattctcttcctatgttaccaggcctgtggtaacacctctctgtaaaggtcagaggctaaatttaggaaagtgtcatggaatcatggaatggttattattcatgatgactgtcctttgtttccctcagttcgggagaattacataatggccaataattgatgttaaaaaacaggtgataaacaagaacatttgagattaatctcttgtttcttaaagaggcacttttgtatacctgcctgattttcaaagctgtccccgattgttaggtaaactggacatgtgctgaggaatcgaatggggcacagtttaccaacttctataagtgtgtttttcactttctgctcaatcactgttatttaccattgtgtcctcatcaagtgattttctttcaaaccaaaataaaagttgcccaaccctttctgggagagtttgtcctcctgccagtacctgcctgcagctgggaaagtttccagtaagtaaacagtttacagtggaggagattgaggcccagagaggttaagtgacttaggcctaacatgtcacacagtcaaagagtggcagagctggaattagaaccgaggcctgtttatctcaaaagttcctccacttaaatatgccaagtgaatggctgtcctgcagtagattctcagtgtacaatgactcatttttcttgtgcttgtctaaaaattgtttgcctctgtatctgtcaggatcagctaggttgtgctgcagtgacaaatggccctcaaaacttcagtggcttaaaacagaaaaataggttttgtttttattttttgagcattctaaatgcccgctgtcattggctgtgtctgtgttccatgtcatctttactctggtggcctaggttgatggaataggttgcctgtgggaacagccggctgcatggctgatggaaggagatcatggccaaccagtcattggctcttaaagtttctgcctggaaatgagtgacagcactttttgcttgcatttcattggctagggcaagtcacatgactgcacctgagaccaagaggggtatataatccttcggtagggagtgacattggatgtatgtgccttgcagtatggtctgcctgacacagtctcaacatgatctttatcaattcatttgtagaaataagtctgcccaagtccattttctccttctctgaagcatgagccacccttttggattaactctgctcttgttgcttagattgattaacgatccctgagttgaacattcacctattctcatgtacagccccatctctgattttgatatattcattcatttattcatctgttggttcatcctagagatggactggaacctgtgatgtgaaaaacaaaaacaaaaacaaaacatcaaccttcaaatactagagttcttcaaagaaattcagagttctttcaagatattcaggcccatatctcttcaacccaccaaagtgttgctgagtagctcttggtgcctgcatttctctaggtgggcaacatttatcgagtgtctgccatgtgccaggtgcttccatgacccaggaaacttccagagatctcaggaagatgttttgtctttgggtgcttgggaatcccacccccttcctggtcttccctctgagggaaaggaaaaaacaacttcagtgcttgagcagagagaagcaccagccactgcacaccacccccagaccccaactgagaagtagtggaggaacaattactatggcttttaggcaatgttgtaatgggtctcctgggcatctgtgctcatcttttctcagttgggaattctggggatgctgcttggaagatatttatagaagaaatgctcattgcctggggttctcagagaggcaattacatagtaagaagggggagccgaggcccccctgatggggctcaccctgggaaggctgcaggaagatgcaggcttggcaggctgccttatcttggcgaggagccctgaatcagaagcaggcctccctggttacagaggaggcctcaggaagtggagggaggctgtatggtacaaaggtggggtccagcagacttggccttgaatctggattttgccacctacttgctgtgtgaccttgagtaaatcacgtggcctctctgagctttagtttccccttccatccagttgtcaaagatgtggtaaggctttaatgacaccatctatctcctcagcagatgcttgttgcatgcctactatgtgctggggatttatcagagaacagaccatttactttctagttggagttgggaagagaggctataaacaacagcaaaagcagtctaatatcatgggtggtgagtgctgtgaagaaaagtaaagcaaagttggggagataggcatgggttttgggggacatatgtactttacacaagagcttagggaagccctctttgaggagggaacatagaagaaatgaaagaaatgaagcccagagctctgcagatatctaggaaaaggaagaacatgccagaagtgggaacagcaagtgtgaaggcctaaggacggagtgtgctgttcttggcttactttagaaagcacatggaggtctttgtggccaggtggcagtgagtgaagctgagaagtggtgtggtggcagtgcaattgattagtactgctgcgtaacaaatgatcacaaacttagtgacttaaaataatataaatatctcacagtttttgtcagtcaggaatccaggcccagttgaggggtcctctgcatagagtctcacaaggctgcaatccgggtgttggctgggctgcattctcagctggaggctcgacgggagaatctgcttccaacctcacttgggttattggcagaattcatttccttggggtagaggactgacggccctggccacttgctggctgtcagctggagtccagcctagaggctgtccgcagttccttgccacatgggctttctcatggccatttgcttcattaagccagcaaggagtatctctagagtgagcctgctagcaaggtagggttttctctttttttttccttttttttttttgagacggagtctcgctctttcgcccaggccggactgcggtggcactatcttggctccctgcaagctccgcctcccaggttcatgccattctcaaggcagggtcttctataatgtgatgccgcaggggaataacatcccatcccctttgccacattctgttggatgaaagtaagtcatgggttctgcctgcacccaaggggaggggctcacacagggcgtgaacaccaggaggcagggatcctgggaggggcacctcggggtctgtcagccacatgcagtgagccgtgagggtcgatgccagagaagtggggaacagggagcagtgggcaagggccccataggatgcagtgagggcattgggacttattctgtgtatgacaggcatccgtaggaggttcttgagcagaggcgtggtatgagaaattgtccgtacctcaaagagtgcatttcatatgtggtcactgtcatcatgaatggttattccagctcctggacaggtcattggtcaaaaatatatgggaaggagaagtgagggggagttggaagagtagagttatttttcaggctcttcctgggacttgctgtggaacttcctacaaggccctcacgtctcagaacctctggccctcataagactgtaaaacagataagactgggctcagaggagctcctcagcctactgggagaaccagacgttaaacatgtaatcaccctgccaaattacccctatatttttatcctagctttataaaacaaggatcaaagaatgggcaggaagtaaattcacccacattttaacagtgattctcttcagtggtgagattgcatgtttttgtttttgttttttgtttttttttgagacagagtctcactctgtcgcccaggctggagtgcagtggcataatctcggctcactgaaagctctgcctcctgggttcacgccattctcctgcctcagcctcctgagtagctgggactacaggcgcctgccaccacacctggctaattttttgtatttttagtagagacggggtttcaccgtgttagccaggatggtctcaatctcctgacctcgtgatccgcctgcctcggcctcccaaagtgctgggattacaggtgtgagccaccacaccctgcccatttttttctttgtaaatttttattaatatatgtatctttatatctagatctatatttatattttatagtgaaaaatgtataacttctgtaatcaggggaaaaaaccctaatcaccagggtttgggagtgacatatctcttttctaactaccctcccctaccttctgggaacagccaatccaggcctacgcatgtccccaccttttatttaaagaggtgatgcatcacgggattttcctttcccagcctgctgaagccgaggtccagaggttctgacttagaccacaagttcacgagcctgtctggcatcttccaaagtgtggcattcagtagatgtgatttggaaccctggctcggtgatgtgttagctccgtgaccttggtcaagctcctatgtctgtccatgtctcaagtttcccagtctttaatgataatgctatataacctttaccttacagggaaaatgaggagagatgggatggggtgaatccctgggaagcaccttataagccatgagacaccaccaaaatggttgcttgttcaagattaagaattcatgagctgccagtttccccatcaggcacttctgcagcaggcccttaacctctgcaatccctgcaattccacactagcatcctaggggttgggggcactgtgtactttagcggcagcctctggttgcctagcaacaggaaatccatcctggttgatactcttaattcgtgggaatgttctgcccactgagatggcgctgatactcagttacacgagaaggggaaaatcagcagtctgcacaacttgcccacaagttgccgaatccgatcccttctcagagtcctctcagccataaataagatgctggaggccacagtagagtcacagctctggctcttccccaacaattccatggtcaccaggatttcttggcaccatccccctgcactggttccagctgccatcttcgccagagggtctggtttgaaatgcttttttgggtccacaggggctgaggtgagtgggatgttgtccatgtgtgcttcttttaaaccagatggatggaccgggcatggtggctcacgcctggaaacccagcactttgggaggccgaggcgggtgggtcacctgaggtcaggagttcgagaccagcctgactgatatggtgaaaccccgtctctaataaaaatagaaaaattagccaggtgtggtggcagacttctgtagtcgctacttgggaggctgagacaggagaattacttgaacccgggaggtagaggttgcagtgagccaatctcatgccactgcctgggcaacagagcaagactccatctcaaaaaaataaataaataataaaataaaccaggtgaatgaatccaaggtgctcctgtgccttacctgggaagtaagtggggactggcccttcagaggcaggccccagctgcgcttccgttctcaaactcagagctctccagtgtgaggactccttggtagggacacctgggcttctaaacaaaggctgatgaggggctgtgatcttttcacaagccttcacccttttcccacgtctatttactcaggtatttttcaggctctccccgtcctgggcaccggccaaggtgccaaggagacagtggtgagtgacattcaccttcccttcagggagttgccagtcagccaggggaagaaggccttgaaacaagaaaaccagcagacacacaagaactcccaaagggttaggaaggaaacagatggaatgtgtgggcctccactctcaggggtctgaggaggagtctacgccagcacagggttgggcaggctgagcacatggcagatgtgtcagaaagcaactgccttttgttctgaaatggtgtttgtcattatttgaggatgttaacatgtccaaatgtccattttgaaatgaattcgtataaaataaaaacattgctgtgaaaagctcacagtccagggtctgtctttccttccttctctcctcccttccttcctttctataaattgtcatgggctgtgaaatgtgagatgctggtctccactcatctggttccagcttctcatctgacagatgtggttcctgagcccagtggccagccagaccttagccaccatcacatgcccctaactgtcctctgccccattttccctgcagatgacatgcaccaggctccccaaccctcaccacaagccctgagggccctggatagcctaggagtctagaaacctgggcctaagattagactggaccaagttgatcctgtttccgccatttatgtgctgtgtgaccttgagcaagtgaattaacctctctgaacctttgttgccttgtctataaaatgagaatgataggccgggtgtggtggctcatgtatgtaatcccagcactttgggaagctgaggtgggaggatcccttgagtccaggagttcgagaccagcctgggcaacatagcaagatcccatctgtataaaaaaaaaaatgaactaaaaaaaatgagaatgataataacagtaccaatgtcatagaattgttcaggggctttgttgtaaaagtgtttgattggtatgtaagaaacacatgtgttctcacagtctctttctctctctttctcctgccccttcccttttttaactggtattttctagtttttaaaatgcttcaagtttttctacctttaccatgtgctgaatggtctttgttcctatctttacctcttggcactgcctctatcttctgaggtccagttcacatgcctcctcctccaagtagcccactgtgcttcacccacccactagactaatccccactcactccgggtaacagactccagtggtctgcagatacacctggctcccctgatgctcctgtgatggggaatgtgacctcctggctcccagctctctgggggttcagggcctcactccctttccatagggcccagttcagtaagtgacattttcttattgaggccacaggacaaactcataaagtagctctatggtttaacaaaacaagagtgtggacttgggctggaatacccttcggagtctcatggcctcacatgggaggcgaatcagatttaacaaaccctaaacaaatatttgtgcaggctttacagcaactgagtgaagtgtttctttcttgtccccattgtgtaggtgaagaaactgaggcccaatgagacaaagggacttgcccagggccccactcccaggcatagaaagggagggacttaggattcaagcctgtctacaccaggggttcccaccctgaacctccttctcctgggaatccccagacaagccccatcactgttagttaacccataccttttcagggctctggtgtgactggatattatctgatgtttccatgcaagaacaaagaagtaaggggtatgtctgccatcggaggtctgtgacttccaaattcaggggaaaatgcccttttgctcttagagtccttgactaacctgcttttaattcccctggaccatgcacatctttgtccaggtgctgttaggagtcctttccctttagggatggtggatccctgaggtccccagagctacctgacagccacagggccagcctacctgaggcctggggcccagcgtgggttccctaattattgctgaaaaccatctctcgcctgtcaacattctataaatagggacctggaggaagaataaaaaataccaccggctcttttccccagtgggggtgggttgagttaaaaagcctctgaaatagcagcatcaatggcgtaggaaagctggagggagttgggagagctgagaggtcacctgggactgttttcatccctcagaggacctgcctgtgggccatgaggatgatggtggtttccccaaggccacacagcatggccctgtctgattcctattcccccagggacatggtgtaggaacatttgggattggggaagactgggcctggtgatccccaacctgtgcttcctccaggtttcctttgaacatggccatctctggctttgtcacctgtgcaggttacttccccttccctgggcctcagattctgtgtccctaaaacaaggtccttgccagctccaagtcactcaatggaaaacccaagctagaggccgggcacaatggctcacgcctgtaatcccagcattttgggaagccgaggcgggtggatcacttgaggtcagaagtttgagaccagcctgggcaacataatgagaccccatctctacaaaaaaaaattaaaaactagctgcatatggtggcaggcacctgcagtctcagctactcaggaggctgaggtgggaggatggcttgagcccagaagttcaaggctgcagtgagctatgatcacgccactgtactccagcctgggcgacagaacacagccctatctctaaaagaaaaaaaaaaaaaacaacaacaagctggattaatgctgaataccatcttttgtcagtggcagtgtgcatgagtgtgcacatgtgtctgtatgaatgcagttctctttaaaactcagtgacacgctcaggaaattacctgtgcagagagtcaacttattactagttagaaggccctttgagggcagagtttatagaatctcatagtaacactatacaataataataatataagttctagtcatggctaccatgtatggcctcagagaggtttatcgagttgcccaaagtcacacggctggtgggcagcagaaccaagacccaacccaggtctgtctgacctcagaccagttttaacacctggacttccatatcaagtaggctttgtaggataagtcgctcaaacaaatcccttacctgcacttcttttgttttttgttttgaaaggcagcaccctgcttttcctagccttgcccccaggcctcaccaacagagtactgacatgttatttatcatgaaaacatctgaacaatagcagttcccagagccaaccttgctgccaagttgttaccatgggagatatgtagaatatgtgggggcaaggaaagaaacttaggaagtgacattgagtctgggctgcctggctttgactcccagcactgtggctttgttccccagggcaggtgacttccctttgaacttcagtttccccatctgaaaaatgggatactggcaatggataatgttccccccactcctccaatgggagcaaaatatttgaagcccttggtgttcacatttggagatcatatttattaatgcactcaccaaaggatcttgcatgtagacagtcagtgcccaatcagtgtttaaaaacaaaatagaggagagcagagtacagtggggactgtttgggaacccaggagctagttgagctgggcagacctcagccctggtctcctgcccctttcatctcccctggagctttgacttatcttccatcctgcagggttggagcaaacctaacactttgtgtgcctaatccatgtgtgtgtttgggaagctccaggtttaagagcagatgagggcaatatgatttagggaaatgagagagggagggagggtgagggatgctccacccccttccttgctccttgatccaaacgtcaaacatgctgtctgtgccatgcagcattttattttattttttactattttattttattttattttattttattttattttattttattttattttattttagacagagtcttattctgtcaccctggctggagtgcagtggtgcagtcttggctcactgcaacttccacctcccaggttcaagtgattctcctgcctcagcctcctgagtagctgggatgacagacgtgtgccaccatgcctggctcatttttgtacttttggtagagatagggtttcaccatgttggccaggctggtatcaaactctcaacctcaggtgatccacctgcctcggcctcccacagtgttgggattgtaggtgtgagccaccgcacctggccccatgcagcattttataacaatacccccacctccagtcctttgccctggccatgccctccccctgggatgccttcctcctggaggtcctcttggctgaggccctcatctctttgctcaaatgttaccttttcacagggacttcccctgacagccagccctatttaaaatcataacattccctcctctcccactcttcagcccctctttccctgcctcatttttctccacagcaggtatcaccttgcagtgtcatttgtgatctgctctgttctgtgaaagaggggaagaagaagggagggctggcaggtgggcttcctgtgtgctaggagctctcattcactattgcatttagtctgtaacaactcgaagaggcgagctctgtttttccatttttgtagatgaagacattgacacttggcatcttggtacctttatattatctggattctaggatctgtccttcctcctttcctttcctcccttcccctccctccctccctccctacctcactctctccctttctttcccttgctacctctctccctccctctctcttctctctttttttttctcctctctttctttataaattcattaaacacattgtgccagctttggccctgggaagaaggaggtaagcctagtgtggtcccggcactccctcagaggccagccctgcctcagtcccagccctttctcagtcccagcacccccctcagtcccagccctttctcagtcctggcacccccctcagtcccagccctcccacagtcccagccctccctcagtcccagccctccctcagtcccaacccttcctcagtcccagccctcccacagtcccagcgctccctcagtcttagagtggggatgggcaaagctggcacaagcccctgctgtccagggtgctaagtggtctcagagagttatgagtaaggagagtgtgctccctgggctgtagagagtaggagcccccagcagttggaggcaaggaagggcagtccatgcaggaagttcacagcagtgggcaactgtagggcttatcagggaacagcactctgtcctttctcgctgaagcaggacatgagtagggaggagcatcttgtgatgggcctggtgcagagccaaggagcttgaactttatccaactggcaccacgagggacgtcagcctgggagcttccagctcacctggaatttttgcccttcagagccttgcaaaggcttgggatgttagaagggctcagctgaggtttctcacccaggattctcctgccctgaccttgagtcttatttgcatctcgctcccgtaagtgctctggtctacccttcagagaatgaacagtgtttactgcaagggctttattttccagaagcggagggtagtcactgctgcaatgattcttacagttcctataaatttcaccagctcctctgactgggctgatctataccaagagttctgaaaagagcgaattccgaaaagctccttgtatcatcctgcctcttgggcttggtgtctcctgctggtttcaaagagacacagaactatgattctgactcttacgagcaccgtaacaatcacaatcatttcctgagcacctactattgccaggcacagcccttagcacttctcatagatcatgagctcatccagtgctcacctcgactctggacattggagctgaggctcagagaggtgtggtgacttgcccaaggctgcacagcttctaggtgcctgggaaccaggattggagcctgggtctgcctagctccaaggcgcctgctgacctggggttcctcttccctgaatcctcgtgaccttcatggtctgcatctgacgtcctggcccctcaggggactgagaccacctcttttcttcttcactccttcaggaattcattggagatagagagaaatttcagggaggaggagagtggaagatttgattttctggggtgctgatcaccatccctggcttgaatccttttccctccccttccctagagctctccttcctgccctgtccctggtgccccaagcatcttgcctcctcccttctctgagcccttcctccttgcccctccccaagattggaccctggaagaccccccacttttatttgccttaaatgcatttgcttctctttatcgctttgccctgccttgggtcaggcctctgtggcctctcacctggacagtggtggtggtctctccactagtccccggactcctctcttgccctctccagcccatcctacgtacagcaggtagagtgttaatcttgtcccttggagtggtaattctgttatataagtcgcacatggtccctgtacctttgccctaactgctctttcccttccctggctaattcttagtcttcattaaagactcaacacaaaagtcaccacctccaggaagccttccctgaccccctccccatgcccttcgtctgtgttgcatccattccatccactccagcctcggcctttgcgcttcccgtgcctggttgaaatggtcggctttaatatccatctccccaacttgattttaagcttctccagggcagctgtctgaggcatgtcagatccttagcatagttctgtcatacagtaggtgctgatgaagtgctcagtgtcctgagcgagcaccagacaacctctgagctccctctctatcctgagtcctcgatcccgtggtttgtgaggcagacgggcattgttttcctctgctgttctcatcactgcatgatgatgttgcagaggaggccacctgatgggagcagccacagttggcctaagagggtggctgctttctgcctggcagcagaacccctggattctagggatggacccccattttacagagggggaaactgaggtcctgagaaagtgacttacctgaggccatacagccagggacgcaggctctgtcggccctctgagccctttccctgtgctaagccatggcagtgggtggcagtccagggcagtggaattttcaggaaggtgctgcctgcactctttcgggctgcccctgcctcccccgacaccccaacacccttctctaaggcctaatctgcctgctcctcacctggactctacctctcgctcttccctggcatggtctcataaaataccaagactcgggaaatagaactcgggcgtagctggatgccaggcagagtgagccggtctgtaaccaacacaatgccagctctcatggcggtggggagaatatgcaaattgggggctgaacagcaccccgctcctcaagtccgtgggtgggaaaatcataatgtgtgcgtaactgtgttggtttatgactgtgttctgggtcctttgcttttttttttttttgagatggagtctcactccatcgcccaggctggagtgccgtggcgcaatctcggcttactgcaagctccgcctcccgggttcacaccattctcctgcctcagcctcccaagtagctgggactacaggcacccgcctccacgcccggctaattttttttgtatttttagtagagacggggtttcaccgtgttagccaggatggtctctatcttctgacctcatgatccgcctgcctcggcctcccaaagtgctgggattacaggcgtgagccactgcgcccggcccctttgcttattttaaaagaattactcaagcaaaccatgcccattgtagaaaaataagtttatagagagaaacaagaacaaggttatttagcatcccatcccctggaaatgatccttatgacatatctgtatcctttaagaattttttgcatttatatatgcaacatatatacatatatgcatatataataaatatataaataaatatatatgtatacatatatttttgtttatatacacatatgtatatatagacagatcaacaaagtccagttatacaacatcaacatgaactcttttttttttttttttttttgagacggaatctcactctgtcacccaggctggtggagtgcagtggtgcaatctaaggtcactgcaacttctgcctgggttcaagcgattctcatgccgcagcctctccagtagctgggactacaggtgtagtccaccacacctggctaatttttgtatttttagtagaaataggtttcaccatgttggccaggctactctccaactcctggtttcaagggatcttcccgccttggcctccccggcctcccaaagtgctgggattacaggtgtgagccaccgcacatggccaactctttttttctttttgagacaggtcttgctctgttgcccgggcaggagtgtggtggtgctatcttgactcactacagcctctgcctttcaggttcaagcagttctggtgcttcagcctcccgagaagctgggactacaggtgtgagccaccacgcccggctagtttttgtatttttattagagactgggttttgttatgttggccaggccgctcctgaactcctggccttaagtgatccgcccgcctaagcctcccaatgacatggattcttttgtagctagtgtccgttcattttccctgctttgactgacttcctgtgtcagtgaatatagaccagcagcctcattttcagtagctgcgctatattctatttttcaggttacgcccactttatttcgtcaggccctgaatgatttttggatacttagattgcttccagtttttctgtcttataaataatgctgcagtgaacattactgagtattcattctcacacacctgcataatcagaacaacttttagcagtagagtgactgggacccaggccaagcccatatgcagttttaaggctgtgctgcacattgctgagtgggtttaaaagtccattttcatggccatttacatgtgtgtgtgaggtgattaaatcactcccatgtcagctaaaccttgctgtgagcacatgtgtacacacaaacacaatgcatgcaggcacacagacacatgcatgtacagaggaacatacactgactagttgcctaatttctctgagcttcagttttctcctgtataaatgccacaccaggtttgcagtccccaatccacccttctgaaattcaaaaagctctcatttgagcaaaacttgcccctgtaccaatgcacctgggtgagttggtctgtcacccaggctggaatgcagtggcgcgatcttggctaactgcaacctctacctcctgagttcaagcgattctcctgcctcagcctcctgagtagctgggattacaggtgcatgccaccacgcccagccaatgtttgtatttttagtggagatggggggtttcaccatgttggccaggctggtctcgaactcctgacctcaggtgatccactcgcctcggcctcccaaagtgctgggattataggtgtgagccaccatgcctcgcctaatttttgtatttttattcctgatttttttttaatgccacatggtaaggctcttcctatgtgtcatgaaatattaacatgtttgcttgtggagtgttgtcctactcacatgttcatgaaccttgttttcatttatcatcccctaaggggcctttctaaacattttttccctagttgccttcccagtaactgtactaccacatagtatagtatatcaatagtatatctgtactgccacagataaattgtatatctgtatatgtaccatatgcatatctgtgcattatacattgaaagatatttttcccacacatcccccaagaaacaattttccccgcttggggataataccactcctgttgagactgcaccaactagaccagtagttctcaacctggtgtgactttgcccccagaacatttggccttgtctggagacatttttggttgttgtgatggaatggggtgctactgacattggtggctggagtccagggatcccacattgcacaggacggcccccaccacatgtccgtagtgccatggttgggaaaccccatcctagacctcactgggggaatctcacaatatgcaatatacccatgcattgcctttctaaaacctgaaaagtcctgagttggaaacatacctggcccctgggtttgagattggggctggtggagctgtgacagtagaacccgcctcacggtgttggtgagaggcccctttgggggctggcatagtcaaatgcattgctgggcacctgccccacagtgtgtgctcgcccaggaagaacccaaacgcctagagtcctgggcactcggatgttgccctacattgagaaatgggcccttctgccacagagcatcctggctgcagcatcccagaggcctttgggagccttgacgaatcagagaagtgcagtccctgcccaaggctgcacaagcttctaagtgctggggagccaggattggagcccgggtctgcctcaccccaaggcgcctgctaacctggtgtctcttccatgaatcctgtgaccttcaaggtctgcagctgacatcctagcacctcagggccaagagactacttcttttcttcgctgcttcaggcattcttgggaggtacagagaggtatcagggaggaggacagtctaggtgtgacttctcagtcagccaagtaaggtccggctccaaggatgtccagggtttccctacgtgcccgaaagcctgcctatgcagtgggtttgttgttttatttgggggctttgatccaggcactgtgtctgcctgaactggcctctgggttctccacatgcaccagctttgcagccagctgataagctgccttcaacggccctagtccctgtctgtgtctcagggctcacagttgtggcttccagagagctcaccagattgctctgatcaacttaggacctaacacccatatgatgcgcagataatcacttgctcattcctcctcaggacagacaggaaccactgcaggagctcgttctgtcctgacttgggcattgttaagggttggccaaagatataccatccacttgggtgttttccagggcctctggcttaccatggggtggattgggaaatggggtgggtggagctagctgtgagttagaacagacagcactctaggcctgggcagagtctttgaacaaagccacaggctgggctgagcaccagaaggaaacagagcccttggctctgtctcaggcaatggaatgtcagcccgactggttttccccctttccctggggtggggtgttcatcaacaaaggactctccttgctggttgacagcctgaggttccaggcaccccctcagccccactgcgaggtccccaactccagaggaagagagactccattcatgctgagcttcctataggccccagctctgccaggccagccatgcaaggctgctctgcagggcagatgagagggggctgtccaggcacacaaaatagtaggctcttaatagatacgatgcttaacttccccaggctgttccttctggctgctttgccttccctgatatccccacctgtcttgtcacaccctcctcagagccctctgtcacctgccactcaggccttctgcgccctctcccccactctgtctgaggcccaggggaccttggatacttgggataggaaactttgattaatcagcggacctcaatttgagatggcattttctgccccttgctctttttaaacctattcataataattttagcatctttccacatcagcccttcaatttctaccttctgaagaggcagtcattgttttgaatggagacaccatgttaattcccttgcactgataagctatagtttaggtatcaggtgctcttgtggaagggcagttgggttgtgtgtttgctgttaccaaaaacagtgctgctgggaccattcatttgtgtgtgcatttgtgtgtgtattatatatgttttgtgtgtatgtgtatttgtgtctgtttctatgtatttgtgtatgtgtgtgtgggggggtttttgtaggtatgcatttgtgtatatttgtgtgtatgcagctgtgtgtgtgtgtgtattgggtgcatgtatttatatgtgtttttgtgttgtctattttttgtgtatgtgtgtgcattggtgtagatgtttgtgtgtgtacatttgtgcatgtgtatgtgcttgtgtatatttgtgtttgtgtgaaagtgttttttgtgtatatgcatttgtgtgtgcatatgtaagtattgtgtatgtgtgtatgcatatctgtgtgtttatacatgtggttatgtgtatatttttgtgtatgtgcatttgcatgtgtatatacctatgtgtgtatttgtatttatgtacctgtgcttgtgtgtatttgtatatatgtgtgtttatgtatattttttctgtgtctatgcatttgcctgtatatgtgtgtatttgtatgtatgcacctgtacttgtatttgtgtatgtgtatgtatatagtttttttgtgtatatatatttatataaatatatataaatacacacatatatatgtatgtgtgtatttgtgtgtatcttttttgtgcatgtatgtgtgtatgtgctttttttttttttttttttttttttttgagatggagtcttgctgtggcacccaggctggagtgcagtggcgtgatctcggctcactgcaagctctcacctcctaggttcatgccattctcctgcctcagcctcccgagtagctgggactacaggcacccgccaccatgcctggctaatatttttgtatttttttagtagagatggggtttcaccgtgttagccaggatagtcttgatctcctgacctcgtgatccgccctcctcggcttcccaaagtgctgggattacaggcatgagccaccgtgcctggcctgtatgtgctttttatgtatatgtaattgtgtgcatatatgtgtgtatttgtgtgtatgcatttgtgtgtgtttatattttcatgtgtatatgtgtttgtgtgtatatgtgtgcatatgtgtttgtgttttgtgtacatgtttgtgtgcatttgtgtgtgtgtgcatgtgttgtgtttatatgtatttgtgtgtatatatgtgtatgtgtacatccgtatgtgtttttgtgtctttgcatgtgtgtatatatacatatatgtgtgcatctgcatgtgtttgtgtatgtgttttgtgtatatgtgtttgtgtatatactcatgtatgtctgcatctatgtgtatgtgttttgtgtatatacatttgtgtgtatatacatgtatgtgtggatctgtgtgtgcgtgcatctgtctgctggatggacttccagtagcagggatggtcaagccactttgtgacattggaatgtcatcattcccatagaacacagctgagttggtggcagtgttctggcagggagagagagaccaggccttgggctggaggatttggggtcctcagtcaatagggagacacacccagcgccctgcctcctcaacaggtttacacgtacgctgcaaggctgcagttctgtcacctgacaagttgagccctagcctgaaataaactgtgagagagatgttttgacatgtgatgtttcaaaaaaagaagtcaaattgggcttagtctgttttaagaatccctccaagaggagccaagttgggatcagtgggagcagattccattaaaaggagatgctgggaaacgtaaaagaattatatacttacatataattatacattttcaaaatgtactttttatatcactagccacaaatgttacaaaatacaaaaagaggtagaataaaaaaaagtcatctctcctcgtcctctagtcacgcaattcctctcctagagacaagtatgattgcagttttcttgtgtccttaggtattctgtgcgttttggtctttacttttttccccctcacgaatggcagggtctgccacctgttactttgcaccttgctttactcactagacagtgaatcttggaggtcgttccatgtcagtaaacttatgtctgcctcattctttttaactattctttctaacaattaaatagagttctacattataattgttctatactttaggttaaatacattttttaaaactccagattctcttttcccttgactcatcgtaaccttagaactgtagagcttatattaacagaaattctgagttaaaaagaacatcaaatttgtctatctccatgcaagagtgccacagtacttctagaatgttctgtgcccctcccctctcccctgattattttgggcatttttcttctccctcaggatcagtctctcctattttgcacctaaatgtatcacacaggccaccccagtttcactgtcagcacactgcacatagttttttttttttcctgttctttttatttttttttttattcagatggagtctccctctgttgcccaggctggagtgcagtggcacgatctcagcttactgcaacctccacctcccaggttcatgcctttctcctgcctcagcctcccgagtagctgggactacaggtacccaccaccacgcccggctaattttttgtatttttactagagatggggtttcactgtgtcaggcaggatggtcttgatctcctgaccttgtgatccgcctgcctcggcctcccaaagtcctgggattacaggcgtgagccaccatgcccagcccacatagtgttttataaaaaacaatttgttttaaaaagcaacaagaattaaattttaaggacatatataaaagcagatggtcctgtgatatatcaagagggtctgggtaaatagcagtgtcattctgacattagagaggggacagggagtcatttatgggttcattcactccatccatccatccatcttcacttgcttcctgtccactgtggctgtctctgaacttgtcactggcatttgagggcgaacagaccccagttcctgacctcagggagcttacagtttagagaacacagtcaaacgataatcacagcccagcccaataatttctatgatggggtgagcacagggggttctatgggggtcctaagaacccacctggggatggggccagccaggagaggcttcctgggggagtggatgcctgggccgcattttagggacacattccaaacagaccccgggccatactgccagcagccgacacactggaccaaggagtacttcctgggtaaaactgcagtgggcgttggtagagtggggaatcgcaggccactaacttgaagcccagccacctgggtttgaatggagctccttcctctctgtgcctcggtcttctcatgcagaaagtggggatagtaacagtacctgatttctcggattgttgggaggactaaatgtcacggcccagcatgcagtaagcaccatccaagtgtctgctattgttactatttaatgtgtcagaacttcagctcacttatctgtgaaatggggatattaacagtatctattatgggaattaaacttgatggtctacataaggaatttgacatggtgccaggcatgcagttggcgcttcttaggtgtttgtggctgttactattcttattgcctccctgcctacctctgacacccacagcgcaggctctagggtgcccactgggcttcttgggtctaggggaaccctgcctctgaggccgacaggagcctgggcctcccagcccagctgttgtttgtgtttatagcctccaaggaagcccccactcagagctttgtcaggcactcccagccgggaaaccaaatacgcctcctgcagaccagctgcaaacttgtgttcctgtcactttgggtaacgcttgtcccatggagacagcatgtctctaccacaggcatcattttgcagcctgcacaccacggtggatgactcatctgccctgcagagctggggctgcggatcattatgcgatgtaggaccttccccggggtgcccttggagggagtcctagtctccctggacgtcaggtccagggagatactgggggatctgatttaggtagccactctggttcttagctgaaagacagaactgtcaggcctcatcagaacctgttagcaccttgtcatgatgtttgttaaaacgatgtgtttgggaactgaacagtggacaccaacatcatcatgtggactggcatctgtttggcaccgaccacatgccaggcatgtgctagttctccccagacattgacagaatcctgccaacacctccaagcttcccattttacagatagggaagttgaggctagaaaggttgagttgttgtagctagcaagtggtagagctggatttgctctggtctgctcggtcatagagccctagctcagaactgctaacctgtcccacctgcaatacatcagagcatcaggataggttaattttatatctgcaatctaaaagtttgtggtttagattgctaatcagtaagggctgttagcatatctgtggaatgtttataaaaactggttttattgaagccccaaggagtgaaccccattatttcatcattaattaggtgggtgcaccgccaacactgtgaacaatctgaatacatgctcatttaaaggggaatgagccaaaccctttacactgacagttcacgcagaacgttttgtaaacactggacattagccagcagtcagaggttagccatcaagctgcagagagctgctgagacctccagtcccagaccattgatcaccaacagagtaaactgaggcacagagaagggcagggccttgcttgaggtcatctagggagtggagccggagctgaggatggcacctgtgctcatgacaacgggtcaggaggtacagctcagccacatgcacacaggtgcacacgggtgtgcccctgtgggtggagccacagagccgcagcccaggtgggcccatccagccccctcattcagaggcttgggcacccctccacctccctgttactcttgccctgtgtctctctgcgcccgtctccgtgcttctcagtcttgggcttgctctttcggttcggtcttgctcccatctctgtccttgctgcttctctatctgcctctgactgcctgtctctgtctccctctcctcttctgctctccctcctccacaccaggcttgcaccaaccccagagatgaccgcaaggccttcctgccccactgagtggtgtccacagcatgtcctgagtagcctgcagccaggagatcagcccagaccctggaccatccccctgcctcagccaccacatccagccacacctgactacacctggccacacctggcccagccaggccacacctacattgttgtccttggagcccactgagggggagtcagtggctgctgtcccacaactttccctaagaagtgccattcctcccctgacatagagctggggatggggcaagacttggcttgtgctgtaaccagaggtgacacagtggtctgcccggaagcccatcatacatcctgacttctctctcagctgggacccaagtccatgggaggggatgttgtgcaggtttttgctggcagctttgagagagggtcctgaggggtctgcccagcctcatatcccatctagttccttctagtctgacccccttccttccccttcccttccctcctcacctctcccttcttctcccatccctttcttctgtttctcccttcctaactttccttctccttctttcttccctccttccctccttcctatttactgagcacttactatgtgccaggtactgtaactaagcactgagaattgtgacaaaaaacagcgacccccttggagactgcatgtgctgggagggacacacattcaacgagtcatacaaatagtttcagtaccaccaactgaggccagggctctgatggggaggatgcccacgtagaccactggggatcaggaaagcccctaagaggagctgacatcagtgtgccatctgaaggatgagtgggcctgggcccgtggaggcagcatcctaggcagagccaacagctcagacaggggcctgtggcacgatggtgccttgtgtgtgtgaggatcgcgtggccaaatcagaacagatgaggaaagagggtgagataagggcaccaggagtgagtgccggtcaagtgggacccacagggcccagtgaggaccccggctttatcttcagagtgctggaagggagctgctggagggatgggagcacgtgtgccgaggccttgctggaccttctgaaaagacggtcctgacagctgggcgtgcagggtggatgtgggacagactgggggacttggccaatccttggtctccagcccctccccttctccttttcctgggcccaactgagaccacacctgtggatgcacttcgggatggcctgtggtgaccagagcactggccagggagtcaggacactgggtttcaggcctggctgggcatgcctcccactgcttggtccttagttttcccctctataaaatggttattgaggacccaggaaagctctcagtgtcaagccagagccaggagaatgtgctgtctttggatgtctttgggtgccaggcaaactcaggttcaaatcccagctccaccccttccaaaccatgtgaccttgggcatgccagatcgactccctgggcctcagtctcctcctctgtgaaatgggttcctcatggttcctactttataggcttcttgggagctttccatggcataatgattggcacattgtcagcgctcaggagtgtcagcccctgccattattgttactcttattgcttggccatggtactggtctggcctggacacaggatgagaagctgcctgggcccacaggggcactgggacagagcgtgtgtcccccacgctggcctgggccccatgaccacagtgctccctgcacagctgggggtatagaattgcagaggggattgggacacacttctggaatctctcagaactgctctgtcagctgtgtgccaccgagcactgccctgactcagggttctttcttaggcggatgtgtcaaacaccccaaaatacatgcaggtgtaatattttctctttttcccatcccctgtgtaactatgtcaccttttctatttaagaaactcatggttactcactgcaaaaatattattctcagaaacatatttctccaacaaatgtttattccacaactactagaggtgaggtgttgttctaagtgctggggtactgtgatgaatgaaagagcctctatagatcagagatcagcaaactactgcctgaaagcaaaatctagccggctacttcttttgtaaataaagttttattgggacacagccatgcacactcatttagctatgagtcttgtgctgcctttgcattaacaacagcagaattgagtaactggaacagagaccatcatgacccacaaagcccaaaatatttactatctagccctttatagaaaaagtttgctaaactctggtgtagattgactaagagcctgtttctgattggtacttaacttatgatgtgtacatatactcccatttatgtgtttgttttcacaaaactggtgtcacaacacacattgttttgttaccttaaaaaaattttttttggcctggcatggtggctcaggcctataatcccagcactttgggaggcagaggcaggtagatcgcttgagcccaggaattcaagaccagcctgggcaacacggtgaaaccttgtctctacaaaaaatacaaaaattagccaggcatggtggcacatgcctgtagtcccagctactcaggaggctaagatgggaggatcacttaagcctgaggagtcgaggctgcagtgagccgttgacagtgtcactgcactccagcctgggtgatagagtgagacattgcctcaaatttttttttttttttttttttttttttttttttacattttctagtttatggcagacatctttctgtgacagtaaatattacttctggacattattttccttggctgtattttttttttttttttttttgagatggagtctcacactgtcacccaggctggagtgcagtggtgcgatctctgctcattgcaacctccgctacccgggttcaagtgattctcttacctcagcctccaaagtagctgggactacaggtgcacgccaccacgcccagctaatttttatatttttagtagagatggggtttcacaatgttggctgggatggtctcgatctcttgaccttgtgatgcccacctcggcctcccaaagtgctgggattacaggcatgagccaccacgcccggccattccttggctgtatttatccattgcatggatattgtatttcaccgtctcctgccttattgaacatttaggttgtctctcgtattttgcaataataactaatcctgcagggcggtgtccatgttcatagatcttggcaggtatctctgatggtttccttgagataaatttctggagcaaaagttactgaattaaggctatgcagattttaaatttggggacatatattatgggttgttttaatatagcctttagggggtacatgttaccctgtctccccaaagctgtccactgaggcacttgtctttgcctgcaagacaagggcccagagttctcaccttccagtggctttggggcttggcaagccagtccaggcaagtggtttttaaacctgccaagtcttgaggtttttcagagcattgtaacctacatctctttctgagagcctcctgatgcatcatagaaaaggtggggcaggtagaatgttggtggcaggaaggagcactgggaaaggagcccagagcctgggttccagtctccccagctccgcttcccactcaccaggagaactaagagccccatagctgttcctgcttctgggcttccattttctcatctgaaaaggaagggccgactgaatggactcagggggtccgtccaggtgtacattacagtattcagtcaacctcatttgacatacgaccaaaccaaggtagagattggagacttggataaatggagaccaattcaggcagagctctctgcctgccttttaattcatcatgtgtattttcagagtatcttgtatattatccacctgcctgcagtcactaaggtgttttttacagcagcctgtgaagcaaaagagttggaagaatatcctgccttaaagctaataaaacaacctgacttgtagaaagtgagttgcaggggcccggtatggtggctcatgcctgtaatcccagcactttgggaggccaaggcaggcggatcatgaggtcaggagttcaagaccagcctgggcaacatggtgaaaccccctctctactaaaaatacaaaaattagctgggcctggtggcacgcacctgtagtcccagctattcgggaggctgaggcaggagaatcacttgaacccaggaggtggagcttgcagtgagccgagattgtcctattacactccagcctgggcaacagagtgagactgtctcgggaaaaaaaaaaaaaagagagagagttgcaggcgtgtgtgtgtgtgtgtgtgtgtgtgtgtgtgtgtgtgtgtgtctgtggttgattttgaggcctcgtagctctggggctaagctcaagtgttgatttgaagtcccgccaagttctggtagaatgatgaggcatgaataacttgtaatgcacaaggttaccaggatactaactagagaaagtgctgattaacagcttgctttcttaaactgcatttacaagatgaattcccttaggtaaccctagcccctgcatgactccaaatttgacagtctgtgttaaagagcagagaatgcagttatattcaccataacctgctttgattgaacattgagacacagagaagtagctcgtccaaggtcacatagctactatgtggtggtctctggattcaagtccaggtgttctggctctggaagcagtgtttgttcagggaagactgctgagaaactggtaaatgataattattatactgtggaaagttctacagcagtgctgtacactacagctttctacagtgatagaaatgtattctccatgctgttcagcatggtgggtggctgtggagctcttgaaatatggctagtgccacaggggaactgaattcttagtattagttaatgtcaatttaaattaaattcaaatagtcataagtggctagtggctactgtatcagatggcacagatgtagagacctgaggtctaggggacaatgggagcctggggcctcctgagccagccctcagggtaggacggtgggaaagttctgggaaggcttcctggccatcaaagttgaaatctgaatggtaacttggaggtggtggctgctccaccaggcctggaggtgagagggaggaatgtgaggggagggaaatggggctggaggagccagtgggagggactggggggtgagaggaggggtatgggaggagggaagcaacactgaaggagctgctgagcccaccaggccccgcacccatgcaggtcccgcaggccgtaaccctttccctaaccccagcccttacccggagggacgtggggggctgtggaagggctttgagcagggacctattcagttttggaaagtagaatgagaagcacatacagggcgaaggatgccaggggaggtccctcggaagctgccgccgtgggtgaacagatagctggtcatagctggaaggaatgttgttcgagaaagagactttgaaggactgaggatcgatgcagtatggcagtgaaggagagagaggagggagcagcgctggcctcaggaccctcagtctggcattaggcggtggagggagaaaacccatccatccctgactcttggagagttcagatccctgaacctgaatcccaaacctctgtgggggagggcacacagatggttgtataaagggaagccaccatgttttggttggacaccatttatccccagggccatccgcaagaggtctggaaactgcccccctgccgcctgccctggtttcaccctcagcaatggacttgaccttttggtttctagggggcccctgcaaattccttcttccatcactcagccctgagggggatccccctctctcagggattttaagaaccttttgccaaggctccattcccctgcctgactccaaagagggcctgaaaattgctgtcatcatgacggttcccatctcctgggtacccatttatgtgccaggcagtgagcttaacactttctgaagattatctgttgatacctcaaaacagtccttgtttttccagtgtgaaaactgaggcttggatgggtggggtcacttagccaggccacacagctgggcagagcagagacagcaagccctgccctgcgtccccaccctcgctataagctgtcactcctctgcctcccgctgagcttagcatacacaggcacaagcccagcatccaccttgcagcctcgggacaacaagctgcttgggacaacgatgtcttgtcctccaccagaaacaacccctaagtccccagcatctggcctctgaatctgacctctgaagggcattaagttagggaatggccagttccatcacatctttgaaaacagtaaggagctgggagcgggctcagatgaccacttctagccctgcgtcccagggagaattctgtcgatggtgctgtgcctctgagtatatcaggtgaccttgccttgcaaggcaaaaacataacactccccagcagggcctgagtgcatccctacagcgtgctaacagctatccctatgtgctgcccgtaggcttggaagttaggcagcctcttccaaagctggcttgctcatctggatcccaaagccctttgacctggtgactctatacctagtaatttctcttacgggaataattgcagagatgtgttgatttagcctcaggggtgttcgtcatattattgattatagtggtgaagaaaatcctcagcaaccaaaagtcccagcacttggggactggttaattggaagatgctgcatccgaaaagtgaaatattcttcagccagtaaaatggtgatgtaggtgaattgatcctgagaaaattccgggcaggactatgagagaatactgtctttgggtgataagttcttttaaaatgtattctttgtgattttccgttactcctaaatgttttacagtgagtaaggtgttatgttgtaactagagacagaaaagcttctacagacagtagaattaagagtggacagcagctcttatttgggtctatgagtgtagccatttagcaggggtgactgagggatttattctgaattcccgtccttgtatacacctcattcacagtattcccacgaacatcatggggtacatgagtatctctaaaaggcaagagaaagagaatggaaaggaggtgaccatttatgggatgtttcctgagtgctgggccctgttctaggagctgtcaagtttgcacctgtgccctgggggtgaccattattttctcactgaattcttgtaacttctctgcaattcagagagggaagccagagccctgaggccacacagcaggcttttccccaggtgcccactcattctgcaggaccacatggaccacaagtgctgtctcggctcagtgtggttccagagaacctgagaagaggctggctcccctgcctgggaagaagataaactgctgaggaacaatcagcccacctccgttaactaagcacctactgcgtgccaggcaggctccaagaggggaacagaaacattggagcatcccagtcttaaagggcacatctgatgagttgcagaatcctagagcctgcgtctgtgccgtgacctcccacgcccagttccccggtgcctagcatgtagtaggagctcagtaaatatctgttgtgtaatataaattatgtgtcacgttctgcctggtacaattgataagtcatccagggtatacagtggtggctcacgcctggaatcccagcactgcgggaggccgaggtgggcggatcacctgaggccaggagttcgtgaccagcctgggcaatgtggtgaaaccctgtctccactaaaaatacaaacaaattagccaggcatggtggtgtgtgcctgtaatcccagctactaaggaggctgaggcaagaaaatcacttgaacctgggaggcggaggttgcggtgagccaagattgcaccactgcactccagcctgggagacagggtgggactccatctagggaaaaaaaaaaaagtttagggaggagatatcaccatgggttgcaatagctttgtttaagaaggatggatagggaggtggaatgatacaaacaaggctgcagaggccaggagtgtgtgaggcttgtgtgggtatggtatgtagtaagccaaagagtgtgggatagagagtttgtttggagcaagggtaggggatgggatcagacaggaaatgtgggggctcactttcaaggggccttggatttctacgtgaggacaatagggaaccccggaaggtttttgagcaggagatgatatgaagcatattccagcagaatgtgcctcctgatctcaaatggaacagaacgtaaggagtaaagatgagccctgtttgtctttctgggccagtcttatgccctaacccccatctccaaattcctcatcaaaagacagtgactggggctgggcgtggtgcctcaccatgcaatgtaattgcaatgctttgagaggctgaggcaggaggatttcttgagcccaggagattaagaccagcctgggcaacatgacgagaccccatctctacaaaaaaatttttttaaatagctgggtgtggtagtgtatacctatactcccagctacttgggagtctcaggcaggaggattacttgagccccagaggccaaggctggagtgagctgtgattgcaccactgtactccagcctaggtgacagagtaagaccttgtctcaaaaaaaaaaaaaaaaaaaaaggtgactgagagcgtcattcaaagcttcaaagctcaggcagccaaggccgtctgagtcatcagtgtgccaacggcccatccaaggattggacttttggttttgtcttgagggcaccagcttctccccactcaacaaagcacaagcctaagtggcagccacttcagtggccacatcacagggaatgggcttttaatttgcgaagcagacaaatgagggaagacagcagttcagtcatttaatggggatttatggcctttccaccgtgtgccaggcttggccctgtggtcagttctgtgctaatcagcacccttgctccctgcgtgccctctctgagtgcccaggccgagggccgagaccagcaacagaccgggttgcaacagcccaagggattgatgttgcctgaagcgcagtggtttggacctgggggttgaattccacttcgctggctgtttactggctatttgatttggggcgtgtaatttcatgttttttgtttgagatggagtgtctctctgtcgcccaggctggagtggtgcaatcttggctcattgcaagctccgcctcccgagttcacgccgttctcctgcctcagcctcccaagtagctggaactataggcgcctgccaccacacccagctaattttttatatttttagtagagatgaggtttcaccatgttagccaggatggtctcgatctcctgacctcgtgatccgcccacctcggcctcccaaagtactgggattacaagagtgagccaccatgcccggccgtaatttcatgtttttaagcctcaattttatcatctgtaaaatggggatcgtaataagatccaccccatgggattgtcgagggactgtagttcaaccaggtgatctcatgtcaagagctcagcccaatgcctgtcccaagttcggtgctccatggatgttctgtctggtgatgcggttgggaaacacggtggtggtaggaacctgggcaagcgggtgcatggagcttcccccagccagatccatgagtctgagtaacactgaagatgagagaagtgtgcccaggctgtactgtgaggaggagagagggccattgaggtgggggccaggcgatgccctgcagggctccacatgccaggtagggtgaccacttcatcccagttggcccacttttagcactgaaagtcctgtatcctgtgatatcttggtaaaccaggacgattggtcacgctagtgcccagccaagatgtctggccccacttaggaaggcagcgggttgctgggatgggtttgagctgggggccatgcgatctgatttgtgtgtcagccgggacgggggttctgagtacatttcctggtagaaatctcacatctggcttgtctttgcaggaccagctgaagcagtgtttctcccggcagcccactgaacccaaggacactgacaccctcgtgcacgaagccggcagccagtatgggacgtggacagagcagtgccagagtggggagaggtaggacgcgtgcgacgggattctggctgcaaagggggcagctgggctggagttgctgcagcccacccacctcctgatttctatattgctaaaacctccagtctgtaattataaaaggaacccattcttcttttaaaaaggaaattaggaagtacaaaaaaataataataaagattatgggccgggtgcggtggctcacgtctgtaatcccagcactttgggaggctgaggcgggcggattgcctgagctcaggagttcgagaccagactgggaaacatggtggaaccccgtctctactaaaatacaaaaaattagctgggtgtggcagcgtacccctgtaatcccagctacttgggaggctgaggcaggagaatcaatcacttgaacctgggaggcggaggttgcagtgagccgggattgtgccactgcactccagcctgggggacagagcaagactccgtctcaaaaaaacaaacaaaaaaagattatgggtcagccacagtggctcacacctgtaatcccagcactttgggaagcccaggcgggcagatcacttgaggcctggagtttgagaccagcctggccaacatggcgaaaccccatctctactaaaaacgcaaaaaaaattagctgggtgtggtggtgggcacctgtgatgccagctgctcaggaggctgaagcacaagaatcacttgaacccgggaggtggaggctgcagtaagccaagattgcgccaatgcactcaatccagcctgggcgacagagagagacaccttgtctaaaaaaaaaaaataataataataatgatatatgaaatatccaagataggcaaataccatagagacagaaaacagatgaggcgctggggtggagagggaatggggagtggctgcttcgtgggtatctggtttccttttggggtgatggaaatttctaggatgacagtgatgatggctccacaacactgtgactgtcctgcatgtgaccaatggcaaattgtattttaccacagtgataaaaatgataaagtcaccaatattaaagttggcaggagggtgatagaattgaaaatggataagaaaaagtaaaaggaaagcaaaggttttttacagtgcccgagaaagctgtttttcccactgacccatgaaatatgtgtttagttatgagcttacttaaatttatctagaatacccctgcaagagcactggactgagagtctggaaacccaggtcttggttttgcacatgtcactgtgtgaccctaggagcccgttcctctctcggggtctccattccccagttctgactcaggacctgtgggacctggagtgtggacttaggtgcacccctgagggggtgctccctgctgtcctgcagagacaatgcaacttcccctcctcgggccaccccaggagcatggcacacccagccttggacagtggtgccacctgctgtctctcagtgctgttaccttcatcccgtgtggatttgcctcaatccaccttacaaccctaacatcctccatatgacaagtaataaaatcaccccagagctgacagaaagcacgatgaaatgccagcacacctgtggaaagttctgctcaagggagcagactggtggtcttgagagtaggcccacttgtcaggtgtgcccacctgtcctttctcaaggcgagggtttcccatgacctggaggctttgctaggctattggcttaggtgttctttttaatatgtggatggaggcagggcaggaggtttttaatgacttgaattatctgtaaattttctatcttacattattccaatgacccaagtgatacctgattatattatcataggaagagatttcagaagtaggagagagccaaggacatggacgctggagtcagactgcctgggctcaatcccagtcctgttgctggggacaagctaatttacatctctatgcctcagtttcctcacctttaacaaggtgaataagaatacttaagttcatgaggccaattatattagtctgttttcacactgctatacagaactacctgagactgggtaatttgtaaaggaaagaggtttaattgactcacagttctgcagggctggggaagcctcaggaaacttacaatcatggcggaaggtgaaggggaagcaaggcacgtcctacctggcagcaggagagagagaacgggaaggtgccacacacttttaaaccatcagatcttgtgagagctcactcactatcatgagaacagcaaggaggacatctgcccccattatccaatcacttccccccaccaggcccttcctccaattcgacatgagatttagttggggacacaaatccaaaccatgtcaccaaccctaacttgtaggattgtggcagttataggctaatcctcataggattattggagaggactgaatgacacattttttagcacaatgcttggcacatagtaagtgctcagtagatttttattaaatgactgaatgaataagtgaatgaaataatgcaggtcccaccacctgctcttccataggtaactgctgataacaatttgatctacatcagcactgcccagcagaaatacaacatgatgatttgatccttatgcaatatatacatgtattgaaacaccactctgtaccccggaaacgtgtaattactatgtatcgattataaataaaaaagaattataatgtaagctgcaaatgcaagacatatatgtaatttaaaatgtcctggtagctacaccaaaagaataaaaagaaataagtgaaattcaatttagggatgtattttatcagaaccaagggatccaaaatactatcatttccacatgtaattaacatgaaaagttattagcgaggcagtttacattctttttttctattcaaagtattggaaatccagtgtgtaaggtataggaaatccagtgtgtaagatgctcacggcatatctcagctctgtcacttgctccattgcaaggacccaacaaccacctgtgataagcagcttccgtccaggacagcgcagggccaaaggatcttgagtggcacaggactgactcctcccattctgcacctggccaggtgttccaggcagtgccttaaacagcacctcgctggcacatcttgtgctgtttccaaagagggtcttctgctgggatgttctgtctgttgttacttggcttataaaacataacccaagctatgctgcctgcagcatccttcacttgaaatcccgttctctgaaacgttctccataaccatgtctcccttcattcccttttttggcagcttggccactgagtccccagatagcagtgccacatcgacaaggaaacagccccccagcagccgtttgtcttctctgtcctcccaaacggagcccacctcggcaggggaccagtatgactgctccagggaccagcggagcaccagcgtggaccactccagcactgacctggaatccaccgatgggatggaggggccgcctccaccggacgcctgccctgaaaagagagtagatgacttctccttcattgatgtaagtcagtggccaggagcatttcttcttaaatggaaattccagcctctctctgtgaattgccacttcaggtgtaggatctgtgtgccagggacccttggagtgggtacggagggcactgtctttgaaatgggactcacttatgcatgtatcttggacctgccatacacctgctgtgtgtcttggggcaaatgtcttcacctctctgagcctcagcttccttatccacttgtaaccagcatcatcagctccacagcctcaaatacaattgcatgcattcaaattaaaactgatctaagcccttacctgctaggtaagcagggagtctgaccacttacccctgggaagtcaccctgaggtttatagttgcaagcatgaagaggctggagtttgctcagaatgattctgctgaacgttctcactaaggtcttgcttggtacaacagtgtccctggtatcaggggatccgactgtctctgtagtggctcttccaggacagaaagtcccctcaggcatgggcacctttcatggaggtcccaggggacagtccctagcactcagctctttcaggtcccaagcacagccaggatgtcagctgccccagcatagcaggtcaaacggtctcctgctctagcatcttccagaccagaacttatcctcctttcccctgggagccccacctccaggggtcaggcaggtcttccttttcaacccttgaaacccaggggtgatgtcattattctcctcgcgtaacaatagggctacctgcccactttctgggggatggaacatctgcaaaatgtgaaagggaccctctctcctggcagtaaagcctcccacctacatacttgggcatggctacccacatttccccagaggaggaacaccgctgctttagaaaaagggcttcctttagggcttcaaagaggattctccttcagtatatggccaaggtctctcgctggcacctctagatcagggcggagacaaagaaagacacaagttgagtcttgattggggaaccccattatataaccatggccatgcccacctccctgggtgtcatcaggatttagttaggtgatatattcagttattcactcaacagacatgtattgagatcttgctgtgtgccttacatgccagcatcatgtcactgcatcatgaactttcctgctagaacgctaagtggttccttcttgatgtccattataaacaacaatcagtgagtgttgaccactggcccaggcacatgttaataaccccagaggcaaaactgcctgcgctttttgcaaattagcaaatcagagtggccatggagtgactctaaatgctggtgtcccgaagcataggtctaacgcttactgaaattatactgcggtttatgtgtgatgcccaccacgatttgggtctcctgtggggatactgaggtttatgtatggtgccaaccatgatttaggtctcctgtggggacggtttggaggccaaatggggaggcggaggcggagcactaaggaatccagtctctgtaccaggctgaggatgcaagggtggcaccatcttcccctccaagccagcccctctgtcagtgtgattctgtcctgctctcttggagtctgaaaacctggctctgttaagtggccggagaagcaagcctgcctctaggtgcagcaggcactttctgatttccgtctttccccctctttcactggtcccgtgcaagtctcctcacaagataccactgtggctggtttgggaagtagctatgatcagctccttccaccaccccattgggacttttgttacttaccattgttgggaaatgattcattgaaattagcctgtcatcactgacttagaaggccttgggtgatggaatttctccaaagtggacctaggcggaagaaaccaacatttcatgtaagaacgtgagcttgccggaaagagctcttggctgtgagccgtggtcaggctctgtctgaaacaagggctttccacacctgagcacagggagttctctcagccactgtaggaaggaggcactctgtttatctcctttttataaatagggacacccaagctcagagaagtgaagctcattgcccaaggtcacataaccaggattcaaacccagcagggtttgaaccccagctctgagcacttcactgctgtctcccgggagaattctgagccaggcacttcccatctccttactggggcccacccagatggtctgtgctccccaccctttcactgggggggccctcaccaaccccccacctgtcgcagctcagagtgtgagtcttcagggatgcctgaaaatggactcctgatgtttagtaagctgccccctcccttcccacctgcaccctagattatgtgagtaatggaggaattccacggagaacgtctcaacccggggactctgtgtgaatacagttgacagaaggatttagttagatgttgaatccattattcattcaacaaacaaacattaattgagctcctgctgtgtactgatcattgctgtagattacatgcttgtgtggtggatgtcactgggagggaaaaggcatttgtattatgtgcctactgggtgccaggaagccaggcactgtactagggcactcaaggttcattgttccacctgacttttgtcatcagcctatggggtatgttttatggggaaatttaggctttgggtgttaggttactattaaaatgtggaagccctggcctaggtaccacctaaatagcctctcatctgtcaacgaagctgtgtaccgccaactgtgttgtggtaccctccattgatggttcccttgatttttttcctcttcctccctgctgctcccaaagcaaacctcagtcctcgactcaagtgccctcaagacccgggtgcagctcagcaagagaagccgccgccgggcccccatctcccactccctccggcgcagccgatttagtgagtccgagagcagatcacctttggaggatgagactgacaacacgtggatgttcaaagactcaacgggtatgccatgacttctctcctcctcagatagcacattgaacagcaggaaggatttagactaagccctatgaaaaaattcctgacttggaaggctgtagatcattagaacacaattacataggaaactgattttttttttcatgtcttaaacacacaggtgtttatttaattgttcatttaatttttaagttcactttactacatggatgagatgggtgcatattacagtaggcttgcactatgagagctgccaccatgagtaatatcccagccctcggttctgcttccctttctgagtcccacaaaagccacatgtgggcagccttgggttcccatcccagctggctgctccttctggggctgtcttggtggggagagggagatggggcagtgggtccgtgctgacccctgagccctgcaggggtcaggatcctcccgtggtccctggtgtggctctggaagacgctggcagtgcccggccaaggcctcccgcaggatggaagctgagggccctggctctgggtcctaagagaactcagccacccccttcacattttacagcaaggggtcgggcagcagctttgggatggggcttctgtggagaagtgggggatgctgcagtggtacaaagacagcctcccccaccgccgtcctccagctgaccatcctccaaggccagcactgggcattcaagggaaagaaggaactcagcccagagggtgtgggcaggagaggcctagagtcaggcctcgacccacagccccctctgggtgccaagtgggaagggtgtgggggctggcttgggaaccttacccactgcccttccaacacctggatctgtgggcagcggtcccacaaaatcccccttggggctccctgaggaggacttgtggctgccacttccaccagggcagaggacacaggaggggccagcactccaaagggctctagggtgggtctttcaaggacatctgcaaagccctggtggggaggggcggcggggctgtcccacggaggcgcctgggccagaggctctttggaactcttgcacttctgagtgggggactgtccatgctgcccacaacctctagaccatgcagcctgctcatgggtccctggcagagaatgcccactccccagcagactcagggcaggtccccaactgcaggcttccaggaaggcccagggtgtccacctcaggccgggtggtctcagaggacccctgtgcaaccacattaaggaaagctgcagcccccacccaccccctgccagttcaacaagctccggctgcacacgcaggctcccagacaccatcacccgcctcccccgttgcccctccctcatggggagccccttcctcctggaaagacagcaggtactgtagcctcgcctgctggccaggggcgccggctcagaggacctgccctgacctgcacgtgctgaccagacagcccagcgtaaggacccgcgatcccacgccaccgccctgggtttaccacggtcaccgccacctctctcacagggcccccgggggacccagccgcgcccggcctggtgtctgcaccgagggaccgcgtctcacgcccggcggctcctgcaggggaagccgtggtcagcgactcaccacgaggacagggcagggcggctgagtgcggaagagaagcatgaagctgggggcgggggtgggggaggaggaacaaaagttgcatctagacagaggtgaacgaaacaaaaccaaaacccgaacgtgttctctcgcaggatgggcgccgcccgtcccgggcccttagcccgacatctcctctcgctgctccttgttcctgcgcacctcggccgcgtgcagctcctcgcgcagccgctcgcgcagtgcggccaggtgcgcctcgcggatctccttgctgagctccatttgtagttgagcttctcctccgcctggcggctgaagttgttattctcctccagcgccttgtgcagcacctcccgctcgtgctcgcgcggctccaccagctgcttcagcacctgcgcctcctgcgttgggaagggaacggagccgcttcccctgcccaatgcgttggcctccagggtggcactcccaaaagtggaaactgatttcttgttatgcagaacttatcagaaactaggtaaaacagtgttttgaaggttagtatattaattgaggctctttgagttacaagagacagagacatagcttaataaggttttactatttctgcttttattttgattaaatccacccctgtattctctttaggtttgctcgctggtcttttttctgtattcctgagttgaaagatcagtccatatattatcaatcttttctgttttctaatgcatcatttaaggctatacattttcctctaaggactattttggctgcttaccgtatcaaaacctgagctgaatcttgaagaatggataataatgagttagggaaagttattccaggcagaagtatcaacaagatcaaagggacagagatgtggaaagaacattctgtgtgtgtggcaggagcatccctaaacagttacgtgttgctcaagctgggaatagcaggatatgctggaaaggtaggcaggggccagatcatggagatccctgatgctttgctaaggagttagatttcgtctgtagatggagagccatgaaagacttttaagaagaaacaggcagggcgtggtggctcacgcctgtaatcccaacactttgggaggccgaggtgggtggatcacgaggtcagaagattgagaccattctggccaacatggtgaaaccccgtctctactaaaaatacaaaaatagctgggcatgatggcacgtgcctgtaatcccagctacttaggaggctgaggcaggagaatcgattgaacccaggaggcggaggttgcagggagccgagatcgtgccactgcactccagcctagcaacaaagctagactctgtctcaaaaaaaaaaagaagaaaaaatttcttcttgcaatggaaactagagcagctgacctgcccactctatgtagacacagcctttttagtcctcaaaaacatcttgtaggtgcctttgttcatttgggatttgcccatagcaaacattaggatgtcagaccaggctctgagctgagtgaggggcattgcttctgaccagataccttaaagaaatgcttggagagttctctctcccactcctatcccatttctgttattaaaggaaatgtttaagtgcctcaggtgagacctctctgcactttcttggttttctgagccaagttctattaagccacctggagcaaatgaagaccataatagggacaaaagcacacaaatacccccagctggaacgtggcagcagcacctctggctcccatcagcctggaggagccggccaggggctggatggggaaggctgggtctgtgttttcttagcgtacctcagttcctcgggtagcccaagggctccagggcaccaggtcttgcctctttcatccccgccccctcctccaatcctcactgtgcccatgccagcatcctggtctcagagaagtagaaactcctcccatatcactcctggaagagtgggataggcagcccatcacccaaaagcttgagtgatcagctcagcctcaagcacgggtctggggttaagtcctggataggggagttggggtcaaggaaaatggcttcctggtccacctttgggccgcctttccacaagacacatgaagctctccacattctcctctgagagcataacctcggtgcattgttggctgaaagcattcctatctactttcctgcctctgccaaagatttccttctatttccctgacttggaatgagccaagggcccaggagatgggtttgcctctgtcctcccgcaaaagaaaacctactctgcctgttgtcagtatcttctggcaagaagcagagttgtgagaagagagagcatgaaagcaggcaccttggtggtcctcatctgtaaaatgggccatagcgtcttctatgcaggtctgatgtgagcattgcatgagatactgtgtgcaaattatctggcatgtaggacctcaatacatggcagctgctgatgaattcagtgcccttttctttgcaacagaggagaaatcacccaggaaggaagagtcggatgaggaggagacggcatccaaagctgagaggacccccgtcagccatcctcagaggatgcctgcgtttccaggcatggatccggcagtgctaaaggtaccagacctctcaccaagagtcacctggtgggcatgatcctcaaccttagcagcgtaaagaatagattccggctgggtgcagtggctcacgcctgtaatcccagcactttgggaggccgagtcgggcggatcacgaggtcaggagatcgagaccatcctggataacatggtgaaaccccgtctctactaaaaaatagaaaaaaattagccgggcgtggtggcgggcgcctgtagtcccagctacctgggaggctgaggcaggagaatggcttgaacctgggaggtggagcttgcagtgagccgagattgcgccacggcactccagcctgggcgacagagcgggactccatctcaaaaaaaaaaacaaaaaacaaacatattccttccttccgtccttccttcctttcttcctccctccctgtcttcctccttccttttgtcccttcttcctccctcccttcctacctctttctctttcctccctccctttctccttccttttctcttctttctttcctccctccctttctcttttcttccttccttccttttttgtccatccttttttatccttctttttttccttccttctccttccttcattccttccatttttgaaatagtttaagtttcaaacggagttgcaaaaataactcagggagtttctccatacccttcactcagcttcacccacatgatagtatttcacatgaccatagcacattggcaaaattaggaaattggcttctaccattaacaatactaccaacttacttggctttcaccagtggccctgtgttgcttaatctccactttctgactctcctccgcccccaaacctgctgctctggtgtcatagctaagccttggtttgcttatctgtaaagtgggctgagaatccaactggtgacgctcaccagtgctgaacatcagggaagcaggagtgaacaaacccaggctcctgaagcccttgaggaatccggtctgctgtggaaggcaggcacagaaaatgatcatttcagtaccagatgacacaggaagccagtgctggaaccaagtcccagtctcccaaattgcaccagaatgccaactgtattatgcaatgctgagggaaaggctgagctgcctccctcctccccacctccagctctcacaagtgtctctcatagtcctggaaccaaatggcacttaatttgggtgaggaaagaggcccttttgcccccctgtttcagacatcatgtgcttgcaaactcactttatgctccagcaaccttgcaaaaggtagctcttcgttccccttttattgaagaagaaatgaaggcagacaagcctgaattgttggtggaatttctcaactctgtgtatgccatgcaggccacacaatccccatgtgggagcgccgtgactctgttgctcctttagtagacggaagttttgcttttctgtcatttcttccacgaatagaaaatcagtcagtagtggatgcgtgcttgtgtctgtaattgattttacaggcccttacagtgtgaacatctttcagtcactagaactaggttagaggttttctgactttctttccctccctccctccctccctccctccctccctccctctcttccttccttcctttctctttctccttccttccttccttgttctctccttccttccttccttcttctttttttgttttttgagacagtctctctgtcacccaggctagagtgcagtggtgtgatccactgcaagctccgcctcccgggttcaagcgattctcctgcctcagcctcccgagtagctgggactacaggcgccggccaccatgcctggctaattttttgtatttttagtagaaacggggtttcaccatgttagtaaggatggcctcaatctcctgacctcctgatccgcctgcctcggcctcccaaagtgctgggattacaggcgtgagccaccgcatctggccttcctccctccctccctcccatccttccttccttccttccctcattttctttcttgccacaaagcaaatgatcttataaggtagcctaacgcaggaggcagacagccacaggccctgggtgtaggtgagatggaggccctggggctcccatgtggatgcaccgagtaactgctgaggcagatcttgggattccagaacacagctccagtccactgtgctctgtgaaaacggggctctggccattcattcatcagtgttagcttaaacttcaatctctaccacagcagtgctaggcgattattaacaaccaggggaggttgcagggcttgtcctggaaagaaccctggagttgggctgcgggcagacccggtgtgaatcccagttcataaaagctgtgtgacttcgggctagacctttgagctttgggctctctcgccctgtaaaatggggaaagccaggatctgccctaaaagaatcatacacacatggaacgaactcacatttgtcatatttcttgagcctggtagagcaaaagtgatgggtgatcagtgcacagaagctatcagtggacaatggtaatgactgctgttgctgggggctgacccaacacggcctgggagagagaagccacttgccaccactcacacctcaggtcccgcaagggaactttatgcacaccattgtattccattcccaacatgccctccaaaaatgggtggatatttgccctccggttttcttatgggactctaatagactgtcgaaaacttcattttatttacatggctccaggagtaaggaactgaacggagctaagctgcagctgttggatggagggagctgctctctccatgtagggttctcagggtggcatgccgtgtgctgagcacactacaaatggtggcttttcagcaaaagagaatgtgattatgtggggtttgggtggtgattcgatcttgggggtcgagggtggctgcttggaatgccagactgacatctgacttttctcagcccccatgtttcctgtctgggtttattccgattcagggggccccgagtgtttgcagaaggctcattgtacctgacatttgcatgggagggggcccttccccagacaaagggcagcttatagactcagctctcttttctccccaggctcagctgcacaagaggccagaggtggacagtcctggcgagacccccagctgggcaccccaacccaagagccccaagtcccccttccagcctggggtgctgggcagtcgcgtgctgccttccagcatggacaaggatgagaggtgaggggtcttggggaatgggggtccctctccttccaaactcaggctatacttctagagaggtgctcgcataggttttagagctgaatagaagagagttacaactttttaattttctctagcagcagaagctttgttcatgagaattctcaatactcagatacctaaaaagtacaacagaggccggggaaggaggccaggaatcaggccagctggcctctcctcttccccgcccactgccacctgctacatggaacgccagggcaccattgctggagaactactgatctagtttagccctctccagaccgatggggaaactgaggcattctccctcctcttcccctttggggaagtatctttattatcagagatctggaggacctgggaaggtggatcaaagggcacggccaggttgaatgagatcggtttcactcccttcgtggaacagctatcccgatcctgggctgttctgtgtagagacgagcacaaagcagcttctgccccccaagaggctctcaggctctcagaggggtgtttcagcagctggaggtggaggttaagaacaggggatctaaggtcacacagccagggtttaattccaccattgctgcttaagagctgcatgatgtgggaaaaggtacttgacctcctgaacctcagtttcctcaactgtaaagtgggttttctaacctcctaaccttccgaggtggtcatgaggatgaaacaagagtgtgtctaaagccctgtgcctgagccctgggatgtagaagtactcagtgaagcagagtggaaatcttatcatgagcactgttaatccatgaaagttagggattgttcctgatgctagagttgtaatgatagtaagtgctggttggatcagagcaagagtgggtaagctatggcccacaggctaaatccagcccacatcagtttttgtaagtaagctttattggaacacagccacatgcattcatttatgtattgtccataactgctttagtgctaccactgcagagttaagaagtagcacagatgtcccacagcccacagaatcaggaatattttactctctggccctttctctgacccctgtgatggagggaggcaggtgaagggctcataatgcacacttgaggatgggcggcagaaaagacttccagctgggtgcagtggctcacgtctatagtcccaggactttggaaggcagaggtgagaggatcacttgaggccaggggttggagtgcagtgagctatgattgcaccattgcactccagcctggactaaagaatgagaccttgtcacgaaaaataaaaaaagaaataaagaaaaaaaattagctggctgtggtggtacatgcctgtggtcccagctactccagaggtggaagtgggaggatcccttgagcccaggagatggaggccatgatcgtgccaccgcactccagtgtgggcaatgcagtaagtccctgcctctctaattaaaaaaaagaagcttccaagagaaggagatacttgaactgaatcatggtggacaattgggtcttagctggaccacgggcagtgagaggggatcccaggctaaagccactgcacatgcaaaggcctggaggccagatgtacctgggagcctcaggcagtgtaaaatacatagcgcagagtgggctgtgggaaccagaaggtgagacattagagaaagacagggccatagttgagacagtgcctccctgctctggtaatgccagaattctggctccagagtcagtggagggctccagcatttctctgtggctggagaaacccccagactagggcctcagaggcacctctggaggcctgggcttgtgtcaccactattaggcaaagcttggctgaagtctggagtaccctagacccccatctgcccagggggccctcttcttcctcattcctaggctggcaggcatagcagttgaaggcctgcccctagactccagagtcacctaatctctcaccccctcaggtgcagacccccactgtaccaccaacaggccagcatcttttccgacccctccagggccacgggtctcaggagctttctctgagaacagaatcagtcacgtcctgtgtgcatgtgtgtttgattataaaagcagtgactgtagaaaatacaaaaagaatacaaaggggaaaagaaaatcatccacgatcctactgtgcaaagaccatgactgttgatatctgggcatctctccttccattttctttttctttgtaatgtagctgagatcacgacgtttgcgtagtttgattcccctgctccatgttccatatgaatgttttcccgtgcccatttaacaatcttcataaacgtgattttttttttcttgaataaagttttaaacaatggtgactttattgttttttgttgtttttgagacagggtctcactctgtcacccaggctggaatgcaatggcatgattatagcctcgacctccccagtctcaggtgaatcctcccacctcagcctccatgagtggctggaaccatagttgtgtgccaccatgactggcaaatttttgtatttttttgtagagacaagatttcgccatgttgcccaggccggtctcgaattcctggatgatcctctgcctcccaaagtgctaggattacaggcatgagctaccgtgcctggcctgactttattgttttttattaaaatgttgtgttctcattataagaaattctgagaacacagaaaactgctaagaagaaggttaaaaaataaaagtcaaaagtagtaccatgtagatggtggctactcagatgtattcactttgagaaaattcattgagctgtgcacattttgatttgagtacctttctgtatgtgttcttccatttaaaaacgtttgaacaggctgggcatggtggctcacacctgtactcccagcactttgggaggctgaggtgggcggatcacaagatcaggagatcaagaccatcctggctaacgcagtgaaaccccatctctactaaaaatacaaaaaaattagccggatgtggtggcgggcgcctgtagtcccagctactcgggaggctgaggcaggagaatggcgtgaacccaggaggcagagcttgcagtaagccgagatggcgccactgcactccagcctgggcgacagagagagactccgtctcaaaacaaacaaacaaacaaacaaacagtttaaacaaatctcacctccccaaaacaattattgttgacctttgataaacaaaaggcagctctgtatgctgtatgtcttatgggcattgtattgttcagagttctccagagaaacagagccaatcgggtgtgtgtgtgtgtgtgtgtgtgtgtgtgtgtgtgtgtgtgtgtgtaaataatacagttgatccctgaacaaggcagagattaggggtactgacttcctacttagtcaaaaatctgcatgtagcttttgactttctaaaatttaactactaatagcctagtgttgaccagaagcctcactcataaccacatacgtatattttgtatgttatattttatatattcttacaataaagtaagctagaggaaagatgttattaagaaaatcataaggaagagaaaatatatttcctgttcattaagtggaagtggatcatcataaaggtcttcatccttcatccttattgttttcccattgagtaggctgagggggaggtggaagaggagggattggtcttgctgcctcaggggcggcagaggcagaagaaaatccaagtggacccacacagttcaaactgtgttgttcaagggtcagctgtatatacatgtacgtatatagatatgtatgcacatgtagacacacgtatgtatgtatagagattgattttaaggaattggctcatgtgattgtggaggcaggcaagtcccaaatctgcagagtagaccagcaggctggggatgtgaggaagtgtcgaagtccaaaaggcttccctcttcttcctgggaggccagtctttttctttttttttttttttttttgttttgtttttttgtttttttgttttgagacggattcttgctctgtcgcccaggctggagtgcagcagagccatctccactcactgcaacctccgcctcctgggttcacaccattctcctgcctccacaccattctcctgcctcagcctcctgagtagctgggactacaggcacccaccaccacacccggctaatttttttttatttttaatagagacagggtttcaccgtgttagccgggatggtcttgatctcctgacctcgtgatccgcccagctcggcctcccaaagtgcagggattacgggcgtgagccaccgtgcctggcgaggccagtctttttctattcaggccttcaactgagtagatgaggcccttttatatcacggagggtagtctgtgctactcagcgcctactgatttaaatgttaacctcatctaagaaaaaatatctttgcataaacatctagaatagtgtctgaccaaatatctgggtacacattaggtttaagttgatgcataaaactaaccatcacagacacttacctggatagagagatggaaggatgaatagctatttgcatgacaaatggatggatggaaataattttatataggacgaattttttgtttgtttgtttgctttttgtggagaatggggtctcactgtgttgcgtaggctggtctcaaactcctgggctcaagctatcctcctgcctctgcctccctaagtgttggagttacaggcatgagccactgtgtccaaccaagataaatttttataactgcagtttatctcatagaacagatatatcgtgatttatttcagcggtccccaacctttttggcaccatggaccagttttgtgaaagacaatttttccacagaccaggggtataggggggtggttttgtgatgattcaaacacattacattcattgtgtactttatttctattattattacattgtaattagaatgaaataattctacaactcacagtagactcagtgagaaccctgagcttgtttttctgcaactagatggttccatctgggggtgacgggagacagtgacagatcatcaggcattagattctcatgagaagctcgcaacctagatcccttgcatgcacagttcacaatagggttcacactcctatgagaatctaatgctgccgctgctctgacaggacgcagagatcaggtggaatgtgagtgatggagcagctgtgaatacagatgaagcttcgctcactcgcccaccactcaccacctgctgtgtggccttgttcctaacaggccatggaccagtatcggtctgtggcccagggggttggggacccctgatttatttaatattccccattgttggacactgtggttaatttctacttcttgcttatcagtcccgttaatatgggcatctttaccacctctgagtgcttgccccaaccccgcctgggcccagggatagacagtcggataccactcagtcctgcccgcaaggagcccacagtctggtttcaactagtctcttactggctttgtggtttcaggtcggatgaaccctctccccagtggctaaaggaattgaaatccaagaagaggcaaagtctttatgagaaccaagtttgaccaggtatgaaggggctctgttggggaacctgggaagagccctgcagtcacaggaatggggaactcaggggggccacgcttcagagactggggctgttgtacccaaggaaagaggctgtgtaaggggaagaatgaggggtggggggtgttctgagttcctgtaaagaggatggttatgtctgtttccatttagggagaaaacaaagctgggctgcctggagtgggtgaaaggtaccaggccaggaggcaggtgactggggctctggtctcatgcacttggctgacccttctagctgcatcacagtcccctctgataaaacaaaagggcggggacatcagaggttagcttaattagaaatggttacttttttttttttttttttttgagacagagtttcgcccttgtcaccaaggctggagtgcaatgatgcaatctcggatcttggctcattgcggcctctgcctcccgggttcaaacgattctcctgcctcagcctcctaagtagctggaattacaggtgcctgccaccatgcccagctgatttttatattttttgtagagatggagtttcaccatgttggacaggctggtctcgaactcctgacctcaggtgatccattcacctctggctcccaaagtgctgggattataggcgtgagccactgtgcccggccagaaatggttacagtttttatagggggagtgtttcatatacaacctatgtagttaaaaatgaatttgaaaaaatatacattaaaaattacgattagataggccctggtgtaagttgcaaatgactgaacatcatgaacttaagtttcctcatctgtaaaatgggttagcagtgtccacaccaccgagttgtcctcagggctcactgagaatgcacctgtggtgcttgactgagtgctgcctgtttctcctcagtataggagctcatggtacgtgcaccatcaaagtcagcgttgatgtgatgagcacaagagactcaccatcccttatccacaaagccaaattccagaaagccctgcaaaacaaagctttttcctaagtcagtggtaaaacctgacctgagtgaatataattctactttgactctattttccccactttatatgaatgttcataatacactgcaggaatattatctgcttgattatggtggtgttacatatgtatatatatacatatgtgtatatattacatgattatgtatgatgcatgtgtgtatgtataataaatactaaaaattataaattcccaaataaaactatgctcaagggatttggataagggatcgggacctgtgtttattttgtgtttggtgcagtacatgtaatatctcatttaagcctccagcaacccctttgaggaaactgaggctcagaattgagactggaaccctgacctgaccctaaatttcatgttggtttcactgtattccatgcctgccaccctcctcacctcccctttccacccaacacaaaaaatctcttttgtgaccttaggcttctaggggtgacttcattggagaatatcaggtgagattttaaggactgagggtagagagcaatggagccaaatgttcccactgctgacaccagtactgtcccttcctctccaggcagggaacactgccacatctacgtaacagaagccttaaccatcagaacccgcagacgaggccgagctgctgccgtttcttcctgcacaacgcttacgtgcctgggcccttcccattggattgagaacgctatccagtgcccctgtcctcgccaggctctccctggatccagacgggaagacccaacctccaggagcactcgctcatctccccagacagcacttcaggctgggaaaggagccaggctgcccagaaacgtccatgtgggtggttttgctttttatgtaaaaatttgcatttctacctattttagacaccttcatcagctccaagaacatcagtgtgaggctggaattgtctccccaggttctgaaaaacacctgcatttgtgaaagcacctcctcacccgaccccggggcaggtctttttttggaaggacatttccaaggaagatcaaactgttcattttctgctgtagtctcggtgcagggtattaccgctgggttgaggttttctattctttttttttggtgagttccttcttccccttgaggaatcagcagttccaatttttaaacatactctccctgattatgtgtatttctctttctagtggggctgtgtgcatcgttggcctatgttattgtatgtcatttttgtttgctttagaaggcgataaagcaataattcagctaattttctttgaaacttgataggtatatatgtgtttacgttaaaggacaggaggaaagatgtgcgaataatttgttctgaagtatccagtcacctcaggttatcttatccctatccaagctgtttagaagttataattgtcactcttgtatttatttccatggcttcttttcatttgagctctggtttcggtagggtgacctttgccccttggccttaagggttcataaactgcagcccaagtggtggtgcctttgcttatgaatcatcagacctgccctagtaatctttttctccagagtcttctttgaacatgacgtgggctgctggcatggaggagttgttccaaactggcctcagaacagatgcatgaatgaagggtactttttgcttttgctcacctcattttccttcatctttcttgatgaatccattatttgcaaatgctgtcaaaacatgctttccttctccctggccacctctcaggagttcatttgtctctctatctcagcttcctccctcatcttcctttacccctcttctctgtcttagtgggtggatgggcatggatagaaatcctctgtttctttaggttaggataaacacctgggccctggtgaggcagttgctgttcagcaccagggacagcaactgcagggctgtgaggccggagcccaccttgtgtcctgttcgatgagctttggttactgatgagcaattgccagatcatgtcacccacccagccttttacacctgggagcctcatgcatctgggtttgggagtttggccctgctgatgatagtttgttttctcttcattccctgaattagtcatcagttctccgtggccatttggggattcatgcctgcaactgcttcagtcgaattcttttttaaagatccagtttatgttttataataattttgatcttatggctttcaacgtcaataggatcccctttaaaaataccctgctagtgttttgttttgttttgtttttctgagacaaggtcttactctgttgctcaagctggagtggagtggcacgatcatagctcactaacacctgggctcaagtgattctcccacctcagcctcccaagtagctgggactacaggtgtatgctaccatgaccagctaatttttaaatatttttgtagagacaagggtcttaccatgttgcccaggctggtctcgaacttctgggctcaagcaattgtccctcctcagcctcccaaagtgctcggattacagacatgagccactgcacctggcctgaaacacattcctagtcttttgatcctgacttcttatctgggctgctgtctctctttccttcaggtggaaaggaccccttggtaccatctcaagcagtaggaaaggacctgctcttacatatattgatggtcctcatgcaaaactctcaattcttaattagtcatgtctcagctcaaggatatcagacaggaatgaaacacacttgaaaatgagattgacctggagattttttttccctaatctctcataccttaattggaaaaataatcaattaattctatgttaattaggatatacaaagttcaccctccttgaaagtgactagggcaagccctgaagatcttcctcacctccttttatttttctataaccttgtctcctccagcaccacagggaagacaatcacagtgggtcaagagcgaccctctttcacgtgggctctgccatgacctctgagacctgcttatgatcagtgcaatgaagttagaagtaactgatgattgggagcctttgcagatagctgggcaaatgggtgatttacttatccccattctaaatggagtgagctctctttgaggctaagcaaggaggcgttgtatgctagtttctagactttgcctggagacccctttggaaatctgtcttctttttaaactcacttaatatgccttaatcatctgtgtgtaatggagtcatccgctcctcaatctaaccctcctcccctggggctttggctgtcctcaatgagagtttcatgcagaatggaaaatcctctatatgtacaatctctctccccctcatttctcttcctcctcacctccaccacccctttgcacatcagcattttaacagctgatcttttgagaagcctgtatctttttcctcttcagtagatacccttcttcatggtcctttgcctaatcaaacagaggcctttggcctttgaaaatccatgacaaggcctcagaaatcagtgttgtggaggattactccatgccaccggagaaactctggtgaaagagaaacctcgtggtctttaggatgttgggattttgagtgaacctgacctgatagcctcaggattcagggaaaggacaatcagatggcggtgttttccagggggacgcgccaaatcatgtggtttcagacaattgtgtttgcctttgtgcctccctggaagggaggccaactaagggtatcaccaagaagccaaaagagaaataggcatgagcctgtggttttaaactttacaggctgggcaaaggatttagaaagacccttagcatgattttcctaaaagagaccttagctgctccaacctggtgctgatagctgctttgttgatctatgctttaaaatttttctttataatgcccccagatggctcctggaactagtcgtaattgcaaactgtaaaaatccctcctccccagtgtagatatttaaaccagagtaagtgatggggagacattctgtggtctctgaatgtgccttccccctcaccgtgtgttaaaacacaaaagccgaagttccatggcatcatgattccgaggggctggagggataggacccactccacatctaaaggggatctgctttgggctcggtcccattagcgagtgggggactcttgctgtgtgctaagaggctgctaggactcacccagttggaattctgggtgggctcaggaagtttagagccacgtaaaaagctggtaggcatgagtgtgccaggtctttgccagcctgcgtctccttttgcaccccccaatccagagtttgctttcttttgactaaattggctcctgcagggggaagggcagaaagctaggccctctgctctggaaagtcggcctgaggtttccggcaagttaacccttaaaatggacacccctcagcccgccctcccctttggccttcccagaatctccttcagtggttgctctcacacctgtgccataacatcatcttccatgacttggacgggcacttccttgacaattcctattggcatcacacgggctacaaattatgctgttttctaaagaatttgaacttttttttttttcttttcttgagacacggtcttgctctgttggccaggctggaatgcagtggcacaatcatagctcactccagcctccaactcctgggctcaagcaatcctctcatctccacctccagagtagcctagatgacaggcgcacatcaccacgcccagctgatcttttaaatctgttttgtagaaacaggatctcactatattgcccaagctggtcttaaacttggtctcaagtgattctactgcctcagcctcccaaagtgctgggattacaggcctgagccaccatgcccagctgaatttgagctttttaataatctcattccacatagccttatagatcctgtaaatagggggggtcacaaaagtaatatattgtgttatggaagataattttgtactgtgctgtttcctaaatcataccaatatcctaaagtcatgcacttcccagatgatcgtgatcctccaaatgctttgtaagatggggcagggcgtggaaatatatatatatacacacacacacagagacacacacacacacaagtatagtatatattttcctaacctttcttctgggtccttcctcagatctttgagtcacgatagaaaaggagctcgagttctttgtgtaggaaagttaagcttcctgcctgcggtgttcttgcaattgccttaggaattcacaagctctaggagttctgaacggaaggcagacgagaggcactttatccagtcccagaaagaatctctaaccgtgtgactgagaagtcatctagaaaaacttatatttttaatgtaaaaacaaatggggcttaccagacctcacagagtattggacgtctacaagtgcttttatattttgtaactgtaaagaagtttcatatgcacagaagagcagttggaaatctggtcgactgcaataaaacaagatgacctttgcatgtacaaagatgttgcattcagactatgaaaatagcaaataaagctttggtgcaagttgcattggagaagtcggtgcgtccatgtgtgaatgaatagagtctcccgtgcatgcaggccctgactggggctggctgagtcagtctgtcctgtgctgagctgtgggccagccagcgagagggcagagctggggtcctgggagagggtgtccatgcagaatgggaggccatggaaacaaggcaggatttccattcagactgacaaggggttgagtcctcctcctgccaccctctggctgtgggatttcttttaagcattggttctccttagctatacaatgggagtagtgatcaggacatttttgcaggtaacagtttaaggtggtggttctcagctgggtggattgtgccctccagagcatgtctggtaatgaaaggaggcattattggttatcacaagaaggagagaagatgctccaggaagtgagtagaggccagggatgctgctcagcatcctgcagtgcacaggacagctcccaccccgaccccaccacaaagaatgacccgaccccaaatggcagtagtgtcaaggttgaaaagtctagattggggagatgtggtacatcaaagtgctgagcgtgcagtaggtctgcaaggtcctcaaagatgtgatgggagggggagccacgccatccccacctctgccttcctccttctgtcccagctggtggcaactacatcccaactcagggggtccaaaccgactgctttctgtgaccttcagcaggaagtagccccttggcttgaactgtccagagtaggcaggatgctgggaataaaagtcaaaaataacagatactgtgcgcagtgctttgcttgcatgacctcccaaaatggcccaagtggagagaaggttctccatttatggtgaggagacagtagctctgagaccttcaggaactcgtccaaggtcacacacatctgcctgactcagagtccagctgtcatccacagcatctcaccaccatctccctctagggggtacagggtaactgtgtttttgtttgtttgtttgttttttgagacggagtcttgctctgttgcccaggctggagtgcagtggtgcgatctcagctcactgcaagctctgcctcctgggttcacaccattctcctgcctcagcctcccatgtagctgggactacaggcacccgccaccacacctggctaattttttgtgtttttagtagagacagggtttcaccgtgttagccaggatggtctcgagctcctgacttcgtgatccgcctgcctcggcctcccagagtgttgggattacaggcgtgagccaccgcgcccggcctgtaactgggttttatgctgacttgaggattttagccaaaaacaaataccaacaacaacaaaagaaaaccttgttaactcactcctttgctccaatataattttattcataaaataatcacttattagatattgattacaggcaaaattatactttgttagacacttaaaaaattcctggaagctgggtgcagtggcacgtgcctgtagttccggttattcaggacactgaggagaaaggattgcttgagcccaggagtttgagtccagcctgggcaatgtagcaacaacctatctctaaaaaataaaataaaaatacctggatctaccttttttctttggtcataaataagttgactgtgatggtcacttttatttctattgaggctaagatcccaggtcctggagcaggccagccccttctctctgctgtgtgattctgagtaaatgggttcacctctctgaactcagtttctccatgtataaagtggaatcagaattcctcccctaaggatggctggatgagaattccatacaatgcttgtgaagctggcacaatgccttgcgtgtagtaggtgttcaagaaatggtagctattattcgtgcgtgtcttctacatgaagaaagtcagtctgtgagttctgtgacggcatcctatggaaacggttgggtggatttgcgcccaagttggagagtatggttagcgtgatctgacttaaaacttaggccacatggcacatggaaactggagagtgtctggggtccctcactttaagaactagaatttttccaaaggttgcgtgtgactcaataggaaatggtgaccccaagaaaccaaagaaagggagttggtggttgtggggagacacgggagagctgcacaccgtgccccttgcctggcgctgctgggcttcccacaaagccagtgaggttcatctgtccccaggaagtcatcagagacggtggctgaggagacaggcactgggggcctccgtggacccgctattggagtgaagtggcctggatggaattgggtggacagggtgctgcctcagcaggctgggatgtgctgggctgtcagaaagtgctcataaatagcatgccccttgcgaagacaggcgagtctgcagacggccgtggctcctctgttcttcccgaggctacagcaacaggttcattctgggatgggttgggggtggggaggcaaaagccaccctggcaggcccggaccttttgtagtttctgtgggacgcgcatggctgaccgcctgcaaagaaaaacagcgcctcccttaagggtcaggtcccagtgagaggaccctgacagcccagctgggggtggaacgagggacccttgtctgcagtggccagggtccaagcccctggacatgtgcttagggcaggggaccttccaaaacagctcctctgagggaggggagtgggcacacatggtacctgccaagtcccccgagagtcccctgtgagctggaccaagccctgtttcctgctgaggctaggagagacagaaccgacagcccgcaggctgtgcatggttaggcccacatccagagtatgtgggctgtgcagctgtgcatgctggggtggccgtgctgggagccgtgggtgggtaacagttggatgtggggtgtagatgtaggtgccttgtttaccactgtggatgtctgaaatgggcagggatgtgtgtgtgtgaggagagagagagagagagagaaagaagctgtcctgtgagcccatgggtgaaatataactgatagtgaccatagaaacttttgcgagtgtgtgcacctatgtgtgtgtgctgacaaacagaacagtcctgtgtgtgtccatgggtgcaacaatgatgagaatccttccatgtgactgcggcaggggcctgtattgcgtgtcactgtccctgtagcaatgaagaactgtcggtgtctgggtcttgaagtggctggtacacagtcgtgttcaataaatgcttaaggaatgagtaaccgaacgcagggaaactgacctggagcaggtgtccaacgacctggtcttacaagccttttctctagaggtctgtctgtccacctcccgacatatggggtctcctgtccctcctggtcacccagcccagagcctggcactgtgtaggtgctcatggaatatttgttgaataaagtaaccagtgaacaaaagagttcctggagtacggaggtgggagagacccctgtagaggaaactccctgaagcccaccctttagccaggttctgggggtgggacatctgcagagagctctgagaaacctgggtttcggggagcatctggatcaggggaaaagggcacgggctttggagccaggcccgacccaggccacttcctcactgtgtgcttgaggaagtggcctcactttgctgagcctcagagttcccctctgtacaatggggctcctgatcccactgtctcagtccacgtggcccatggcaggtgctcaatggatgtttgctgaatgactgaatgtcgatcataagttacagccacgccccatgggcagcaaggctctgtagctcatcctggactccagtcacatcaacacctggcttctcccgggtggatccagtgaaccattttcttttggtttgaagccagaggtgttcctggggagatggcggaacagcacggagcacccgaacaggctgcagctggcaagagccatggagaccttgggggcagctacaaggtactgggcagggagggggtcagagggcccaggctactcctgggcctcagggtcatcttcccagccaagcagcacctctgcaggaaggaagagccatccttccaaccacccaggccaggacaaaacgctccgggtgggtcctctcactgccaccctcccgttagaaacttgcttcatgactttgctgcatcttccctcgtctgcaaaacagaaatggtcacccacatcctgcctgcaccaatggatcagagaggcccgggggtttctggaaacatggctctgagctctgactctcctgtctgacctcagcctggtgtcttgcccactctggggaaaagggcacagggtttggaggctctctgggcctcaacagccccatgtttgaaatgaggatggtgcccagatattgtgcccagagttggtgtaaaggctgaaagacatgagtgaagccagctagcagagggaggcacactagaaatctgagagaaggtttgaatgtgttggctctgccctttccaaaccatctccggggtctttttgggaaactattccagacagagtctaaggatgggtcgaatcccagtgcctcctcttaacttgctgtgcagcccgaggcaagtatcttaccctttctgagcttctttgatcccttctgtaaaatgacgagaacagatgttccctggggatcttctacaaagtcagtttgtgtttccaggtgggtgagagaggcaaaaccttggtctgcctttgcagcccttctcttcctaggcttggggcaggcagaggtcttccccgagactgcaaacaggtgttttcatttttttaagggggaaatttcctattaaggaaaatacagatttctgacctctcttgaaaaaattggaactgggacctcattccctcatcgccagaagcagcttcatttccccaccgacctctcgggttatttcagtccgctggactccccacctggctcctgctggacatcagagttgcaatcactagtttaattggtctcattgaagttcctgaaggcgtttccctccatgaccattagagggcagtgcaggcccacctcagtgccagctccaggctggagagatgcagaaagcagagggtacctccctctaatgcccaaaggaggggcagaggctggagctgggagcctagcagaggtgggatgtttaggactctgctcttctaggtgatcttgtacgaactagagaacttccaaggcaaacgctgcgag

SEQ ID NO: 1686 - DNA, 1414 bp, Homo sapiens
cgactggctggtcccctggccgtgagccggcttctgaatgatttatgccgccttgaacttgactccagcgtgacaggagtgagaagagccgctcccgctagaggaaagctggaaaccgtactgtgctcaccacataacctctgggtgctggaaatggagtattactactgccccagcctgctgaagctcttgcgctacctctgggaccagctgaagcagtgtttctcccggcagcccactgaacccaaggacactgacaccctcgtgcacgaagccggcagccagtatgggacgtggacagagcagtgccagagtggggagagcttggccactgagtccccagatagcagtgccacatcgacaaggaaacagccccccagcagccgtttgtcttctctgtcctcccaaacggagcccacctcggcaggggaccagtatgactgctccagggaccagcggagcaccagcgtggaccactccagcactgacctggaatccaccgatgggatggaggggccgcctccaccggacgcctgccctgaaaagagagtagatgacttctccttcattgatcaaacctcagtcctcgactcaagtgccctcaagacccgggtgcagctcagcaagagaagccgccgccgggcccccatctcccactccctccggcgcagccgatttagtgagtccgagagcagatcacctttggaggatgagactgacaacacgtggatgttcaaagactcaacggaggagaaatcacccaggaaggaagagtcggatgaggaggagacggcatccaaagctgagaggacccccgtcagccatcctcagaggatgcctgcgtttccaggcatggatccggcagtgctaaaggctcagctgcacaagaggccagaggtggacagtcctggcgagacccccagctgggcaccccaacccaagagccccaagtcccccttccagcctggggtgctgggcagtcgcgtgctgccttccagcatggacaaggatgagaggtcggatgaaccctctccccagtggctaaaggaattgaaatccaagaagaggcaaagtctttatgagaaccaagtttgaccaggcagggaacactgccacatctacgtaacagaagccttaaccatcagaacccgcagacgaggccgagctgctgccgtttcttcctgcacaacgcttacgtgcctgggcccttcccattggattgagaacgctatccagtgcccctgtcctcgccaggctctccctggatccagacgggaagacccaacctccaggagcactcgctcatctccccagacagcacttcaggctgggaaaggagccaggctgcccagaaacgtccatgtgggtggttttgctttttatgtaaaaatttgcatttctacctattttagac

SEQ ID NO: 1687 - protein, 313 aa, Homo sapiens
MEYYYCPSLLKLLRYLWDQLKQCFSRQPTEPKDTDTLVHEAGSQYGTWTEQCQSGESLATESPDSSATSTRKQPPSSRLSSLSSQTEPTSAGDQYDCSRDQRSTSVDHSSTDLESTDGMEGPPPPDACPEKRVDDFSFIDQTSVLDSSALKTRVQLSKRSRRRAPISHSLRRSRFSESESRSPLEDETDNTWMFKDSTEEKSPRKEESDEEETASKAERTPVSHPQRMPAFPGMDPAVLKAQLHKRPEVDSPGETPSWAPQPKSPKSPFQPGVLGSRVLPSSMDKDERSDEPSPQWLKELKSKKRQSLYENQV

SEQ ID NO: 1688 - DNA, 65722 bp, Mus musculus
  misc_feature (1)...(65722): n = A, C, G or T/U
ctgatgctggggtctccacctgagacagcctgggggctccccagccttaattcctgatctctgtcacaaggcttcagtctggctgggaacacggaaggaacacccataaggcgaggttaccatggatttttgagctcacatgcgtaacacctacttgtagcaagtgcctgcaggcagctgttgtatgaatgaatgaatgaatgaatgaatgaggaagggaaggaatgaatgagacagtttactaggtgcctggcccagtatggatagataattcaggctttggatctctgtcactgccaagctgagtgcccccacaggtggccattgcgggttgctacttacaacaccctgaagtcagactgggaaaggctttcagcccagtgattttggaattgcggagagtcgggagtccggacgccctcgagatactcaaacgcctttatttgcatataatttcatagaacctgagcacaccctcctgtggacttcaaatcgtgtcactagctgacttctaacggggatttgccctgtgggctgggaagaggggggcggggacgggaatcccttccttcctggagctggggaccgagataggaacaggaagtgactggcattgagagggatgcataggcagaagtcaggcggtgggagttccatgtcctctggctcctgcaggagagcgtgacacctgtgaaggggcggggtgtggggaggtggaggaagctggagccaacgtggaaacagcagcttggaacaagcctccttcttcctccaggtctgcttgtgactgtgggcggagcctctcaaaatattcccttgttcccccaccccactcccatcccccgttccggaactctccttttctacgtgtctcacccatagcaaagtaaaaacgtagaaactgccagcttttcctgccatggagtctccgcgcctgcccctcccttcctggagctctgtagaggcagatataggcgggttcttctccctgctttacagctggggaaactgaggcgtacaatagtagttttgtcttgtctttcagactgtggggcgtcaccacctccagggagccctctctgacctccctctcgggtcccttagagccaagtgcttgtacttcagagaacggttctcatgctgtcattgggttcttgggatctgaactcagaccctcaagctggctcagcaaacattttacctgtccagcccatctcctcagccctgggaggtgcctttgagtcaagcagaactatagtgcctcctgcctatcaccctgatagtccagtgaatgctaagtagcctttgggtcacccctccttcctcatactcctctgacaagggttattttttaagctaccctataaagccctcaggtgttcatcataacatcttcctctagaaggtaacaggcttggtgcccagagactccatacagtctcctggctccatcatgcacctacctaggctttggctaccctccgtgggtgccagctggggctggaggggccttagctgtgcccaggggagtttgcagacctcagatgagccattccttcagggacttctatgcaggcctgtgtagtgcatgcctccaataggggcatggggggcacctatgggccaagtccagtgtgtgtgtccactgttaaggcaagccgtttgttctaacacttttaaaggtaaaaatgaagagatcatgtgatctagactgtggtccttaagtctgcccctcaggtttcccaaataaaaactcaaaatgccctgttgaatttccgagaagacccccacacaatgctccgtacaatatctgatacgtgtttttactaacacgatccccctgtatctgaaatctgggtgggtcgggctattctgtgctaagtctggccattctccccacacccagaaagtttttgttctggccctttatgagaaacctctgctgactttggtctttgacgtacacgccccattgggaagcacaggtgactggcattagtggtggtgacagcctcagagtggtcaccatcacacatgaatgcctgctgtgaatgcaggggctcaggatccccaaaagtcattcagcaaactatgaagagccagagcaaggtgctgtgtgaggatggagcattctggaaggaatgtgacattgctctagaatggcggttctcaaccttcctaacgctgtgaccctttaacacagttcctcatgttgtgatgtctccccaaccatgaaattattttcgttgcttctgcataactgtaatcttgctactgttatgaatcataatgaaaatatctgataggtgacccccgagagggtcacaacctacaggttgaatacagctattctagatggttttagaaagaaggctggagaatcctttcaaggcaccacttacaactgggcagagtggcccagggccccaccttcaccatgggagctcaccttgtgaattacaggagatgatctgggcctagtggctcccaagggccccttcctgctctatctctgtgcctagaaggccctgttgatttggagcagttctatgcagccttgttggggaggcattctgcctgcagattctgaaattcttaacccggctctgtgggctggggcaaggggtcccatccaagtcaaagacttcaacataacctgggcgtccacttggaacctggcagagctccaggtgggttgtgggagagtgtggatacgtggtggtcatcaagcagggtggcaggaggcccaggaacagccctctggcttggagagacctgcttggcttcccagcctgccctggctctctggagatccagttctcctgtgctgtttaaatatttacagtgagggggcgggggaagggccgagctggtgtctgaatggaggcaggtgtggcagcctacgtggaggggcagggctgccagctgtgtccctgggcagtcttgagtggagactcacaggccattcacacaaggcctgtgagtgccccctgtgggtgagagtcagtaccatctcacctccatattcccttgtagatctctgtgtgccagctctcccagagagtgagacccagctgggcagctctacttcgtggggtttttttgttttgtttgtttgtttgctgttgtttttttttcctcctggttttagaaaaggtctccagagctgggcgtggtggtgcatgcctttaatcccagcatttgggaggcaaaggcaggtggatttctgagttcgaggccagcctggtctacaaagtgagttccaggacagccatggctatacagagaaaccctgtctcgaaccccctgcccccctaaaaaaaaaaaaagaaagaaaatgtctccgggctggagagatgactcaggggttaagagtgctggctgctcttccagaggtcctgagttcaattcccaacaaccacatgggggctcacaaccatctgtaatgggatccgatgccctcttctggttgtgtgtgaagacagatcactcataaacaaacaaataaatatttttttaaaagaaaaaagaaaagaaaaggtctctgcttttcaggccaggcttttctaggctgcctggtcttccttgccctttttgggtgcctgaatttcaggactgaatcactatgcccagcttaggatgggctcttagattctgcttttcttgtttgagacagggtctctctatagccctggctatcttggaactcaccctgtagaccaggctggccttgaaatcattgacctgccttcctctacctcctgcgtgccgggattaaaggtgttcgccactatgccaggatatgtatatttttttaacttctacttatttactgtgtgtggaagttggtcagcatttatgtatgtgcaccatacaaatgccaacagaggccagaggatcctctagaactgtaattatagacaatcgtgagtcactgttgggttctggcaggtgaagccaggtcctttaggaggtcagtagccctaaccactgagccatctctccagcccctccacctcccaccagttcttacgggtttccaaaggaacaagctccattgtgggggaacgcagccagataccagacacacagtggttgctggagaataaaagttgaccggttgccttgaacccctgtggcctcccaaaaggtccctgcagggcgtctctgacagcatcctctctgcacacctcgctctcctgactccaagccttggcctgtggtcccagccccatccctttccctgccacagatctatacccagatgagaatcccttcccacagagttcccagctccttaggtgttcagagctggaagcagagtgccaggtcttcagagagaactgagttcgaatcctgaccttgatcttttctggctgtatgaccattggggaagaaccttagctctcggaggcttgcatacacagttttcttatggtgctttcttatggagcgcaccagagatggccaatcagtcgttttatagtcattaaaaagtctttattccagacagctgagactacactctggcattcgggacccaagtgtagttagtatctggtgtttaaactaaggtggttttttgttgttgttgttgttgttttggttttttttgggatttttttattttttagtagaaaccatatcctggtgtttttctcagcagctgcactggggctgcacaagcaggcagtataacagaagtataagttagctggggcatcttggcctcaggtaaaattacagttgggtaattttccatgggtcttcccaaggagatcaaattctaatcaaatggccttggaaagaatacaagacagggggccctctgcactgtcttgcccagtcaccaggagtggtgatttaggcctgtaattctacaacttgcaggggtgccgggtgtggaggctaggaggaccatgagttcaagggcaccctcagctgcatagaaagtttgaggccagcctgggctacatgagacccttcctcaaaaataaagcacctattgtgtgctgtgggtggcctgtcagcctttcatccatgccctcgtggcagcagtgaggagtagtaggtcccacttcacagcaggctaccccgaagtgccagcagaacagaactagcaaggtccatgtgactctaggggtggcatctccatcaccccgtgtgctctagaccgaagcatggaaaattttgcaggccccaaggatcagaatgtcagcccatgcccccacccgaccctaacttaaatttgctgagctgacagagtctgaggccacacctgggaatgtgccagggtaagagggcttggctggcttccatccctcctgctcctggtctgtccagagagctcctcttctttacagtggcaaagccttatgcctcctgctgaagatggtgccctcctccacaggctttggtggccttctgtgggagggaaccttccaccctggtgtgtttcaccagacttttacatttccttttcgttgggcatggtggcgcacgcctttaatcccagcacttgggaggcagagagaggcggatttctgagttcgaggccagcctggtctacagagtgagttccaggacaaccaggactacacagagaaaccctgtcttgaaaaaatttttaaaaataaaaaaaaataataataaataaataaatttccttttctagcctcgggctgagccagtcatgaactcccgtgaaatcatccagctagacctggggccagcaaaggtgggagggtcttggctgcacccacccctcacccacccacgtgacatccccgggctccatactgtgtaacctcaggaaaggggctcaacttccctgagtttccgtcaacagacagcatgtgcgcctagtcagtgccagtaggaaacagatggtctcctctgccaaactgcttgcaggaagacaaggttaaaaagaggttgttgactagagaggaaaggagaccggggcacatcaggcaggtgtggggagagaaggaaccaggaatcaactccgtcctttatgatggtgtgtggggaggagggagaagaggacagaagggggcagctgtgtgggtacaagcctcagacaagggttctttcttcctgagggagcttggacaatgcccactctcatagcccctgcccctcttcccgctgaaaaaaagtggaacccctccccccannnnnnnnnnnnnnnnnnnngttcgggcacagatgagaactgcccaaattggtgaacactcctaacttaggtcatggaaagagaatgctaagggaaggggcaggagttgagctgagctgctgcactttcccgggcctctcctctggcccagatctttgaacccgaagcccccccaggatgacctgtctgtccccatccccacacttcactctccatgtgtccatgcaggagccgactgagagacagaggctcctcttcacgccccgctgtgatttcagggttttctggtccctgttgtttcctgtgactcttgcctgtggttgtcacactagctgcacagctcagcaggtccggtgggggttggttcagcaccaaggacaggggcgcgagcagagttggtcaggggaagtggtccctctgtgaatgcttcaggggagttgggaaggcccttcaaagatgcccaagggagataaaggtggcaaatgttacgccccacagatgtcagaggtgggcctactgggaaggactagggcctggaagaggaggccactgggtagctgagtggctctttggttcaaagatacagagaggaaaggtgttgctgatagcagatgctttcatttgcttggacttctgtaacggaataccatcagcagattgccatgcaaggcaggcaagcactgtcttgcagctctggagggatgaagtctaggcctttcctcttggcatctagatgcaattttctctcttgtatcttctctctggaccgtcctgtgtccctgtttccctcctcctatggagacactgctcatactagatcagggaccacttcataacctacttttaaaggttctcttttcaaatatgatcattttctcagtcagtaggaggcagtgtttttacaatatccactctggggggagaagggacacagcccagcacccagccaggggaagtgacttgtcacagccagagactttgaggtgcaagagaaatatcagggggatagagagatggcttagcggttaagagcactggctgctcttccagaggtcctgagttcaattgccagcaaccacatggggctcacaaccatctgtaatgggacgcagatatatatgcagtcaaagcacccatatacgtaaaataaataaaccttaaaaaaaaagaaatatcaggagagagaatggacatagataagatattctagaaattagggtcgggcatggctgagtgtttggtaacagaactcaccagggttggtctttgctccatccaagccctgagccctgagagaaagctgggggcctgccacatggcttgaggaggctcatggcttccttaagtgacacagagcagatgggacctgatgtctccacagagaacagccctggcagggacaggcagatggccgcctccaaagaccagggacattggcagcagagccttacctgcttaagacagagtagacacggcagggacccggagcacagcactggggggaggtgttcatccagttagcagagcccctcagctatcccaggctaggccacctgggcaggaaggctgggccaggactcagaagattattagcctgctagagcttcactcacacagactcagcaagctactatgtagccaccaactctagccccgcttgctttaacttctgatttatgtgctttttaaaacacattacttatcgtgtgcaagtgtgcatgcagcagtcaaagggcaactcgtgggcccagggatcaaactcagatggcctcacttggcagcaagtacctctacccactcaagccatcttgctggcccaattacttcgttgtatctctgcagataaatatccttagtattttcttccttcctgggcttatttcttcctattcgctaattcccagggtgtaaaggtaagctgttgtgtgagggtctcccttcttctgacaccatgcttttccactataatctccactcagctctatcctcccacatgtagtaggtctcagcatattgagtttggtcacacctcaagatgctttctgtcgtctcctgtagttcctatgaccgatgaactgcttcatttctgcacatttgtgggtccccaacccagctcctgacatcctgtttcattccactgtgctgctcataaaagatctggctgaaggcgtggctcacttgaggagtgcttgcctagcatgtgtgaggccctgggttcaaatcacagtcgcacctgtaaaacagggtgatctcgtgggccttgtggcagggttcatgttgagagaacacttctgggctgcgatagggggcggcagagccgggagctgttcagagggctggtgctgacgagggagggtgggctgcggctgacctgttaccttggagcacttagtgctgagtgactgagtgcaggtggtgctctgtcctgtctgagcctcctgggagcaagctgcaggaagaagcggaggcagcagggttcgggggcacccctgtcaggcagctagctgtgcggtgtgccgaaaaaaacgcagaatggcgaccctctgcgtggggatccaggatgtggctactctgggcccctgttagaggtcctgggatggatttctgggacaggcctttggatcaccttgtgtgacctcagtctcaaggtggggaaactgaggcccagagagacaggctttgttggaatcccacaatgcctctgggcagagtaggatgcaagcccagggaagtcagagagcattccagcccctgaggtaagtactgtttccaaggccagctgtcctttccctgagagaccttgtctgtctccctggagttattcagcatagtgcaccccaagccgggattccatctctgtccattccatctctccctccctggcaggtggattctcctgagcctctgtttcccaaagctcacccacaaacctgctggatcccacatggggacttgaacccggggcttcctggatcccatcattgactgtccccatgccacccactgaattcctgtatcttcagactcacacagtgtcttagtcagggtttctattcctgcacaagcgtcatgaccaagaagcaagttggggaggaaagggtttattcagcttacattttcatcactaaaggaagtcgagactggaactcaagcaggtcaggaagcagatgctgatgcagaggccatggagggatgttctttactggcttgcctcccctggcttgctcagcctgctctcttatagaacccaagactaccaccccagagatggtaccacccacaaggggcctttcccccttgatcactacttgagaaaatgccttacagttggatctcatggaggcatttcctcaactgaagctcctttctctatgataacttcagctgtgtcaagctgacacaaaactagccagtacacacagctactatgtgcccacaggacctttaccaagcacacagtaaggcaaaggacaggatgggggggtgtgtgacacttatattctggaggggagacagagacaggatgctgcaggaatcagagcacaggatctctgacggacaagggaagggaacaattctggcaatgctgtgcagggcattttgtgtgagttctggaagaggtgacagacctccatgcaaattaagcaaaatgggcagtgtgtgcctgttggccccagatctacttcagaccaagaggctgtagaaggaagaagggttgtccaaacaccccagacaaccttcagacactctggtgctgaactcacagtctccaggtgcagcaacccatccaatcagcccctcccactcccgtgtgcccctcaggtgaagcagatcatggaagaagccgttaccagaaagttcgtccacgaggacagcagccacatcatctccttctgtggtgagtggtgaccgccttggcagaggcagtggggggcagcttcctggctgggctgcagcagaggaggtgtacctgtgagccagctcttgcatcacaccgggctttgtgactctggagttatttcgggatcccgagggcattctgcaggaggaagtggatttggaaaaagcagaactgtgagggggctgacggtggggcggttgcttcttgtgtcccgcggagggcttgctttatcctgactcatcccgccggctgaggcacagccatctcctccctctgtgtctgccaggctgggtaaaggatggagagagaggggtctgagggctggaaatgcagctcaattggtagaacacttgcctcaaacactcagcattccagattccatccacagctaggcacagtggcgcatgcccgtctccctagcactccagtggtggaggcaggaggatcacaagttgaaggtcatcctccgccaatgtattggttcctggctacacgtggagcgtgcggggtagggtgggggcgaaacctcatcccttgtagtaggcagaccagggttcatgtcctcccttggccccatcccaccgagtgcacgtcctagtctgctttatactgtggtgataaacaccaaaagttacttgcgggagctatttcagcttggatcagggcagaaacccatgtagggcagaaactcacacagaacaggaaccttggaggcaggagctgatgcagaagtcatggaggggtgctgctttctggcttgctccccatggtttgctcagcctgctttcttatagaacccaggaccaccagcccagggatggctccacccacaatgggcggggccctgccccatcaatcactaatgaggaaatgccccacagggttccctgaagcctggtcttgtgcaggtgttttctcaattgaacttttctcctgtcagatgattctagttgtgtcaagttgacacaaaatgtagcttggacaatggtgacagatgagtgtagcgagggcgcgagtgagggtgatggtgataacggaggagatgatggtgatagtggaggtgatggtggagatgatggtgagggagatgatggtgacaacggagatgatggttatggtggagatgatggtgagtgagatggcaatcgtgacaatgacaacagctgccgatggtgacccataggtcactcagtgtgcacactcttacgagggaaggttaaagcaaaaagagagggagtgatggaccacagccacacggcaggctgatggctgacaggatgcacagagatgaccgaccttggtccccgtgcacgtgctcattaatcgccaacctctcgactcctttggcacacgggtatgggattctctgcactgtcggtgctggcgactgtgcacaagagacaagacggctaccgaccactgtgtccccgcagcggccgtggaggcctgcgtgctgcacgggctgcggcggagggcggccggcttcctgcgaagcaacaagatcgcggcgctcttcatgaaggtgggcaaaggcttccctccggccgaggagctgagccgcaaggtccaggaactggagcaactcattgagagcgcgtgagtgtgcgtggggcgcggctgggtcgagcctaaagggcgtgagtgtgcgtgggggcgcggctgggacgagcctggaaggcgtgagtgtgagtgggggggcggttggggcgagcctaaagggaaatgcttggtccccttagccaggcgaaagccacacctcnnnnnnnnnnnnnnnnnnnnnnnnnnnnnnnnnnnnnnnnnnnnnnnnnnnnnnnnnnnnncctgagtgtattctctcctaccaccggtcttaaaggcgaaaccagatccagggcctgcaagagaacgtgcggaagctgccgaagctgcctaacctgtccccgctggccatcaagcacctgtggatccgcaccgccctgttcgagagggtcctggacaaaatcgtccactacctggtggaaaacagcaggtgagagaccgacgcttgcactctgccgccacccgctggccattctgggaaccgcaccctcgagaataaactggtatgtgtcccccccacccccccaactcctttgaggtttgaaaggcttaaacaaaagctgtctgtatgtttgaccccgagctacctatcttgaaagcgggagaggattcgggtgctgaagagcaatgtgcaaacaggggcttcacatttaagtcaagatggaggagggatcttggaatccatccttctgcaatctcctctacttgatagctgtttgaaggcaggacagtcagtctccctctctgtgccttggtgatctctctggctaaagagcacggagtgctttacagagaagaagtagagatgaatctagcgggccacgacttgttgaaatacacaatgaggctaacccttccagagtaatttgatgtcagtgttttacagtatgagacttcccgaccagttctcatcctgataacccctcagcatcattgtaagctaccatgtgggttctaggaatcgaacccggggcctctatgagagcagtgggcacgcaactgtggagccctccctccagcctgatctaacgtttacatctctatgttgatatttatgtgtcagatgagttttcaaggaactggaaaatcactccaccgtatcgcttgccaacaagcgcattcccaaactttcagcatgaacattgtgatgatgacatcacacctctatcagggccaaatttcagggacttggggctggcatttgttttgacctgacagggtgggggagtctgtgagagcagcctttgggtctacaccacagctagacagcgttttcttgccttggtaacaagacagcgtcgcctgagagcctgagattcttttgctctcctaaaggcctcgcggctgtgtggcgagctggcgccggtgagttccaggccaggcatttttcatcaattgtctgagatacagttatttttgcagctgaggctctcagctgggctagcctagtccgccccgtgtgccctctggtgttcgccatgcaaacctgcatgtcctttcctcccaatagtaaatactacgagaaggaggcactcttgatggacccggtggacggacccatcctggcctctttgttgggtaagaggtcgggtgcggattgcatttggtcctttgttcttggggctcaggacctgtctcttctgaagtgtcttcttgctggactctggggcatcctcactgcctggagggaagtggagtgctctgagggagaccattctgaggcagttggggtgggggcactcttggggatgccaggttcccagccctgtatgctccacagtggggccatgtgccctggagtataccaagatgaagactgcagatcacttctggactgacccctcagccgacgagctggtccagagacaccggatccacagctcacatctgagacaggactcgcccaccaagcggccagcgctctgtgtgagatgggtgggcagtgtgatggtctctggtagggtctggacttggcttcggggcaggcagggaacagggtgggagtcctgactgtggtcactgcctcatacctccctctgtctctctgtctctgtctctctctgtctctcccccccacccttgtgctgataccagatccagaagaggcattccagtggcagcatggacgaccggccatctatctctgcccgggactatgtagaatctctgcaccagaactccagggccaccctgctctatggaaagaacaatgttctggttcagccagtgagttccgctgtgcctaggtcatgttcctagggtttgagtacaggttatgggggctgggtggtccatttattcatcaattcacccacctctttattaatgtacctatacacccgtctgtttactcatatattcaccaacaactccatctatacatcaattcatgtatcaatatagccatccgctcatccagccacctctgcgttgcttcattgtcccagcagtgtctgcatccaccaacccatgcattcacccatccattcatccacccatctacccacccatccacccacccacctacctatccatccacccacctacctatccatccatctacccatccacccacccacccatccatccactcacccatccacccacccatccacccattcatccatccatctacccacccacccatccatccatccatccatcatctatctacttacacatacatacacacatgcatacatacacacacacacacacacacacacacacacacacacacacacacacatctctataagggcacatggcagtatctctagctagctgccttgcccttcagctcttccattcccttcatccttgttgattttatttgtgtgtatagctattcactttctgtccacccacctggctgtccactttttttttttttgtctgttcctacatccccatccccaggccatctgcctggctatgtactcttgctgccgctcagcaaacatttacccagatgctctgtgtgacggaggtgtggtcttataaaggtgatcctcttccttgataacacctgtccagtactcgttgtgacgtgccttggactgcaatatgtagaaatggcaacgcagaagcccaaacaaggcacaggattgtgatttgctttcacaacagctgctcctgtgaatggttgccttctgtgccccagtggctggctgggcacaggtggagcgtgagacctgagcagtgcctgccctgagggaggctgtccttttctgtcttctgtcattgggtcacagtcagtgtggtgttgtggtgcagctggaaggaagaaggaagcagtcctagctctgtggtcacagccttaacagttgggtgatcacatgtcgttttgccctgtgggctgtcatatctgcatcccagggggtacaaggctctaatatcttagatttaggaagtaatgaacttaagatgtactcagttttcaagtgaccaactggaagcttcaaatgctaagaacaagggtagaggacttagcatgttcaaggttccatccacagcagagacagagagagggagggagggagggaggnnnnnnnnnnnnnnnnnnnngagagagagagagagagagagagagagagagagagagagagagagagaatgaatatgaatcatcaagacattgaaacaggaccatgccaggctctggcagcagaagtgagtggttgccctaaaccacatatggctcacaaaacccaaagtacttcctgtcagtcccttgacacaaaaagttcggtgacctctctgacccagaagttctgtgaagtacagactgttcactgtcatctccagcaatggtccaaaggcccacggagcatggtgtctctgctttccaaggggatctgggactgggtgacctggagagatgagtaatgggctgtcaccctgttctcgagtccaagtcacaatagctttgtctttcaaagctgaatcataagctcctctcgcgtgtcctccctgcaaaataacagccttgcccaagctcaatcgagggagtgattgacttagctcgtgtgcaatagggtcatcaacagccacttcacagctgagagatgccacgggtgaccagacatcctcaagtcaggaatggataaggctgcagctcaggcaggagtgggcagggtgtccttcccagaagagagacggggacattttcttgcctgcccagtgacctcagataatgggaagaggatgagaggttccatgcacagattctgggcagacagaggttcaggctgctggaagaatggtgggtggggcttggggagagggattctgggtaatatctacaggatggactgcaggtggtttctctgctcgctgggcttatgccaaaaacaacccaaccctttgattctgcttctgcatccttgaggcaggctcaggcctgtgtccaccagagcccagcaacatgaccaggcctgagatctcttctctctgcagagggatgacatggaggccgtgccagggtacctgtctctgcaccagacagcggatgtcatgaccttgaagtggacacccaatcagctgatgaacgggtctgtgggggatctggactacgagaagaggtaagagttgaacttcagttggatgtgccccaagaccttctactcatctaaacacggagatgctctcttcagagccagacaggcctgcctgttgtgtgaactggttgttatggtgacctggcccagcctccctgctgctgtagcttcagaaggaacaccagctttgggagcacctggagacagggggcagggcctcaggaataggcgtggtcagctgctcacattcataagtgtattctcaggggccagtgagatggctcagttcctcgaagcctgagttctattcccggggcccatctggtggaaggagagaacctgactccttcatattaccccttgacctccactcattcaacatgctgtgtacccaccatacacacacacacagctaaataaataaaaatgtaatttaaagaatttatgagctgggtagttgtggcgctaatcctttaatgcctttaatcccagcacttgggaggcagaagaaggcagatttccgagtttgaggctagcctggtctacagagtgagttccaggacagccagggctacacagagaaaccctgccttgaaaaagaaagaaagaaagagagagagagagagagagagagagagagagagagagagagagaaagaaaggaaggaaggagggaaaaaagaaaagaaaaagaaaaagaatttctaagtgggctcccaggcctatcaaagtgtaagggtagcaaatactgaacctgtaaatggcaactcagcaatccatgaggacacatcagactgagtaagaactagcccctccccctccccagtgacgccacttccatattccccccagcctgtttcccaagctgtacttaagagtgtaggagtagagcccttcacagaaggtgtcagaagtgggtcacagttgctagtgtaatgcctgcgttactctgggttctcccaagagcgggtaccacgaaaggactgatgaaagaaagactttgaggaaggacctgggggagatgagcgcaggcgcagaagggaaagcacggaaggtcacatgggaatagtatccatcagaccagctggggatgctgggttggacaggcctggaccacagccatgtgctcagtcctggctggcatcgtggtaccttggtaggactgtggtggctctgcacagggggtggggggctgtgtggtgctgctgagctccacttcctggttcagcatatctgcgtggttgcattcttggactgccacagaacctccattcccacatacccccttacatactgttcggagaggggagcaacttatttcaggatcgtggtgggtcctgagctagaaatatatactaagtcagtacttggagcgactgtgttgcaaggactgtgttctgagctaacagtgtgaggggctctgggtcgagtcttcaaatgaaatattctattaaatcctctgagaaacactacagtggagattgcgttaacatccccattttatagctggggatattagagtcctcattttatatacagggaaacagaggctcctccaatcacactattggcctatgtaaggtcagaacggggtgagaccgttctgacttctgcccacggctgcacagtggccgcgtgcctctgagctagtaccagtgtttatcttccaggtacaaaaaagccagggtcaagcaactggaccatttgtccagtgattgaaataatccaggggtgggagacctcaggctagacccagggacttgagtagccgttcctgaacccaccattgtctcttgcctctgctttcctgcctgcccagcctgtgctcagacaggcctcgcatagttctgaacgtccctgggcagcaaggagctcttcctgggctctggaagcataagcctatcatctctctttgagtcaccgtgccaatcctgaattggtcactgtgactggtcagtgatgattggctagcctgggtcaggtgatcatctcagagtgctgattggtcaccctgggtcaggcgctcacgctggacttctaggctagagacttggcagagttgagctccggtaacttcatagacagggagaaggggttttactcggaaagttgtggtggtaggatgaaagaggaggatggctgagcaggctcgggacacagatgctgggacaagtaggtcttggtgacctctggcttcccacagtctccctcacttccccttccagtgtctactgggactacgctgtgaccatccgcttagaggagatagtttacctgcactgccatcaacaaggtaggaaccatggggagagcaggtggctgagcgacctttgtgggacactgtccctgcttcccgccacaccccgatcattcattcaacattaggagacactcaggtgtacctcctcaagcaaactgcattatttctctgagtgtgccagctctgaatcactgcaaccattcagtcaccggtgtgtgtgtgtgtgtgtgcagggatggaggtgttgcacagatgtatatgaaataatgcagaatgttggctatagagaggggacctgaaaaccagatctttgtgactttgaaatcagtggtctgcagacctgagatcattaatcactatagttccttaaagtcggaagtatgtctagaataagtgtggaactcagtgctttaattccctttagtaaggcagaccttgcttggttccgatccaggcttggcagctgtgtgaccttagggatgatgtaaaacctctctgagccttggttctgtcccttgtaaaatagggaatgaacagccaagcctcacagggatgtcctgggtgttaaacagtaaggccgtacttttaacatccagtatagctggggggtggggggggggtgaaggcgtgtgtttgcagagcggggaccgcagcatgctttgtggtgacatcctgccgtcctctcttctctgatggtgctgatggtggcagtggacagcggcgggactgtcgtgctggtgagccaggatggaatccagaggccacccttccgcttccccaagggcgggcacctgctacagttcctctcctgtctggagaatgggctgcttccgcacgggcagctggacccgccgctttggtcacagcgaggaaaggtgaggggtcggctgggggctggggggggcggagctggaggaggctggaggatgccacccatggggtatcactgggctctactgtgacttgggggggggcgctctagcgctgcccactgagactctcagtgatgccaggcatggagataggtggcttcctgaggtctaccgttggatgtgctcctgcaggggaaggtatttcctaagttgcgcaagcgcagcccacaggggtcctccgagtccacgtcttcagacaaggaggacgacgaagccacggattacgtgttccgcatcatctaccctggcacgcagtctgaattcggtaagcagccctgggacctgagctcaccagctcctcctgagaactactccaaaagttacccttgggaggcaatgggcctaggttctgggaccaccaaaggacacccagaaacttaagtgtcctggtgccttccacctcccccaaaatgagagccagtagccacccccttattctgctagtaaggacaccaccgggcaggagggaacagtaactgtgacagtggcctgggctctaggaccctggcttgacatgggcaggtttctttttatcccccccccggccttctttttcctcatgggtgaaatgggctgtttctagggtcggctatgagcattctgcatacacagagcaggcttgtgctagctgccgtgcagtccctcttgtcagcacctcacttgagttatgaagagccaatgggagcacaggatatgtattcgaatatctaataaaaagccgggcatggctgcccaggcccataaccctagcactgggggtcagaaacgggcaaagcccctgtgttccctggctcatccacctagatgagcctttgatttagagagacttcaatagaagaaagcaccccgatcttgctctggcctctgcgtacaaccatacttctgtgtttagcactcatgggcacacatgggggcattcatgtgcacacgcgcacacgcacacgcgcacgcgcacgcacacacacacacacacacacacacacacacacacacacacacacgaagccaagcatggcatagtggcaggcacttgttacccaagtgctagggaatcagagtcaagcactagtcagtctgggtgtccctagccagccagtttacactgcgtgccaagttctgggccagtgagagactcattggtgcatggttgtccgtctcaaaagccaaactacatggtattggagaacaacacttgaggctgacctctgcccccacaaacatgtacacaaacatatacagacatccacatatctatgtgcacctgcacaaacacacatcacacatatacacaacacacacacacacatatacaactggaatgaaccaggtgtgatagacacctgtcatctaacattcacgacactgaggcaggaggattataagttggaggctaggtggggttgctaggtaagataagcctatgtcttaaagagaaacagtccccgctgctgctattaatgtcaccattctgagtctctgtcctgcaaaatgaggacaaactccttcttcacatgccaccaaggatgaatggtgaacctggtctagtgcctggcatagggtgggcactgtacaagtgccagtctttcctcctctgatcagcacgacattcgtggaagctgtgtggagcagggtggggtgagggttagaaccctggggaactggtttctctggtgacctcagtcccacccaccttagcaccccctcactgatgattctttttgttttctgtctcaagttgcccttgacctcatgggcagcccccggcctgtgtccattggccctgcctggatgatgcttgctgcgggccagtccatgctagtggtggccaaggggctccagtgggcacaaaccagagggtgcctcaccatccccacaaggagtgtgaaggagcagccccccagtaatgtctggttccccttccctgggagctgggtgacacctcagccatgttgccattggagtcttgttcccaagggagatggaggcaaatgagtagccctgtgccccagtacccaccccgctccgcagaaagcagccctgttcccaccccacagaaggcagccattaggttctgtgactcattggtgcatgattgcctgccctctacttccctgcgacaggcttagaaccagggtgttttctggccagctcattggtgagtctgtgagaggagggagcgtggaaccagtcactgtcagcaggttcaagagcctcattctgtagccagcacgctactgtctagtggatcgtggtgacccagtcagccactcagctctgatgacaagtgtctccctcccactcaggaatcagaagagcctatgagagagcagttgtcctaagaagtcatagcaggcgagaaaatgaccacctgtctaatgtcctagagtggggaccagcaaaccccagcccagaggccaaatccagcccctgcgagcttggcatggttttaaatccttgactggaaaacagcaaaaggaagctaggtcttggggccagcaagagggctcagcaagtagaggtgtctgctactgtgcctgtcagcccgagtccaatccttggaatctacacggtgcacagaaagaatctataacaagctgagttcatttgatggttttgtctgcaagacatcagtggtgctagacaggcacatggcttaggagctccccacctgagccagttgaaagcgatgtctagttcagaagtgtgaatagtgctgctatcatccctagccgagatcccaggcgctggaactcttcctgtgtgttgggatgagcgccctcccttctgaccacacaagctcttgtgggggtctttgtctcaacactcatgcccccagactttctctggaagtgtccaataggtcccccttccctaatgtcaccttcctgtgaacagaactgaatggggacatggcgaggtgaggttctctgcactcgggataggtctgtcttctcaactctgagctcccgcctcctcttcttccctcttccgctgtccttcccactctgccccgcagccagagcctctgaattttggtggtggctttcactggatcatgtggactcagggacgatgtcagattgtggttgggcactttgggactgtcacactccgatcctccctgtccccgggccagctttgggagagctgcttgctttggagtgagatttctataatacacatgggtttaaccaaggttatcgctgagccccctttccacccatcatccaccacagtgccccaggacctaatggatgtctctatgaacaaccttccacccctatggcaacccagtcctcggaagtcctcctgctcttcctgttcacaaagcggctcagctgacggcggctcaaccaatggctgtaaccatgagaggtaggcggggcttaggctcctccttcagggaggagcttgaagcacaaaccaaagtcctttggctgtctattgcttcatttttgcctcgtcctgagtttggagcggtgtgaatagcaaatggagctagggttaaatcatggctttatgtggtcctggtcactggagttcccttgcactctgtccggcaggataacgttctgctgcagtaacacacagtcctgaaacaacaatggcttttttatagcaaatgtcctgtgtgccgtgaagctgccatggacccacttcctaacagacgtccatcttggatgttgctgggccacagtatcagatgcaatggtatttctgcttttcaactcaatggtcccactcacagggaggctaagaaatacaggttcagcatgcaccaggagccagagatattatttaatgacagccatgtattctgtgtgctcatgcatgaaacattagcttagtagggctattacaaggaaatagcacgtggtaactgtggaccactgagaactttgcccagtgtctgctctcagagcatcgactttcatacctctgtcagtgaggagctcacctctttgcagagttgcaagcccgaggaatggcttcctatatgcaccttgggcaagcccgacattctaagggcaccttgggcaagcatcatatcctacgggcaaggaagagggagcgccactcccaggacttcagctatgctccccaggactttagccatgctcccttttcaggcttcctgggtttatccagtctccctggggtagcctcaggatagatacacggagtcttctattctgagccctataagagctcacagcccatctgtctccgtagccagcagtactgagcactgttctttgcttccactcccaacaagcacggagcagggaacatcatcagccctgagccccgcctaccgtgcagttcacgcggccaaacccaggggctactccttcaaactgtttcgaagggtaggggggagaatgaatgtgtgtgatggagaaagccagtgattcccagcatccaagagactgaggcaggagggctgtgggtcccaggctagcctgagctatataatgaataagaccctatcttaaaaaaaaaaaaaaaaaaagatgtgctcacatgattgagaggttcagggaacacagctttgagcctggctggatcccaacgctcagaacaggaacagccctcctgatctcccggtctgtgggccgggccagggcctttatggtgctgtgttcttgggctggccctccttggtggtggccaagacttccagcagccactactatgtatcctgctggcttaggggcaggaaaaaacgagcatgcttccaggtagatacaagcacagatcccaggactgattctcattggcccaggttgggtcacatgactgcttctctgccagccagccgtctcaggtgatcgtccagggtatccaagccatggagacacaacgctatgaatggctgatccccccaacagaaacctgggctgtgacagagaaggggcatgggggtggggtgggcacagtggcctccctctgtcctgacagttgacttcgatctactgtgtggagcgtggatggttcctttgtagaacatctaagctgtgtgtgtccctctgctcctcccttctcctgcagggccccactgaaactgctgtgtgataacatgaagtaccagatcctctccagagccttctatggatgtgagtgcacatcccccatcctgctgttgtctgcaagaagcatttatcaagtgcctcgcgccccaggcatgttcccagtgcccagggcaaagcggacgaaggtgctcgtggcaggcactcctttgaggggacaggactagcttggaaagcaagcagagtacttggtatctctcagacattcccttctccatccatcagggattctgcccacatccggctttagttgtttctataggaatgggagacaggcctagggtgagcccaggagtccttggttcctcctacttccctgtcccttccctgcccacagcacatctattaaatgtggtagcttccagcagaggagagtggtgtctgtccaaagacaaatcgtcccttaggtttagttgtcaggacacccagtgacagcatcctcaacttgggttcctcccctggaaaagggacaatgagaattttctgggttgagagttcctgaagatagaggtgggtagccctgtggagcttccaggagagacttagtgaagtgtggtgggcagaagatgaagcctgccttccctccctggccagggctcgcctactgcagacacctgtccaccgtgaggacccacctgtcagccctggtcaatcacatgatcgtgtctccagacctgccctgtgacgctgggcaagggttgacagccagcatctgggaaaaatacatccaggacagcacggtgagctgggtttgttcatcagagggcagaacggaggggtgccatcttgtcaggtcagactcatggggacccaggtaggtatgcctctctgaacatggcctgccaactccacagctgacttgagtcccatccagatgaaagggtgagggagtcagggaaaatgcataggtacagtatcccagtgccaaaaccaaaatccaaaatttctagaattgaaactctgacataaaaccccaatggaaaatcccacacttgacctcacgtgacaggtcacaaacatgctatgcactaaaaataccatatatagtgacctgtgggctgtgtgaataagtgtatgttaaatacatggacttagaacagacccatacttatatatatatatatatatatatatatatatatatatatatatatgcacacacacatacatacatacaaatattccaacttgcaagaaaatcttaagtctgaaacccttcagggcccaagcattggggacaaggctattcaactttgaagagaagagaagggacagctaagatggacatggtggcacatacctgtcattgcagtgttcacaaagctgaggcaaagggattgtgggtttgaggcgagcctaagacactttgtgagttccaggatagcctcagttacgtagcataatgttttgattaagtcactgattatgtgttggaccaagttcatacctactttgggatgcatgtaggctgtggccttggcacctgctctgaccctgtccatctgactcaggctacagtctgggcacctgccccagcgctgtcagtcaccctgcctgtacccttggttttgttgctgtatctatagctacaaaggtatgtggatttatatgcaacaaagtttctctcctgttgctgtatctatagcttcaaagctttgtggatttatatgcaacaaagtttctctcctgttgcagttataatccccctccccccaagcaatttaaaggtgtaagggcttattttagctcacagttagtcaaggtacaggagcatgggacagctggtcatctcatccactgctgtgaagaaagagggaagtggggcactggtggcacatgcctttagtcccagcacctgggaggcagaggcaggcagatttctgtgagttcaagtccagcctgttctacacagtgagttctgagacagccagagcgacaaagggagaccctgtctcaaaaacaaacaaacaaacaaacaaaaagacatagaagttatatatcatatacttcatcaggatttttaatcaatacatctacaaatacacagagatatttatgcctgtgtattattatatagatcttatatatttctgtgtttattatatatacacagagtttctaaacttatgtatcatgtctttggtctcttgtttatagctatagagtgataggaatatatttgtatccacctcatctatatttctttttaatttttattttaaaaacatttattttattttatttattttttggttttttgagacagggtttctctgtgtagccctggctgtcctggaactcactttgtagaccaggctggccttgaactcagaaatccgcctgcctctgcctcctgtgtgctgggattaaaggcgtgcgcctcctggcttcctttttgctctttttaaaaagaattcttttccggtagtgcagcggcagcactagcgcacgcccttctatacccctggcattttgatttttcgaatgagttcctagaagttgattgtagtgtaataaaacctgaaatagataagccagagtactctctctgcctcccacgggcacagcgtgagcctgctagttcatggggagctacaggcccaactggcttctaggctctgctccagatctgcatctctgggagaagagcccacgtctgtttctgaagtccccggagtgcttccgtgatccagtttgggagataccagtttaaggtcaaattgggtgaaacagtggatgagccagaattacttgatgaacactccctcccccgtctggtgtagtcctttcttaaggcttagctgccttcttgtgctgtacactgaatcccagaaactgtccccgctgccttgttgcctggaaacactgggtttatttctcactggtgagctgtgtcagtggcatccccttccacttcatggtcccttgagaagccggagagaacctaccaacttcctcctagtcccagacctgcaaatagtatccattacttctcacaccccactggccaaaaaaaaaaacggtcatgtgaccacacgtgaatgcaaaggagtctgggaaatgtagtcccgtggctccaggagtcctggaaatagcttttctatttttaatatcatctcctctcttgtcactccagcaaataattgtagctatggcatttacaagaaacaggacccaagatcataaacaaaacaggaaatgttaaaatttaacatagcattgtcttacagttcagggactggagagatggctcagtggttaagagcgcttgcttttcccaacacccacatcagacaattcaccgtagcatgcgactccagttccagggcatctcctaccatcatttggcctctgaagggatcaggcatacacatagtatcatatcaaataaatacacatacatacatatgttataatgcatatatgtaacacacgttatacatacatgtaacatacatacattatacatgcatacatacattatacatacatatatgcatacataggtctaagttttgtatctataaagtaaaaatatgtcaaatcaacaacttaaccttctatcataggaaccggaagtggtgcgtggggcagcatactgaacctgaagcagacagacaggaggaaagatagtgatcagaaaagaattagaacacacagagaatggagataagaaactcaaagctggctcttagggaaggccagcaaagctgggaaaccccttattagaagcacaggtgtgtagagggtacacaggtgaccagtcagaagccaatgaggggacaccactacagactccacaggcaaaggaatggattggacatgtgaacgccatagaaatgtatgtaccagcaaactgacaacagaactcacaaacccctagagactcacactaaaaaaggaattagaaacttcagaggagtcattttataactcataaattaaagccaaggaggctagagagatggctcagtggttaaaagcactggctgctctatcagaggacctgggttcaatgctggctcacagcctgctgtaactccagctccaggggcctcggctccctcttctggcctctgtgggcactgcaggcacatggtgcagaacactcgtgcacataaaataaaaaccaagggaaacagtggacatccaagtgactccagagagcgccctccccccaaccccttgaagaaaggaagtctttctgatgaggactttgcatttgtgccacagccaggttttctgatttctaaagactctgacattatctacctaagtggtcagagttcccatggcaacccaaggaaggctatactgtagctgcggcttcgcccggtggattttcttgaagcaacaaagctaagcccgaactagagaaagccctaagctaccctgctgtgccgaacactgggtgtcagaagaagcttctgaaaatgctcactttgaattcttttgctttagagtcattttcttcatgctgactagagatgagattgcatttgttaattaaatgggattgctagtacattaggcacagccttgggcacatgctccccccccaattatccccctctaatcctctccctccctcccttttctctcctcttcttcctctcccttcttcctcttctccctcttaactcacctattcttttttgttttgttgttgttgttgtttttacctcatcatgagataaggtctcatgtagcccaggctagcctcaaactctctgtgtagttagggatgaccttgacctgcgctgagtgcttgaattgcagcatggtccttcacacctgctatcctatatcatccctggtcacatctttatctttttccccacttcacactttgccccccccccaccaccaccacacacacacatcagtcctcacacctgagccggtcgcccttacaactccctgtgtggttccctaggaagtaatgtctctctctctctctctctctctctctctctctctctctctctcacacacacacacacacacacacatacacacacacacacacacacagatgtagttgggcgggttgggttgttagctcctcgtgtgatatcagagttaattacaggtccctgtagtatgttctctctctgttactgtaacaagttcccagacccagaagcttataaagaaaagatgtttatcatggctctcattgtggagatcagaaggccctgtggctgtggtccttcggcaacacaggacaaattggcaggaaaacatggcaaaagagcaaaacagaaaggcttactgtggggctgagccaccatcctccactgtgacctaaacctatgtgggcttctcctctgcagagccccaccagcttccaatagtaccaaactagggatcaagtcattaacacaagcattttgggggaatgttccagacacaaaagttatggctttgctcattcatgactcacaggccactctggcttcctgttgaccagaccttttgccctctgacccctcccccatagacctacccggagcaggagctgctgcgtctcatctactatggaggtgtccagcctgagatccgcagggcagtgtggcccttcctcctcggccactaccagtttgggatgacagagatggagaggaaagaggttagttacctgtaaggacaatgaaagttccagggtgctgtggagctgagaactagacagctgggtgctgtgaggctgggaactgtgcccttgggtactgtgtagccaggcaccatgcagctggtattatgaagatgggtactggacagctggacactgtgcagctgggtgctgtgcagctgtgcactatacagctgggctctgtgcacctgggtactggggagttgagcactgtatacctgggcactgtgtagctagctactgtgcacctgtgcactatgtacctgggtactgggcagctgtatactgtgcagctgggcactggggagctggatcctatgcacctggatactgggcagctgggccctgtgcacctgggtactgggcagctgagctctgggtacagtagagccctggttgcctgttacagtcttgttggtgagtgacacagtgaagaaacaggaacatggaggaaaaaagctatttggtggaaatacaacatgagagaattttcaaacaagccgacctcctgttttgaggtcatgtagactcccgtgccttgtaggaagcattgcagagacctgtgtgacctttactcagtttccctatggtgacctccaacagaactgtgatgtcctatgctgtcatagttcactgatgctggtacagcatcccaccccactcaggctcctccatcctcctgtgtgtgtgtgtatgtgtgtgtgtctccacatatgcatgctggtgtttgtgtacatgtatacacactggtatgtgtgtctgtgtgtatacaacggtgtgtatgtacttattttcttatgtatcaagacttgtgcattgctggtgccttaagaatcctcaccttggccaggtgttgttgtgtctggccagtagatcacaacctgggttctagcctggaaaggcattttggaaacctggaagagaagaggggctaggtggcgagagaaagaaatgtagctaagacaggcattctgatcaaagctcaattttactgttctgcacgcagatataaagcaggggaaggggcccgattcctgccaattaatcttggggtccaatagcagggtgaacagcaaagcggcaggttccagcagtgggcatggcagaacgattgaggctgcaagctccacccctgagcaagcaggtttcaggctgggggagggagactacaaggtgtgatggcacacaccttttatcccagcactctggaagcagaggcaggtggagctttgtgagttcatggccagcctagtccacaaagtgagtccaggacagccaggctgttacagaaagaaagtgtatctcgacaaaccataaaagaaacaaacaaaaagaatcctcactggtccctctgtagccacgcccacctccatcctgccatcatcccccgggttcctcctcccgtcttccatttccagaatcttctcacatctagaatgttgtataaacagagttctgtagtgtggaaactttgggtattgacttttaaattcagtacaatctctagatccatccaaattgttctactgctgcctgtttccttttagtgagttaacacttaccctgggcatacaccaaggttttgctgataggtagctgggcgatgctatgaacctttatttatttacccttttgggctgagaacagctaactacagctgacatccaatgcaggctttctgtgttgaggaaatgcctggtagtgagattaccgggtcatactggtggaggcaggttcagtcttgaagaaaacattctggtaatctgatattgccctcacctgatggatgggtgggtgggttggtgggtgaactggtgggtgagtgggtggggggataggtagcaggattttgcttatctggtaaagtatatgcctgacttggttcctgggaagatatagttacttatcaaaagaaacgaatgagaaaatggagtaaataaataataagcgaatgtggaaacggattgcataattaatagataaagaatgaggaaatagagaaagtatgcaaacaaactttgattgtgggagtgaatgaattactgaggagggagctgagggggaaggaaggtggaggcaaactagccttgctctgtagtattctgggcatggacatcatccagcaacgtcaagtgccattgacattaaatgcagacaggccagagcctagggtgttcagcaccgcctgtgcccttcacacgtgcccacaggtagacgaacagatccatgcctgctacgcacaaaccatgtcggagtggctgggctgtgaagctatcgtgagacagagggagcgggagtcccacgcggctgccctggccaagtgctcttcaggagccagcctggacagccaccttcaccggatgctgcaccgggactccaccatcagcaatgaggtaaaggacagctggcctgagggaaatgctgatgggaggggccagggtcttgggacagccgtaccttcagcttttgaggggaggaagagctttagaatcagatatagattcaagttgcacccagagaatcttgccagtgcctttcctctgggctctgctcttgcatctgtactgcgggcgtggtggaggtctggggatagccctgagaagacagcatgtatcaggtttcactgctgcatctgtcaagagaaggaatggaaccaggtttcctggattcccagcccagaaaccctttttgtgaccttctgtctttgcctgtctggttcctgtctatctcagtcatcccagagctgcagctcaggccgccagaacctccgactgcagagcgactccagcagcagcacacaggtgactttctgaggctcagctccccactcttgccccaccccatccgcaaagccacacccacccagaaagccccgcccaatccatgcaagccccaccctcccatctgcggtggtagggtttggatgtccatcatttatcagccgctttgcttgatgcattcagctttctatggctagtatcggaagtaaactaagtattgcaagcagttgctgtctccttggaacccataacagtggaatgaagcccctgtagacatcagcatcccgggatccaagtcccgggtaaaatgacaagggtgtgtacagaacactgcattcgccaggtcacctctaggccactcacaagcagtgcagtcagtgcaaacgacatggaaatagctatcaggctgtgccactaggaatgaagagcctggtctgcgcaggtgcagtggtttgtgggtattttcactcagcattggttgaatcttggactcagcacctctgaactcacaggctgaccaggagcctgctctcctataaaacagcaaaccgcacgcctgtactttgcttctgtctccttcatctccgtcctcccttgaaacagtactaagatcatcagtacgctgtgtggccttccagaaccttctggatgcctttacacacacacagaaatatataatgtcttagggtttcacttccgtgaagagacaccatgaccaaggcgactcttaacaaaggcagacatttaattgaggctggcttagtttcagctgttcagtccattatcatcatggcaggaagcatggcagcgtgcaggcagacatggtgctggaggagccaagagttctgcatcttggtctgaaggcagccaggaaagactctcttccgcaggcagccaggaggagggagggtctcttctgcactgggtagagcgagagcatgggagcctcaaagctcaccccacagtgacacacttccccaaacaagcccatacctattctaacaaggacacgcctcacaatagtgtcactccttgtggaccaagcattcaaacacatgaatctatggtgggggggggggcggcgggcaaccaattcaaaccactatatttggtagatcttaaaatcccacataaacactggcagacttattgttcaacaacttttgggcatcactctactgaaagcctcattaaacaaaaggaaaagcacaaagcaagctggagtgatggctcggtagtgaagggcacaagctgctcttgcagaggacccagatttagtttccagcacccacatgaggtgcctcacaactaggtctgaccccaagagatctggcgccctcttctggactgcaagggcacctgcattcatgacacacacacacatatacacacacacacaaacataaatgcataaataaagttcccagtatccacatgaggtgccttacaaccaagtgtaacccctgaagatgtgcaccctcttctggactacaagggcacctgcattcatgcagacacacacacacaaataaataaaaagcatacaaatgttcataaaataccttctgggtagtataatgtgtgtgtgtgtgtgtgtgtgtgtatacaccaagcctatgcacatgatgaggtcccagccctgctcatgaaagagcagaaatagattcagtgaagtaaaactgatggcagctacttagagaagcagtgtgaggccttgacctgatctttactgtgaccttgagggttgtggctgaaggacacagaaacacaagcaaatctaagtgttagaggtccgtacagtagaaagccactcccctcccccaaacttcatttccctagttgccctcctcagagccagctgtggccagctgaatcgctgatgcgacctcagcacttggaagattgacagccataaagaacacactgcctttgtactgactgcatgctattccgctacaggcagattccataccgaagtcactcctgttgttggatattactttgctgccatgagctatgttgccatgcgagtcctgactcgaatgtttgtgtgtacctttcctcaggtatttgagtctgtggatgaggtggagcagacagaggcagaaggcaggtcagaagaaaaacatcccaaaatccccaatgggaacccagccaacggcacttgctccccagactccggacacccttcctcccacaacttctcctctggtctctccgagcactctgagcccagtcttagcactgaagacagcgtcttggatgcccaacgcagccttccagctgtgtttcggcctggggacagcagcgtggaagatgggcagagcagcgaagccaccacatcccgggacgaggcccctcgggaggagctggccgtgcaagatagccttgagagtgacctccttgccaacgagagcttggaggagttcatgtctatccctggcagcctggacgtggccctgcctgagaaggatggcgcggtgatggacggctggcccggtgaggcggacaagcccagtcgggctgacagtgaggacaacctctcagaagagcctgagatggagagcctgttccctgccctggcttctctggctgtgacctcctctgccaataacgaggcatcccctgtgtcctccagtggagtcacctattctgtaagtcactaggagtcttaaaaaaatatatttatttatttatttattttatgtatatgaatgagtacactgtagctgtcttcagacacaccagcagaaggcgtcagatctcattacggatggttgtgagccaccatgttgccctctgccttcacagactttagcagaatagtctaatggagagctcagacagactcactttctttcttttctttctttcttttcttttaaggatttatttatttatttatttatttatttttatgcatgtgagtacattgtacctgtacagatggttgtgagccttcatgtcgttgttgggaattgaatttttaggacctctgcttgctccggtcaactctgcttgctctggcccaaagattcatttattattatacataagaacactgtagctgtcttcagatgcaccagaagagggcgtcagatctcattaccacgtgattgctgggaattgaactcaggacctctggaagagcagttggtgcttttacttgctgagccttcttgccagccccagactcactttgaccatgatgtatctatcagtcatcaactattacatccatgctgtgtggcaagcagttcccggaagtcagcggcttcacccctcaacacgatgccttatacatatacctcccagtgtgtgggtcagccaggaagctctgccccaagctgggtgtggctcagtttgataactgctgtccgggagaggtactggggggttggtctgtgtttcattctctggcaggctaacctggatgtgtgctcactgcaaaggcagatggtaagcagagagagctgatgtgcccgtgtgtatttgagacctctgctctgtctggctccctgacattacctcagccaacttgtggtagagtgggcagtgacagaggtcacagggcagaaggagtgtgaagagaaatactgagacacgagcccttcctgttactctgnnnnnnnnnnnnnnnnnnnnnnnnnnnnnnnnnnnnnnnnnnnnnnnnnnnnnnnnnnnnnnnnnnnnnnnnnnnnnnnnnnnnnnnnnnnnnnnnnnnnnnnnnnnnnnnnnnnnnnnnnnnnnnnnnnnnnnnnnnnnnnnnnnnnnnnnnnnnnnnnnnnnnnnnnnnnnnnnnnnnnnnnnnnnnnnnnnnnnnnnnnnnnnnnnnnnnnnnnnnnnnnnnnnnnnnnnnnnnnnnnnnnnnnnnnnnnnnnnnnnnnnnnnnnnnnnnnnnnnnnnnnnnnnnnnnnnnnnnnnnnnnnnnnnnnnnnnnnnnnnnnnnnnnnnnnnnnnnnnnnnnnnnnnnnnnnnnnnnnnnnnnnnnnnnnnnnnnnnnnnnnnnnnnnnnnnnnnnnnnnnnnnnnnnnnnnnnnnnnnnnnnnnnnnnnnnnnnnnnnnnnnnnnnnnnnnnnnnnnnnnnnnnnnnnnnnnnnnnnnnnnnnnnnnnnnnnnnnnnnccccccccccccgccccgcccccgtctgtctagtatgaatctttccttgcactgtcagaatacacacttgagtgatttccacaggctgcatttcccatcccatgtgacatcacacaggccacaggactggaaccctgcctactctgtgattcttctttttctgtgtctttggtatctattgggtgtgtggaccttttcgagcttatggaggggtacgtggggggtacgtgcgagcaccacgagacatgcttgggtgcagctgctcagaaaccatccttcttttgctgttgagacagcacctcccagtggcctgcagttcaccaattccagcaggctgtccagccctgcagcaatccccagtgatcttcctgtcccctcctcttcctcagctctagggcaagcatgtgcctccaggcctgactttctacatgagttctgggggtgctgaacttggacgcttgtcggacaaacacttcactgaccgagccatcccccagcagctgaagaatcttttaggaagattcctcatccacattcatcctgagtgacattccctcccttgttcctggcacatccctttgctgggtacagggccgcatgaccgccatgtttgctcagtacaattgtttccctggtatatgatggttcaagtcatgttttcaactccacaatagtaaagaatgtattcggtgggaagcaaccttttttttttttttaaagannnnnnnnnnnnnnnnnnnngtgagatggctcagtgggtaagagcactgactgctcttccagaggtcctgagttcaagtcccagcaaccacatggtggctcacaaccatctgtaatgggatccaatgccctcttctggtgtgtgtctgaagacagctacagtgaactcataaacaggagagaaaaaaagaataaataaatttgacatccagatcttcccctgcaccatatgtggtatgatttctccatgcagagaggggcaactcacacacacccgacccttgctaaagctcccacgggccacgctatcccaagggagcttctgaccctctgcgagacaccctgccctcagctgggatgctcacagtttaggtgcactccgcacgttttttaaaacttactttactgcaacttctgagtttcttcatagtaaccctatcacaaggtgaggagtaccccgcctttcaaagactctactctctttccaagtctgcccttggtattggggagcttgtctaacagctatccacttaaaggtgacttttctccctttcagcaagttttaagattctattctaggggctggggacagagctcagtcagtaaagtcttagaggcgaaggggtcgagattccatgcccaggctcctgtctctagtcttgatgtctttgatttatttcgtgctcattatacagcccaggctagccttaagttcactctataacccagcttcaaactgacagcaatcctcctgccgtagtctcctgagcactaaattgacagattagcatcctctttaaatgcattaagtgtatttgtgtaatattctgtctctgatacagatctgtgtgtgtgtgtgcgcgcactcgtgcacataagaatacatgtgtccacctgtaatcccagcattctgggcattgaggcaggaggattatgagttcaaggccagcctgggctacatcccgagaccagtctcaaaagagtactctttcatcatgcaaagtcagcctaacttatccaggaaacaaagaaagaacgaattgaaccccagagtgagcggttgggaggtgagggttagaaatggttcttgggggtcagcgtcctcatcttccttctcctcccacccacagccagaactactggacctgtacaccgtgaacctgcaccgcattgagaaagatgtgcagaggtgtgaccgcagctactggtacttcacagcagccaacctggagaagctgaggaacatcatgtgcaggtgactgtggctnnnnnnnnnnnnnnnnnnnnnnnnnnnnnnnnnnnnnnnnnnnnnnnnnnnnnnnnnnnnnnnnnnnnnnnnnnnnnnnnnnnnnnnnnnnnnnnnnnnnnnnnnnnnnnnnnnnnnnnnnnnnnnnnnnnnnnnnnnnnnnnnnnnnnnnnnnnnnnnnnnnnnnnnnnnnnnnnnnnnnnnnnnnnnnnnnnnnnnnnnnnnnnnnnnnnnnnnnnnnnnnnnnnnnnnnnnnnnnnnnnnnnnnnnnnnnnnnnnnnnnnnnnnnnnnnnnnnnnnnnnnnnnnnnnnnnnnnnnnnnnnnnnnnnnnnnnnnnnnnnnnnnnnnnnnnnnnnatggagtgccctggggaaggcatggatctacaggaagcccagctgaaactcccttggtatccctgttgctgataccacagcaacctggagttttctttcattcccagtaccaggaatgaactacaacaagtttaaagtcaaaggcggagagagaacaaaggcatgcatgttatggaaatgatttaaaccttgcctgcctctgttactgagtccccagataaaaaacacagcctttatatttttaataagccacaggcagcacaagagctgggcagccgcctaccctccattctgttagaatctactttctatcatcgatattcccgagttatcacttactgtgtttcatccaggctgctctcagctctcattggccagcccacaggaccatggttttcatggcatgcttccttgtgcttagttctattcttacatgatccagtagtccctgcctaaggaatggagccacccacagtagactggatcttcctatatcacttaatataaaatcaagacagttccacaccctcccctagacaaccccaccagccaactcgatgtagacaactctcttcccaatgtgacggtcagaactatcacactgactttgctcgtgccctttgcctctctctgcctccgtctcctcccccctgagaaatgtgttcttaatgagatgtacttcgcatgatcattctaaaagattcaaagattcgaggtgcatacagggttgagtgtattgtccaggcagtccccgtatttttcacgggaattgattcagatttccgacagaatcagtagagaaaataatccctagagtttgttttttgggttgtttttttgtttgtttgtttgtttgtttttttaagattcatttatatattaaacgtaagtacacacagtgtagctgtcttcagacataccaaaagagggcatcagatcccattacagatggttgtgagccaccatgtggttgctgggatttgaactcaggacctctggaagagcattcagcgctcttaactgctgagccttctctccagcttttgagattttttgagtcacttatttatgcaaagtgattgcctcctccatgtagccagagaaagaagaggagcttggaagagatgtgtggggctgggtggaggagttgaagacaccctgatcccatgatagcaccccagggtggtgggacacctgcagagtcctgtgctcagcaatgccccgttgggcaggttggccctgatggctacgccttggatgtgtggtgacactgagggtggacatcagactgaaggatggaggaccagatgggagaaagcatcaaggagagggcaggctgtgtggggatgcagagcatggcacactcatcgcgccccatttctcctgcagttacatctggcagcacatcgagatcggctatgtccagggcatgtgtgacctcctggccccgctgctggtcatcctggatgatggtgagtgtgtcctccctgacctgtaggaggggaagggtcagcctcaccttgtgtcaccatggactgggtcaggatagaggcatagcagacccacctggtggatacatcccaactccagcagcatgagacatccttgtgtcccaccttgcctggcgctgaggctcacttggctgagccactgcttgaccgggaatgagaacaaagtaaaactggtccagacagtgtctcaggatgaggtctaccaaacggatataaatccttcacaggctctttcttgaatgaagggagggagggagtctgggaggatggaaggggtggaaggaagaaggaaggaaaggaatgagaagagaaacaagataattggaatgttagcagctcacttggcgataccagccctcaccggcatctcacatttaccctgatgtctacgtcagacagaatcattccagggaaacgtcagactagtacctctcatgaatataaaagcaaaacgtctcaaaaaaaaaaaatcaacaaactcaatccaagaagatataaaatatgacactgcatggccaagcgggtcttatcccagaaacgcaagggtggttcaatatccaagcatcaatcagtataagctagcacttgactataaaagacaggcagggtgtggtggccatgcctgtgggcccagtgctccagaggtagaggcaggagaatcagaggttcaaagttatccttgaccaaggtgaatttgagtcaagcatgggctacatgaaatggtgtcccagacctttaaaagaagtaaacaaaggaggaacaattgaaaagaagttataattattgtgatggtttgtatatgctcggcccagggaatggcactattaggaggtatggccctgttggagtgggtgtggccttattggagtaactgtggctttgttagagtaggtgtgtcactgtgggtgtgggctttaagaccctcatcctagctgcctggaagccagtattctactagcagtcttcagatgaagatgtagaactctcagcccctcctgtaacatgcctgcctggacgctgccatgctcctgccttgatgataacagactgaacttttgaacctgtaaaccagtcccaattaaatgccatccttttaagagttgccttggttatggtgtctgttcacagcagtaaaaccctaagacaaatatcgatgcagtcccaggtgcagatgataagacttaaaagggaaaatccaaagaataagaaaacagaagtgaattcaccagggctgtagaacataagacccgtaagcagaaatctcatatgtctacacagctgagctgcgcaatcccaacatgagattaagaaagcaagtccatgtgtaatgtctcccaaagactgacacctttctaatgcccctaaagggcgtggttatctactgaacgctataaagcacggtcagacagaaacggaggaaaccgaaagagggagatatctcccaccacggccagaaggcttggtgttggtgaggagcattgtcctctctgctgcctacagattccagaaagccctgtcaaaatgtccagctgcagcagcagggtggctcagtgagtaaagggattgtcaccgagcctgaggacctgagtttggtccctgggactcacgtggtgaatggagagaagcagttgacacaagttgtacaaacccacacacacacatacacagagagagagagacagagagacagagataaagacagagagacaaagagagacagagaaacagagagagacagagacacagagagagttatgtcgccttcagctgagcctacacatagttgctgggttgcagctgagaatctgaacagaaacctttgcagttgatggtctgctgactgaccagagttcagactcgtttcaacgcaacgtattgctgctgctgtgactggaaacccacatgcaaaaaatggaagacccctgcctcatgccacacacaagggacacacatgaaatagttcccagaaagacctagaatggcagaaccctcagaggaaggatttcaggtgaacgctcgtggcattgcagggacagttgatgcctgtccgcagaggaaccaaaccagcatcgttgatgtgaaatcttctgaaaagcatttcctctcacacagcgtgagaaacctggttctcagggtgggcccaggatggcagccaaacttgttaaagcacaagagtgtcgcaggtggcactggttttgagggcataaagaagtcatggagcaatggagacgtggcaccttgagagactgtggtcagcgacatgtcaaggtgacaagagctgggggtgtggtggcaccagaggtgacaggctgccggcctgcaaagatgtcagctgctcagagtttctgtaatctctcctaacctctttcagcctgagttagatccagcacctgaaggagcttcccagtagcttcttccttcccaaagttactaagagaaacaagaaaaactaccactttctaataaggttttcacttgctgtctaatatgagtcaagcttctatactgtggaattctcagactcttcacagtctttctatttttcaaaaatgtttgagattttgtatttattttactgaatcagtgttcggcctgcgtacgtgtctgtgcactgcatgcctacagcggaggtcagagacaagggtgactgatcccttggaaccggagttacaaatggttgcgagtcaccatgtgagttccaggaatcaaacctgggtcctctggaagaacagccagccagtcttagccaccaagctgtttctccagcccctgctttctcgatctatgtcaaagggtattccaggcaacatttgccaaaggaatttgaccattccttataaactatcaaccaaagcccttgctaggttgacagtcacttttgaaattccgtgaatgggtagactttctgaaggaataagatggggaccaacaaagtagtatgggctttgcattacagccagtggggatctttaaaaggagtgtctgtgtctgaaggagccgttcctcccagtggctctaagatgagatccatgacccactaagggttggcgagcatctgaggaagtggcctctgctgggcccttcctgcccgcctccctctcacgtggctgtggaccctgctgtgggccttacactatctcttcaggagctccggtacctgaggccgtggcctggctaactcgttgtctggtgctgtccccagaggccctggccttcagttgcttcacggagctgatgaagaggatgaaccaaaacttcccccatggaggcgccatggatacgcacttcgccaacatgaggtctctgatccaggtaggacctggaggccttctgccctgacttcggggggagacaaggaggacaggcttcatattgagtcattttcaggctgagggtgtggcttagttctcggagtgcttgcacatacaggggcctggttaatcgcgtgtagccgatagcacgacacattgtgaccattttcagacatccgtgggcttgtttgacccccttcttctgcatttgcctccctcctgtccctgattggagacccccatttttaccatcccccctcagatcagctataccccactattcccctctctgttcccctttaccatcttgttctgcagtgactgaggctgtgggctcacatctgaagctctggagctaggagagtcagctgagaaagagagcacaccatgtctgtctgtctgtctgagtctgggtttacctcactcaatatgatcttccctggttccatcccttgatcgtcaaagctcacaatttcattgttctgtcaagctgaacagcatctcgtagtagctatgtgctgcatttccattatccatgtgtcagttgtgtccacgtcctagctgctgtgaactagagtagcaggggacacggctggatagatttctgtacagtcggtcaggccttgagtccttcaggcaaagccaaggcgtggcgcagctgggtcatgagtcagatgtagttttagtcgtttgagagttctccccactgatcttcacagttggtaggtttgctatacattccacagacaccatgtcccccctccaactctggctggttgttctgttgaccttacccatgctgaccgcggtaagatgaaataccagtcagtgttctttcagtctgcgtttccctcagctgccaatcagagtccacaagaggcagcctggcggccaggctgggctctgtgggagaatccacagagactggagctctaggtgctgtagcgaccaggcactcaaggacaaggcagctctcactgctgctttgataggatccccaccaaaaaataaatcaaacaaatattctggatacaaaaggtagaagaatcagggcctgtgaagtggatcagcataaaagtgactgctaccaagatcaacagcctcagcatgagcacttgagtccacaaaggatgagggaagaattgacatggtcttctggtacacacacacagatacacatgcataccacannnnnnnnnnnnnnnnnnnntacaccgtacaccacacacacataccacacacctcacacacacacacatactacacagcataagcacacatataccacatacacatgtacacacaccacaaacacatacacacatactcacacatcacagatacatacacacaacacatatacaaatatacaccaaagacagagaaagcagacagaaagacaggcagacagacagacacagagatagaaacagagacagggagaactagggatgtgacctagcacaagataaaggactagagttctgatccccgggacttgtgaaagccaagcatggcagtgtgtgtgcctttgtaagcccactgctggggaagcagaggtggcagttttgactctgtattcccagcagccatgctctacagttctgttttctctgaatcctcgccaatacttgtcactttggcttccaccatcccagtgggtgcaaggttgtctcttggtctctgacctgctgcccctaaccttgggcgggccctaggctggatgatgtaaatcctctctggatgctcactgttaactgcacctggctgctgagagccgacaggcgcacagggtgggtgtgcagcaccacggatcccgctgtcccctctggggctgacagaccctccctccctccaacagatcctggactccgagctcttcgagctgatgcatcagaacggcgattacacccacttctacttttgctaccgctggttcctgctggatttcaaacgaggtagactccgccctgtccccagaatccttgtcgtggaatttcttgggcgaggaggaggaggggaagctgacagtacccctgagggaaggacatttgtccatcttggcacaagtcttatcaaaaagtgactgtgcagtaggggccatggactccctactcaggggaatgggggacagattggtcattcaagtgctactgcataagcaggaggactagagtttgaatccccagcacccacataaaaaaggccagatgtggcagccagtgagacagtaagggcgctggccatcaggccggacagcccggagtttgatacttggaaaccacttggttaaaagagagaaccgactnnnnnnnnnnnnnnnnnnnnnnnnnnnnnnnnnnnnnnnnnnnnnnnnnnnnnnnnnnnnnnnnnnnnnnnnnnnnnnnnnnnnnnnnnnnnnnnnnnnnnnnnnnnnnnnnnnnnnnnnnnnnnnnnnnnnnnnnnnnnnnnnnnnnnnnnnnnnnnnnnnnntctacattggtgagctctgggctcagtgggggactttgtctcttaaggtggagctcagcagagaataatgacattagcaccaggcctccacaaagaatgcgcacacttacacacacacacacacacacacacacacaggttcctgttcacaggtgaggaaactaagaagtccaataggaagtcacaaagtggagagccaggatccaagcctgggtgcatccatctctgggggcaagtccctcccatctgcctcgctgcttagcacagacccaaaactcttcaagcacatttcaccctggaccaggatgtcgcctctgaatgtatgccattatgctaacctaggatggtttcaggaatacctggtgtgtgtggtggtgttaaccacctgccctacactgtgcagccccatctctggtcccttactgcaaccagcaggtcccatgcaaagctgaggtgcagagaggcctgagggcgaccaccttagcccacagcccctggctggggagtgaaaggttgcgacccaaagccaacttactggacctggtagccttgctcttaagagaatggttctctatctgtggttctcgatctctttgggggtgtcaaacagccatttcacgggggttgcaaaagaccatctgaaaatatatatttctgatggtcttgggaactgaagaagcaatatcatcattggcactaatactggctttttacgaatactgttgcaaaatgtagcaatgtagcttactgttgttatagtaacactgttacctatgctacaccggtgcttcaagataaagtttcacatttgtaattacaaagagatatttcacaatatataatcacatatttttgtgaatgatcactgtgctttagttacgttcaatttgcaacagtgaaaatacaccctgcatatcagatattttacattgcaatttgtaacagttgcaaaattccagttacgaagtagcaatggaagtaattttatggtgggggggggtcaccacaacatgaactatattaaagggacacagcatttaggaaggttgagaacaaccacctttctgaagggagctaatatctccttgctaggctgaggtggcagccggcttgcttatatgtacaggccactgagagccatccatgaatgcccctggagatggaaggaggacagtaacagagaacagggcagggacaggcccatgccaatcaaacccacacatgctcagactgttctgcctctgatgacccaggccacagatggggagccttagggtccgggcctcctcagtctgggttctgcctggtctgggacagtcagctagggaagtgggatgcttgcagggaggactagggaggacaggccctacactctgtcctggaccagctcctatgtgtgtgcatgtgtgtcggtgtcccacagagctggtctatgatgacgtcttctccgtgtgggaaactatctgggctgctaagcacgtgtcctccgcccactacgtgctgttcatcgcgctggcgctggtggaggtctacagagacatcatcctggagaacaatatggacttcactgacattatcaagttcttcaacggtaccaagggggcatgggcagggtggggctccctaggggcagggctcccaatgctagagcttggtagatcccagtcattcttctgcctccaccctgccgccttcacagtgctggatcatagcttacttgggcatgcacatgacacttgggtgttgagacctgaatccatgttctctgcttgcccagcgagggcccttacccatcaagcatctccccagtgccccccccttggcattctatcaagggacctggtgaatcttaacacaccccaggtatatttttctctaggctgaggctctggggcagttcctggctccaccactggccagctgtgcccattggcaaggggctgccctatctctgagcatctactttgtcatctgtgaaataccaccagtcaaccccactgagttcatgagtagaaaaaacctggcacagagatgctctcggagagggtcgtccactggccttgtttaaatggcatccttgggtctcagttcttcagggatacaatgttgcaaacaccttctccctcaagggaagtctggagaattaatgatgagctatgaaaaagccctttacaggtagttgtgcccacaagaggcccagtaaacacaaggtaattgctcttgttattgccacttgagctctaactaaatgctaaaacccagggctgggtagccactccatcacagagcactagcaagcactaggctctgggcttcacagggaaacttaaagactaaagaaagttctagataaagaagagacccacctgtggccaaccttggaaacattgctagattcctttcaagtcatctttttcttttgggataattttggattttggccatctactacaatttttatatttaagactgttttttggtttactaggaaggttaccaaactgtggtgcctgtctcctagctcccttcctttctgttgccacctgacttgtttctggaatgtttgatgttaaaactcagaaatcaactttggcgggccgtgagtttcacctgcaccagaaatgaaccaggaagccacacggaactcagtgcagtccttaaacactacataaacactccttgagctgatgtgagtcagttgctagaatacttgcccagcatctgtgcagcctggcacagtcacacccatgtaaacggggtgtggcagcacacagctgcagtccccaccctggaaataaaggcaagatcaggggtattatattcacattatctgccatcagttgtagatggtttgtttcctggctgttgtgaatacagcagcagtgggcaaggctgaaccagtatctgaggacccagccagtgtctaatggctcggccagtgtctgatggcctggccagtgtctaatggctcggccagtgtctgaagagtagggtgttgagtcctttggccatatgccaaggagtggtacatctgagtcatgaggcagattattttcaggnnnnnnnnnnnnnnnnnnnnnnnnnnnnnnnnnnnnnnnnnnnnnnnnnnnnnnnnnnnnnnnnnnnnnnnnnnnnnnnnnnnnnnnnnnnnnnnnnnnnnnnnnnnnnnnnnnnnnnnnnnnnnnnnnnnnnnnnnnnnnnnnnnnnnnnnnnnnnnnnnnnnnnnnnnnnnnnnnnnnnnnnnnnnnnnnnnnnnnnnnnnnnnnnnnnnnnnnnnnnnnnnnnnnnnnnnnnnnnnnnnnnnnnnnnnnnnnnnnnnnnnnnnnnnnnnnnnnnnnnnnnnnnnnnnnnnnnnnnnnnnnnnnnnnnnnnnnnnnnnnnnnnnnnnnnnnnnnnnnnnnnnnnnnnnnnnnnnnnnnnnnnnnnnnnnnnnnnnnnnnnnnnnnnnnnnnnnnnnnnnnnnnnnnnnnnnnnnnntgattgcttccttggctgtaagggagcttttcagttctgcgaggtcccacttgccaactgctgccctcagttcttaagcaattaagttctgttcagaaagtcttttcctaaaccaatctcctcatatgttttcttccagaagcttcagtgtcttgagtttcacgttgaggtctgtctttgttagggtctctactgctgtgaagaaacaccgtgcagagcaagcaactgcggggggacgggtttatttggcttacacttccatatcacactattcactatcagaggaagtcaggacaggaactcaaacagagcagaacccaggaggcaggagctgatgcagaggccatggagggatgctgctgactggcttgctccccatggcttgctcagcctgctttcttataaaacccaggaccaccagcctagggatgacccaacccacaataggtgggaccctccccatcaatcactaattaggaagatgccccatgggtttgccttcagatgatcttgtgtcatttttttaatggagaatgactttagctcgtgccaagttgacataaaactatccagcacgaggtctttgatccatttggagttagtttctatgtaggataatagataacaggtctaatttcactcttctgcatgcgagcactgaagcctcccagtaagtagcatgttttgaagacatcttttctcccacatctgcttttgcgtctttatcaaccattacctgcagttatttgcaagagttctggtcttctgctttgttccactggtttcctgtctgtttttgtgacagaaccaagctggttttatagccatggttccataacatatccagagaccgggaatgctaaccctgacagtactgtcctttctgacctaggttgctttggctgtcgtggaattcagggcatctctttctgtttctgtgaagaatgaggtggggattttgattgtgggttgcaccacctctgtaaatttctcttaagggagttctcatcttcacagtattctttctctaatccatgagtacagaagggctttctgtcttcctgtctccatcagtctttcttcagaggtgtaaaggcttttactgtggaggtccttcacctattcagttaggtttattcctggctgccttaccttctttgtggctgtcgtgaactgagggtgtctgtgatctctctcagcatcgtcgtcgttgaccggaaagagcactgtttctgtgagttcgctttgcctcctgccatgttgctggagtgttggtcatttctagttttgtggtagcttcttttnnnnnnnnnnnnnnnnnnnnnnnnnnnnnnnnnnnnnnnnnnnnnnnnnnnnnnnnnnnnnnnnnnnnnnnnnnnnnnnnnnnnnnnnnnnnnnnnnnnnnnnnnnnnnnnnnnnnnnnnnnnnnnnnnnnnnnnnnnnnnnnnnnnnnnnnnnnnnnnnnnnnnnnnnnnnnnnnnnnnnnnnnnnnnnnnnnnnnnnnnnnnnnnnnnnnnnnnnnnnnnnnnnnnnnnnnnnnnnnnnnnnnnnnnnnnnnnnnnnnnnnnnnnnnnnnnnnnnnnnnnnnnnnnnnnnnnnnnnnnnnnnnnnnnnnnnnnnnnnnnnnnnnnnnnnnnnnnnnnnnnnnnnnnnnnnnnnnnnnnnnnnnnnnnnnnnnnnnnnnnnnnnnnnnnnnnnnnnnnnnnnnnnnnnnnnnnnnnnnnnnnnnnnnnnnnnnnnnnnnnnnnnnnnnnnnnnnnnnnnnnnnnnnnnnnnnnnnnnnnnnnnnnnnnnnnnnnnnnnnnnnnnnnnnnnnnnnntcatctgcagataaaagtagtttggcttcttcaggttgtgtccttttaatatttccactttgtctcagctactgcattaaaaaaacacactgaaaaggagtggggagagcagacagtgctcttcctgactttaatggggttgctttgagttctccacttaagactatgctgactgcaggtttgtcacacagaatctttattatgttgttatgtnnnnnnnnnnnnnnnnnnnnnnnnnnnnnnnnnnnnnnnnnnnnnnnnnnnnnnnnnnnnnnnnnnnnnnnnnnnnnnnnnnnnnnnnnnnnnnnnnnnnnnnnnnnnnnnnnnnnnnnnnnnnnnnnnnnnnnnnnnnnnnnnnnnnnnnnnnnnnnnnnnnnnnnnnnnnnnnnnnnnnnnnnnnnnnnnnnnnnnnnnnnnnnnnnnnnnnnnnnnnnnnnnnnnnnnnnnnnnnnnnnnnnnnnnnnnnnnnnnnnnnnnnnnnnnnnnnnnnnnnnnnnnnnnnnnnnnnnnnnnnnnnnnnnnnnnnnnnnnnnnnnnnnnnnnnnnnnnnnnnnnnnnnnnnnnnnnnnnnnnnnnnnnnnnnnnnnnnnnnnnnnnnnnnnnnnnnnnnnnnnnnnnnnnnnnnnnnnnnactcagtccctgctcactccaagcccaaagattgatttattataaatcagtacactatagctgtcttcagccagctatcagaagagggtgtcagatctcattatgggtggttgtgagccaccatgtggttgctgggatttgaactcaggaccttcggaagagcagccagtgctcttacccgctgagccatctctccagctccctctagggctttaaacatgagggtatgctggactttgttaatggctttttctgaagaccaggatacctgctgtgagatagcatcttctctacatggtagggaagtggcagccatgagatctaaaaggattgggtcacctccacaagaccagaaccatgacagcacctgtgggcaggtcagcaagggtgggagaaatctcccaaggccccacttctaagtgaagagctaacagcaattagtggctcctgagagaagaagtgagaagcagtcttccccagggatgagtccctctgataggttatacccagtcccaagaagtcatatcatatacatacatgtgttcacatgcacatataaatgggctcggctgcatgcatttataggcagacacatatggaacaataataattactcctagccatgaatttgaaaggaaggtgaagaggagctgaagggagacagagaggggcaaaattatataaatacagcactcatgtatgaaaccctcagaaaactaaattaaacttgataaaaaagagtctcatctgatcataagttcaaggtcatcccctgcacataggccagcctgggatataagttcaaggccagcctgggccatgtcagaccctgcctctcccctactcatccatccccttcttttccatgcctgtttattttctgttgttagcatcacagaatccagtcgtatctactctttcaaaaattaccggcacatgactctttttcagggctgcgggacgcaaccacgtgactgtcctgtaacttgaatcctttgttgttggttcagtttgaagatgtgatagaaagcccaaagcaatccacatcttagcacaatcctcctgcctcaacatctccaggttcccaaacttcctcagtccagggcacccctaacttttctgcaacatgcgccccacgcagcccaagttcccaatggcaaggagggaggggtccacactgtgtgacatctttgtccggtcatagaatacacacaccattccgtctgtgcatagctttgcctcctaatgaggacaagcacccccccacacacacacaccaccacttccctcagactttcacatagtccttgcttttatcccagcaacgccacccccccccccaaaaaaaaaactatctttgtctagactgaacaccacttagaagaacacagtgctctctacggccagcagtgtgtatccaacggagagctgctgagtggttgctgaggtcccctccaaatgatcccataatcccacaatgcccccgagagtgcgctaggagccttaggggtacctcagtagctgctttaagaactgtggtctttttttatttttatttttatttttattttccctttgtgaactggtttctctgtgataaagtcaagctttgggattaccctaccgtatgccaaactttgaagatctttgcatttggtatctcttgatatttcttcccatctcttccccaccatccgcggctttcatcattcccatggggtctttaagaatctgctaagtgcctggtattaccttttatttttgagacaaagtcttgctatgtatcccaggctatgtttcaactctcagccctccctcagcttccccagtgctgggattactacagatgtggcctgtggcaccctgccctggcctgatatgggcttgtaaagtattcacagacattctgcctgcagggaagggtctcctaacacagtctgacccggcactggtctctttgtttccatggtggtgttgtgaaaaggcttcctgttacaatgttataatccttgttccacagatggggaagtcgtggtttgcaggtgcatgtctgttctcagagtcactttgtggcaccaacactctagagtccacaccaggggttggaccgatctctcgggggaggggggggggcagacaggcaaagctgctcaccagtgtttctcctctttcagaaatggctgagcggcacaacgccaagcagattctgcagctcgcccgggacctcgtgcataaggtgcagattctaattgagaacaagtgaggatctgctgtcgtccaccacccccaccccttccttcagcccagcacaaggtcctggtgtctgtggaccagtatggacttctgtgaagagagccatgctcttacccttggccactgggcagaggggtagagaagaacccatctcggccttacattttcctgtttgaccaaagattgcccaagtctgggatatccccctttcttgggagttggggttgtgagtgggtcgaggtagcctctggctctgttgtccttcttccttttctctgttccttcctcatctgcacaggagaggcctgtggggtttcctctgcacccagcaaggaagggcctttggtggtgttctagaatgttcctgccaggctggctcggaacaggctgtccccgtagacattgctcacattcaaagtcccagatgttttgagcatcacccctgccttcgaaccaccaggtttccccccacccccaaggtaaccctgatgtccttttatggcttgtctgcccctcagagaaccactggcttggaagaggggctaacagcatgtctccatgtatccttctcacctgaggtctgttccgtgcccctggcagcagcttctgactgcctgagtcctcgatctaatgacctaacttcctgcgctttccaacttttctctatccgctgccaggagactctctttagaaaaggcatcctgtaggtgggctaggggtcctggacgtgtttgtaggcagaagccaggagctcttgatgagagcctaacccttactatctcaccctcagggagacctccctgccatcaccggtgatctgggctcagaagcctgcagccttggtggaagccatgctcagcaaggctgggttttctctaagcactttgttcactcaggacagaaggaaggatgagccagtgggttggccagtgatagggttggtctgtgttccatgatggggagcttggggccagggttgggcctgaatatgttccctctacaccttcataccaagacctgctgatccacacactgaccctgagtaagctttcatacccgctcactgtctcttagtgaagcagtccagggtgcagcagaaatgagcacacatagcagaagcttgtccccaggacctgcagcctctggggcaatcaagacatggcaagtaggattttataaagaggatacgtggcttgaagcagctgcagagggtaccttcagccttgagccacactcttaaatcagaacctgtgtctcccacacagggcaaggtggacagagagagctctgtagtgtccatggaagactgatgctgcttcagcccacttgtgcccagggcagcaggaagggaggcggctgatgaccacagttgcctgtgtagagtcacacctcccagctaggtccccctgcttcccaaggtgtgggtaagaaaggccatcagataaaagttgattttgctggtgcagaggttggtattttagcacagccaggtccggagctcctgacccttatttatttttgtaactgaccagtgtggagtatagcacaagaattccctctgcctccctcgtgcctcccgagcgcgtgcttgtggttctgagtgcctcctatttattccatttaccagctgacatctgtgtgcggtgtttcttggtgtcctggagttgggcatgggcgggaggggggtattcctcctgcccaaggcgttctctttttcacgttgcccaagtgtcttgtaaatgttcattgcaaagatgactattcagagcaaatatatctgagcagaaaacataaccgtgggtctggttatttgtttgtttgttatgttgtttgctttgctttatttttacagggtctcactgtgtagccctggctagcctggaacttgctatatagtccagatgggccttgaactcaagacattcccctgcctcccaagttctgggattaaaggtgtgtgccaccatgcccagtggttggggagtggcgactggggtggcagaggagaggaggcgaggtttcgtgtagcccaggctaggcttggcctttctatcccacataggctgacagaggctggctttgaactcccaattgctgtgattataggcatgccccacctcatatttttgctttagggttgagtctggggggcactcaccttcccttgtcaaagtggtgggagcagtcactttcccttactgctccccttctccctctgggaggtcctaggagaagcaggaacggctgcagtgggatagcaggagctatctaaggtttctgaccttagcagtctctcccctctctagtcaggtgaccaaggggcttctcccttcccctggacccaagttagcatcactcacaatcaagtccctcagcagccatgattctgatcacacagtcacacacacatgcgcaccacacgcactcatacacaaaccatgcacacacaccatacatacactcatacacatacnnnnnnnnnnnnnnnnnnnnnnnnnnnnnnnnnnnnnnnnnnnnnnnnnnnnnnnnnnnnnnnnnnnnnnnnnnnnnnnnnnnnnnnnnnnnnnnnnnnnnnnnnnnnnnnnnnnnnnnnnnnnnnnnnnnnnnnnnnnnnnnnnnnnnnnnnnnnnnnnnnnnnnnnnnnnnnnnnnnnnnnnnnnnnnnnnnnnnnnnnnnnnnnnnnnnnnnnnnnnnnnnnnnnnnnnnnnnnnnnnnnnnnnnnnnnnnnnnnnnnnnnnnnnnnnnnnnnnnnnnnnnnnnnnnnnnnnnnnnnnnnnnnnnnnnnnnnnnnnnnnnnnnnnnnnnnnnnnnnnnnnnnnnnnnnnnnnnnnnnnnnnnnnnnnnnnnnnnnnnnnnnnnnnnnnnnnnnnnnnnnnnnnnnnnnnnnnnnnnnnnnnnnnnnnnnnnnnnnnnnnnnnnnnnnnnnnnnnnnnnnnnnnnnnnnnnnnnnnnnnnnnnnnnnnnnnnnnnnnnnnnnnnnnnnnnnnnnnnnnnnnnnnnnnnnnnnnnnnnnnnnnnnnnnnnnnnnnnnnnnnnnnnnnnnnnnnnnnnnnnnnnnnnnnnnnnnnnnnnnnnnnnnnnnnnnnnnnnnnnnnnnnnnnnnnnnnnnnnnnnnnnnnnnnnnnnnnnnnnnnnnnnnnnnnnnnnnnnnnnnnnnnnnnnnnnnnnnnnntatatcatatacacacagataccatacacactcatgtcacacaccacacaaacaccacacatcacaggacataccacacacacacaccacatacacaccacacacactcatacgcatacaggacaccacacacacttgtgctcataccattcacaccacaagctcacacatacacaccacaccacacatacactcccaccacacacacacaccataccacacacactcatacactcataccacaccacacacactaatgcacatactcatataccacacactacacacccgcacactcacacacacataccaacacagtgtccttaaaccaactcacttttaaaactccaaaaagaaagccaggcctgttggtgtgggcagcagaaagctgtatgaatgattagttgatgaaatactcttcttagcctttgagctggagcatccatcggctccttcctctgttagcatgttaaccagctttccctgagtgttaaccagccttccctgagtgttagccagccttccctgagtgctaaccagcctcccctgctgtaactgacatctgaagtgatctgatcctgggaaaatattggggcttgtgtgtaggaagcctcagcccatggtgggtagacttgctgcttttaggccttaaggttgggaaggacacatgatggccgaagcttactatagagaaaagccactcacctcatagccacagggcagggtcccacaattcccttcaaggacacacccctagtgacctaaagacctccctctagctcctagctataaatggctcatcacctcctgctgacacaaagctggggcattgaagagtcaacctagaggagctaggaagagagagatgatgtagaggtggtgtagtgggggggactgcttgccacatagcacaaggacctgacattggtctccagcacccatgcagaaagccaggtgtggcactgcacatctggaatcccagtnnnnnnnnnnnnnnnnnnnnnnnnnnnnnnnnnnnnnnnnnnnnnnnnnnnnnnnnnnnnnnnnnnnnnnnnnnnnnnnnnnnnnnnnnnnnnnnnnnnnnnnnnnnnnnnnnnnnnnnnnnnnnnnnnnnnnnnnnnnnnnnnnnnnnnnnnnnnnnnnnnnnnnnnnnnnnnnnnnnnnnnnnnnnnnnnnnnnnnnnnnnnnnnnnnnnnnnnnnnnnnnnnnnnnnnnnnnnnnnnnnnnnnnnnnnnnnnnnnnnnnnnnnnnnnnnnnnnnnnnnnnnnnnnnnnnnnnnnnnnnnnnnnnnntggtgtgggaaggttttattgtagatattggggaggcatcaggaagagtccagagtctggagtctggggaattagagtttccttgggacctgacagtacctgttttagggtttcattgctgtgaaaagacactatggccaaggcaactcttagaaaacatttagttggtgctggcttacagtttcagagattcagtctttcatcatcagggcaggaagcatggcgttgtgcaggcagacatggtgctggaggagctgatagttctacatcttgatccgaaggcagccagaaggagactgtctttgataggcagccaggaggagcctctgttccacactgggctgaacttgaatactaggaaatctcaaagcccacccacatagtgaccgacttcctccaacaaggccacatgtcctaatagggccacttcccatggacaactcataatcaaaccatcataatacccaaggaccagcactccaggctgactaccctaacatacacacacacacacacacacacacacacacaaacagcaattgcaattggagaaagggtgtgagaagcattgaagacacagtagtgcccaatgagacttttgtatcccaaaatgtaaaggaagggtagaaacagacaggaccatctcacaatgccaaatgagcagggatcgtctgcccctgcctacagtttggagacagcattccatctctgctgctgttctacagtattaccctccaagcctaccagccaccgtcctcatcgagtctgttgtacccacttgtgaagatcttctcagcaggacttgtggacggctgacatgaaaacaaaggcccccatggccatacacacagccatgagcattttcaccctgggtgtgtgactcactgggtcatgggtccctcacccctgtatctagccattcctcccacaaccagttgtgcccagttctactctgattatatgtggcctcagggtctcagagagaggctagtgtgtagagtatgcatgctcaggaaggctagaggaaggcctttgcttcttgcgctgaagccacccctggagttgctgggatggttcgaagagaaaattgagaaccctgtgaagtcaaggtatattccaccttttgtagtccccccttttgtagcagaatatgtcttcatagaagctcccccagttcaccaactacattaatgtctcctctgataacacccagaatgcctttggctagggtctgggcacggaggctgaaagatccgtgtctcagcttcttttcctattgctgtgataaaataccaggagaaaccaaattaagggggaagggctctcttctagttcacagttccagggcacagtccatcatggtgggggagactaggtggcaggcgcttgcagcagctggtcatgccatatccccagtaaagaaaagagagcaaaaaacactggtacccgccttgctttctcctttatacaggatcccagccaagggagtggtactaaccatgtggtcagtcctccctcatccttcaatacaaacaagatgatccccaacaaacttcttccaggtgactctggatctggatcaagtttagagcagtggtccctgggggctggtcctggctcaaagtttgagggtacagtgtctgtcttggagggaagacatggccgcaggagcacgaggcagttggtcatgtcgtgtcctcggttacgaagtcatgagtgctggtgcctctgtttctcaagtcatgcagaccaggaccccagcccatgaatgctgctgcccattcaagtgagtctccctgactctgtcaacccaatgaggaaagtctctcactggcatgcccggagactgctttctgaggtgattcctggtcctgtcacggtgacaatcaacatgaaaacatcacggacaaagagaagcatagacaggcatcagagccagatggaaggcctccaagctcccagaagcagcacagttttctcctctattcatcagttctttacttacatggactgtgggaaagggtcctgagccccacccagctgggagcagcttccagcacacaatgggtcataactcatggcaaatcaaagtccttcatgacacccccacaaagtaggcattatgccaaccccactgtaccaaagagtaaatgagtccagaaagggaaactgacttgcctgaggtcacacagcatggtagcagataaggtgggatatgaacctgagtgtgtagcaatttcattcgactgtagagattgttgtttgtcttttgctttccctgggtgacactcatttccttattctggcacaaggatggctctctgagtctcactggagaaggggacggctgctctctggactgtggtcacttgccacctgatgacaagcaggctggtcaggaccatgttgaggatagcagtggcatagccccagctcagccggcatgctccgctgtggtacatggaggagccttcacagatttctttggcaaatggggaagccagagtggctggaaaaaccagcagacctacaagcatggagactgctgggggcagcagaaaaggaaagtcactgtattggtcagggcttctgggctgatttgtgatcccaggactcacccagcaccctgcctaccctacacatctatctgtttattcagcaatccatccaattatcaactcatccattcttccatgtccccatccatccacccacccagacacccagccacccagccacccagccacccagccacccactcatttacccagctactcaactactcatccatccattgacccatctctctatccactgtagaaactcatacacacacacatacacatgcactcacacacacacagatacatacatagacacaccctcataatgcactcacacacacagacacatatgcacatgtacatacatacatgcacacatgtgcacacacatacataaacatatgcacatgcactcacatgcaggtgcacatacatgtgtgcacacatacacacatacacacatacaaacatgcacacacatatacttatacatgcacacacacacatgcacacatatgcacttgcactcatgtgtatgagtgtacacacacatgcacacacatgtgcaaacacagagacacacacactcatatacacacacagagacacatatgcatgtgcacacacatgcacacacacatgcatgcacacatatgcaatgcactcacatgtatgcacacacacatgtgcgcacacacacagagacacacaatgcacacacataaaccatgcccaagcacctgtgctccatcctcagtcccatgagcacagtgaattgtttttcagagttttgtgccctaccttgctaatgtttaattttaaatggatcccaccccaggaaggagccctggcagagaggaatatcttgcttttgctttgcttgtcactgtgtgcatgggagtacaactctggggtgtcaagttgcaggttcctagggagttttgacactacctatcttaggtgtaattctcccacagattctaaagatccaaattctattaaaactaaattaaaagcaaaagggactcccagaactcctaggtgtgtgttcaggatagaaataaaacaagcagacatcttggaggtcctcccactgacagagagaaaggagactcagtccagagcccggaagaccctaggtgaggtgggaaaggcgggtaatgccaggcaagacacgggagattaggagagatggcttcctgctgagaagtaaagggctatgtcacaatgccaaggcctgagcagatccctgcagagacaggaggggacagtgaggtgagtgtgggattacagaatcagagagaagtgggcagatggagaggtgaggccgggacagggagggctgaggcaggagaaggagacttgggtttccctctgcctgccatgggaagcccttggaaggtgtataagccagccagctggctggatctgatttcacctcaactagacctgtctgcccagtgggagggaaaggggggaaactggaacctgtgggaacttgttctaactcaggtgagaggggtggagggtggagggtctctgtgggacttccgatgaactagagaagagccaccctcctctgctgaagtgagggtcagacttcggcatcttctaagctcttggttgggcatccttgggcagtgcacagcctactgaactgtgcagtggtactgctacaaagcatggtacagaatgagtggatgaaagagaagcatagaggtagaccagctcacacatagacacagacacacagacacacaaacatacacaccatgcccaagcacaatgtattatgtgcatagtactggtggcataggaccaggtcagctaaggtcaggtccacgtgggtggcttcaacatcctgtgcccccttgtccccaagtcctgaattgctaaagatgggagtagttcacaatcctggggttcacctcagaaatctcaaccctgtgtaagagtctacctgctgccgcctgcaccaccggtgtcggaccaaagcccgtcctggcaaacaaccttcggggggccagtgcccaggctgagaggagaagagcgctgattgacagcaaaagccagcctcccagaagtgttgcagctgagaccttggaaagaggaaagggatgaggtgggatagggcacgtggcagtcactctgcctgttttcctgctacagtgtttccaacagctatgtgtggctcttgcttggctactttgtagtttctttcttccacccttctccacccctttcccaccctttcaacccccctgacaccaaataggaaagaaaaaatgactggggggaggggggaggtagagagaaaggggtggggttatcattagcctatgtcctgctgactagggacattgaatcccttgggagcaagtttgatctttgccttcaggatattaatttattcttcttgtgttttctttgcacacaagtatttaataaactatgaccaacagcaaccaactgacaaccaccaaccaacacccaacacctcttggagccttagcatttatatatcccctgaaaagtccccagaattcctaaatgtcaggcaatctcagaaactacctgcggctggcaaaatcacacccctgctagagcacgaggcaagtcatagtcagtttttgtgaacagtctgaagcagcccacatccacacctgggatcaaaatgaaaacatattcccacaatatccctgtgtttcgcaaagaaaccaaaagtccaaaagtccaaaattgtcactgcagccatgtcttacaatagtcctgttttcccttaaataaacccatcccgagattgcaagtcctttgcatcaagacacacagttagtcaaacagaagtaaaattcaggtcaatgaactgctccatcctgctctgattaagcgctagccaggatcactagcagaagcccccaatccaaaatgtcacctttgtaatcaattttgaaggctgtataatcttccctttaagtgctggcctaagtacccggtctttaccctccccatgttgattaccatgacaccccaaagacttgaacgcctcatctttcatctgttaaccccagcagtgcctggggtaaagtcaagtaggggtgtgcgggtggcacactgcgggtggcatgctgcagagccaccacagacttgcttatcgatggcggcaatttcctagcaggtggcagtatggtgtcttgaagaaaatgccttttcctggtttgcacaaacaaaggttttctggggactaagagctgcctctagacagaagtcatacctacccaacgctgcagaaccccaagatcagaggtgtaaagacccctatgcagggtttcttggtgttcctgagagttgctgggtgctgagaacctgtgtgctcagacactgggacacctactggtcagcaaaggaccctggagcccattccttggcagcagccctggaagagcttgtgtctcaccttccaggccaagctgggcatgtccttcaatgacccaaaggtcacacagctttggttccagcagtcacctggtggccaggagcagtaggtaaagataccataagaggaggaaaggctctggaaccaggcgggggagatgaggctgaggccagacatgccggtgagagagagtcccagagcagccctcacaccgacctccatcgggaatgttgctgacctagggggcaagccaaggtgagagatgaagagggcgagacaaagtgagccagcaccaggacacaccaggtccgttcatcagtgtgcgcactcacacatgcctgacttcctcaacccaagtctctctcagtgcctgtgagaggcggtctagaccctgaaagtgggtggcac

SEQ ID NO: 1689 - DNA, 3970 bp, Mus musculus
gtgaagcagatcatggaagaagccgttaccagaaagttcgtccacgaggacagcagccacatcatctccttctgtgcggccgtggaggcctgcgtgctgcacgggctgcggcggagggcggccggcttcctgcgaagcaacaagatcgcggcgctcttcatgaaggtgggcaaaggcttccctccggccgaggagctgagccgcaaggtccaggaactggagcaactcattgagagcgcgcgaaaccagatccagggcctgcaagagaacgtgcggaagctgccgaagctgcctaacctgtccccgctggccatcaagcacctgtggatccgcaccgccctgttcgagagggtcctggacaaaatcgtccactacctggtggaaaacagcagtaaatactacgagaaggaggcactcttgatggacccggtggacggacccatcctggcctctttgttggtggggccatgtgccctggagtataccaagatgaagactgcagatcacttctggactgacccctcagccgacgagctggtccagagacaccggatccacagctcacatctgagacaggactcgcccaccaagcggccagcgctctgtgtgagatggatccagaagaggcattccagtggcagcatggacgaccggccatctatctctgcccgggactatgtagaatctctgcaccagaactccagggccaccctgctctatggaaagaacaatgttctggttcagccaagggatgacatggaggccgtgccagggtacctgtctctgcaccagacagcggatgtcatgaccttgaagtggacacccaatcagctgatgaacgggtctgtgggggatctggactacgagaagagtgtctactgggactacgctgtgaccatccgcttagaggagatagtttacctgcactgccatcaacaagtggacagcggcgggactgtcgtgctggtgagccaggatggaatccagaggccacccttccgcttccccaagggcgggcacctgctacagttcctctcctgtctggagaatgggctgcttccgcacgggcagctggacccgccgctttggtcacagcgaggaaaggggaaggtatttcctaagttgcgcaagcgcagcccacaggggtcctccgagtccacgtcttcagacaaggaggacgacgaagccacggattacgtgttccgcatcatctaccctggcacgcagtctgaattcgtgccccaggacctaatggatgtctctatgaacaaccttccacccctatggcaacccagtcctcggaagtcctcctgctcttcctgttcacaaagcggctcagctgacggcggctcaaccaatggctgtaaccatgagagggccccactgaaactgctgtgtgataacatgaagtaccagatcctctccagagccttctatggatggctcgcctactgcagacacctgtccaccgtgaggacccacctgtcagccctggtcaatcacatgatcgtgtctccagacctgccctgtgacgctgggcaagggttgacagccagcatctgggaaaaatacatccaggacagcacgacctacccggagcaggagctgctgcgtctcatctactatggaggtgtccagcctgagatccgcagggcagtgtggcccttcctcctcggccactaccagtttgggatgacagagatggagaggaaagaggtagacgaacagatccatgcctgctacgcacaaaccatgtcggagtggctgggctgtgaagctatcgtgagacagagggagcgggagtcccacgcggctgccctggccaagtgctcttcaggagccagcctggacagccaccttcaccggatgctgcaccgggactccaccatcagcaatgagtcatcccagagctgcagctcaggccgccagaacctccgactgcagagcgactccagcagcagcacacaggtatttgagtctgtggatgaggtggagcagacagaggcagaaggcaggtcagaagaaaaacatcccaaaatccccaatgggaacccagccaacggcacttgctccccagactccggacacccttcctcccacaacttctcctctggtctctccgagcactctgagcccagtcttagcactgaagacagcgtcttggatgcccaacgcagccttccagctgtgtttcggcctggggacagcagcgtggaagatgggcagagcagcgaagccaccacatcccgggacgaggcccctcgggaggagctggccgtgcaagatagccttgagagtgacctccttgccaacgagagcttggaggagttcatgtctatccctggcagcctggacgtggccctgcctgagaaggatggcgcgccagaactactggacctgtacaccgtgaacctgcaccgcattgagaaagatgtgcagaggtgtgaccgcagctactggtacttcacagcagccaacctggagaagctgaggaacatcatgtgcagttacatctggcagcacatcgagatcggctatgtccagggcatgtgtgacctcctggccccgctgctggtcatcctggatgatggagctccggtacctgaggccgtggcctggctaactcgttgtctggtgctgtccccagaggccctggccttcagttgcttcacggagctgatgaagaggatgaaccaaaacttcccccatggaggcgccatggatacgcacttcgccaacatgaggtctctgatccagatcctggactccgagctcttcgagctgatgcatcagaacggcgattacacccacttctacttttgctaccgctggttcctgctggatttcaaacgagagctggtctatgatgacgtcttctccgtgtgggaaactatctgggctgctaagcacgtgtcctccgcccactacgtgctgttcatcgcgctggcgctggtggaggtctacagagacatcatcctggagaacaatatggacttcactgacattatcaagttcttcaacgaaatggctgagcggcacaacgccaagcagattctgcagctcgcccgggacctcgtgcataaggtgcagattctaattgagaacaagtgaggatctgctgtcgtccaccacccccaccccttccttcagcccagcacaaggtcctggtgtctgtggaccagtatggacttctgtgaagagagccatgctcttacccttggccactgggcagaggggtagagaagaacccatctcggccttacattttcctgtttgaccaaagattgcccaagtctgggatatccccctttcttgggagttggggttgtgagtgggtcgaggtagcctctggctctgttgtccttcttccttttctctgttccttcctcatctgcacaggagaggcctgtggggtttcctctgcacccagcaaggaagggcctttggtggtgttctagaatgttcctgccaggctggctcggaacaggctgtccccgtagacattgctcacattcaaagtcccagatgttttgagcatcacccctgccttcgaaccaccaggtttccccccacccccaaggtaaccctgatgtccttttatggcttgtctgcccctcagagaaccactggcttggaagaggggctaacagcatgtctccatgtatccttctcacctgaggtctgttccgtgcccctggcagcagcttctgactgcctgagtcctcgatctaatgacctaacttcctgcgctttccaacttttctctatccgctgccaggagactctctttagaaaaggcatcctgtaggtgggctaggggtcctggacgtgtttgtaggcagaagccaggagctcttgatgagagcctaacccttactatctcaccctcagggagacctccctgccatcaccggtgatctgggctcagaagcctgcagccttggtggaagccatgctcagcaaggctggg

SEQ ID NO: 1690 - protein, 1026 aa, Mus musculus
VKQIMEEAVTRKFVHEDSSHIISFCAAVEACVLHGLRRRAAGFLRSNKIAALFMKVGKGFPPAEELSRKVQELEQLIESARNQIQGLQENVRKLPKLPNLSPLAIKHLWIRTALFERVLDKIVHYLVENSSKYYEKEALLMDPVDGPILASLLVGPCALEYTKMKTADHFWTDPSADELVQRHRIHSSHLRQDSPTKRPALCVRWIQKRHSSGSMDDRPSISARDYVESLHQNSRATLLYGKNNVLVQPRDDMEAVPGYLSLHQTADVMTLKWTPNQLMNGSVGDLDYEKSVYWDYAVTIRLEEIVYLHCHQQVDSGGTVVLVSQDGIQRPPFRFPKGGHLLQFLSCLENGLLPHGQLDPPLWSQRGKGKVFPKLRKRSPQGSSESTSSDKEDDEATDYVFRIIYPGTQSEFVPQDLMDVSMNNLPPLWQPSPRKSSCSSCSQSGSADGGSTNGCNHERAPLKLLCDNMKYQILSRAFYGWLAYCRHLSTVRTHLSALVNHMIVSPDLPCDAGQGLTASIWEKYIQDSTTYPEQELLRLIYYGGVQPEIRRAVWPFLLGHYQFGMTEMERKEVDEQIHACYAQTMSEWLGCEAIVRQRERESHAAAKCSSGASLDSHLHRMLHRDSTISNESSQSCSSGRQNLRLQSDSSSSTQVFESVDEVEQTEAEGRSEEKHPKIPNGNPANGTCSPDSGHPSSHNFSSGLSEHSEPSLSTEDSVLDAQRSLPAVFRPGDSSVEDGQSSEATTSRDEAPREELAVQDSLESDLLANESLEEFMSIPGSLDVPEKDGAPELLDLYTVNLHRIEKDVQRCDRSYWYFTAANLEKLRNIMCSYIWQHIEIGYVQGMCDLLAPLLVILDDGAPVPEAVAWLTRCLVLSPEAFSCFTELMKRMNQNFPHGGAMDTHFANMRSLIQILDSELFELMHQNGDYTHFYFCYRWFLLDFKRELVYDDVFSVWETIWAAKHVSSAHYVLFIALVEVYRDIINNMDFTDIIKFFNEMAERHNAKQILQLARDLVHKVQILIENK

SEQ ID NO: 1691 - DNA, 138015 bp, Homo sapiens
tgggtatgaggtttccttctggagtaacgaaagtattgtggatctatgtagtggtgatagttgcacaatacttgaatgtactgaatgtcactgatttgtccactttaaaatgcttaaaatggtgaattttatatgaatattgctataataaattaaaaagggttgctgatggatagatttgggctaagagtgtaggaaggaaatcaagactcttctggttacctttacggagttaagggctgaaggggccttaagtgctcactgcactccggtcataactgcacacttgccgggcactgtggctcacacctgtaatcccagcactttgggaagccgtggcgggtggatcacctgaggtcaggagttcgagaccagcctggccaacatggtgaagccccgtctctactaaaaatacaaaaattaaccaggcgtggtggtgcatgcctgtaatcccagctacttggggggctgaggcagaaaaatcgcttgaaccctggagacggaggttgcagtgagccgagatcgtgccactgcactccagcctggcgacagagcgagactccatctcaaaaaaaaaaaaatatatatatatatatttatatatatatataactgcaccctttctcttctttgtctaggcatgctcatccccaccttggggactttgtacctgttctcccttgcatgcacctaaaatgatcttcctccaactctcagcctcgctgctgccctctccattcataactcagtcatgctctcacctccccaaatagtaccacaagcctgactggcttcttcccatctgtcacgtctcaggccacgtcaccccgtggacactcactatcacaccacccagctcacatgctttattgatcacattgaccacaatctggtattttgctgatgtgatcactttattattgcctctctcttccccctggctcaaatgtgagctccatgcaggaaacaacatcatgtgacttattcatactctgtccctcatgctgggcacattgtgggctctcaaacaaaacactgaaaaaatgaatgaatgaatgaatgaatgaaactcatctgggagaaagtagaaaaaaaaatccagccttaagtgaaaatcaagaagagaaaagttgagattgtctatttatggggagaagcagggttcctttacatcctcgattttagacttggaaatctgttacagtgaaatcacttcattcatcaacctgctgctcaccagggctgctcatcaaaaggagccaccaggctttctctaaaaattcccctggagcctcccgccttcattccctgggtccagggttcccatactctgtgaaatcacattcacatcattcacctaccagtgagttctttccttcacatgctcacacagcatcatcatcccatcctgtaaaatgctccttgctccatacctaggaggccctgaaaaagaaattcataaacctactgtggtgtcactcaccactcaccatctacaatgttgacttttttctgtgctggctcccaccagggacccaagcgaagtctgatgctcatacatcaccagcaagagccccatgagagccagtgctaatggacgaagttctggcctggaatactccctaaacttccatttctgtgctttatatagaggtggcccaccccacctgctcaaccacgactggttaaatctaatcagggtcatcttgtttctttagcagatgctcaattatccagcatcccttgcaataaaagtgatcaaggccggttgggcggggtggctcatgcctgtaatcccagcactttgggaggccgaggtgggcggatcacaaggtcaggagatcgagaccatcctggctaacacggtgaaacctcgtctctactaaaaatacaaaaaattagccgggcgtggtggtgggcacctgtagtcccagctactcaggaggctgaggcaggagaatggcgtgaacccgagagatggagctttccgtgagctgagatcgcactactgcactccagcctgggtgacaaagcgagactctgtctcaaaaaaaaaaaaaaaaaaaaaagaaaaagaaacagatgcaagtaataccatccttttctttctgcactgatattgggtatgagatctgaacttgcggtagccattttgaggccatgaggtatgaagccacaaaccaagaatgatggagttaaaatacaaagagcctgggtcagtgatgctctcaatcagccagcgaatcaattcacggggtgacttattcattagacacagtatgcctggggcccacaataatttcaagggcccatgaaaatgttttagtatctttggaaatcagaaggataaacagcctgagggcacagccaatacagggaggtgggtacacctgccctccttcaggccctcaccatcaacacccctccattctttcccagccatgtccatggatgttagtagatagcggcgtgcaatttcaaaacgaggcatctctattcacatttgcagtgatgtctgagccccaaacgaacaaataacatacttcactgcatcaccatttactctacctgttacagttttaaacagtttcaacttttgaaattatatcctatggaagtaattaagggttcccttcaattacaaaagtgttcatgatagcaaaagtgtattcaatcaaaatgctcaataatggaagacaatataatttatgaagcatccatacttatgacatcctttttcagatatgaaaatgaatgatttagatctatatttattgacataaatgttcttttcttcttttttttttttttttttagacaaagcctcactctgccgcccaggctggaatgcagtggcgcgatctcagctcactgcaacctccgcctcccaggttcaagtgattctcgtgcctcagcctcccgagtagctgggatacagctgcctgccaccacgcccggctaatttttgtattttcagtagagacgaggtttcaccatgttggccaggttggtctcaaattcctgacctcaggtgatccacctgcctcagcctcccaaagtgttgggattacaggcgtaagccaccgcccccggccgaccggctgacataaatgctcatttttttttttttttttgagacggagtctcgctctgtgcacctcccgggttcacgccattctcctgcctcagcctcccgagtagctgggactacaggcgcccgccaccacgccaggctaatttttttgtatttttagcactgtgttagccaggatggtcttgatctcctgaccttgtgatctgcccgcctcgacctcccaaagtgctggaattacaggtgtgagccaccgcgcccggccaaatgttcatttttaagtgaaaaaataggtcaatatttttctttctttttttttctttttttttgtgagatgaaatcttgttctgtcgcccaggcccttatgcagtggtgcgatcttggctcactgcaacctctgcctccctggttcaagtgattctcctgcctcaacctcccaaatagctaggactacaggcgcacaccaccatgcctagctaattttttatatttttagtagagacaaggtttcaccatgttggccaggctggtctcgatctcgacctcgtgatctgaccaccttggcctcccaaagtgctgggattacaggagtgagccaccacacctggcctatttttcttattcacgttcatgaacatagatgagtacataacactgaataattttatcagtaaggtgatttcaactgcaagtaagaggaaaccctaactcaatgacttcacaatgaggaaatgtattttccaaaataacaagaaattccgaatcgttgggggtgctctggccccacttctcttggctctgcccacctccctgtattggctgtgccctcaggctatcaggcaatggcagcacataaagtgctagtgcccagatgtggagctttcaagagtggagaaatcattcccagaaggcacctagctgacttctcctgtgtctcattggccagaactgtgtcacttgctcacatctaaaccgaccactgacaaaggaaacaggagcatcatgatttttatttatttacttatttttaatttttttatttcaatagtttttgggggaacaggtggtgtttggttacatgaataagttctttagtggtgatttctgagatttaggtgcactcaccacccgagcagtgtacactgtacccaatgtgtagtcttttatccctccccactccatgcttcccccagagtccccaaagtccattgtatctttttgtgtgtgtgtgtgcgtgtgagacagagttttgctcttgttgcccaggctggagtgtaatggcgggatctcggctcactgcaacctctgccttgcagattcaagcaattctcctgcctcagcctcccgagtagctgggattacaggcatgcaccaccacgcccagctgattttgtatttttagtagagacgaggtttctccatgttggtcaggctggtctcaaactgccaacctcaggtgatccacccacctcggcctctcaaactgctgggattacagacatgagccatcgcaccggcccattgcatcgtttttatacttttgtgtccttatagcttagctcccacttacaagtgagaacacagaatgtttagtttcccgactgggtgcggtggcttacgcctgtaatcccagcactttaggaggccgaggcgggcggatcatgaggtcaagagatcgagaccatcctggccaaaatggtgaaaccctgtctctactaaaattacaaaaattaactgggtgtggtggtgcgcacctgcagtcacagctactagggaggctgaggcaggggaatcacttgaacccgggaggtggaggttgcagtgagccaagattgtgccactgcactccagcctggtgacagagtgagactccatctcaaaaaaaaaaaaaaaaaaagaaaagaaaagaaaaagaaaagaaaaaaagactgggtgtggtggctcacgtctgtaatcccagcattttgggaggccaaggcaggtggatcacctgaggtcagaaattccagaccagcctggccaacatggtgaaaccccgtctctactaaaaatccaaaaaatatataggtactccggaggctgagacaggagaatcacttgaacccgggaggcggaggttgcggtgagctgagattgcgccactgcactccagtctgggtgacagagtgcgactccatctcaaaaaaaaaaaaaaaaatgtttactttcccattcctgagttacttctcttagaataatggtctccaactccatccaggttgctgcaatgccattatttcattcctttttatggctgagtagtattctgtggtatatatattatattttctttatccactcattgattgatggacatttgggctggttccatatttttgcaactgcgaattgcaggagcaccatgattgacttagtccagtcaggacctacctagatgggaagaagaacagggtcttccaaggcagtggccaatgtgtagagttggatacctgggcaaattcagtttcattaaaaagagggggaggcaaacgaatattgaggtgacagctgtattagtcagtgttctccagagaaacagaaccaacaagatgtacatatatacacacatataaatatatgcacacttatatatgtatgcatctatacatatataaggagatttattacaagaacttggcttatacaattatgcaagctgagaagtcccaggatttgcagtcagcaaactggaggcccaggagggctgatagtgcagttttagtctgagtccgaaggcccgaggcccaggaagagcagaggtttcaatttgagtcagaaggtgggaaaagatgtcgcagctcaaacagtcaggcaggaggagtttcctcttgttctgcctttttttgttccattcagatcttcaattgattgaatgaggcttacctacatcagagacagcaatctgctttactcagtcgatggattcaaacattaatcttatctacaaacaccctcacagtcacgcccagaataacctttgagcaaatgtttgagcacccctggtccaagcaagttgacagataaaattcaccatcgcagcaacaaggagtatctgctgcatagggcatgcaacacaacattaatcaagatttctctgtatagtaagaggctcaagagtgcctcggcctgaatctagcctctcttactttccagctgcatgtcttggttaagctgttttttttttttctctttttttttttttgagatggagtctagttcttttgcccagactggagtgcagtggtgcaagcttggctcactgcaacctctgcctcccgggttcacacaattctcctgcctcagcctctcgagtagctgggattacaggcacacaccaccaggcccggctaatttttttttgtatttttagtagagacagggtttcactatgttggccagactggtctcgaactcctgacctcatgatccgcctgcctcggcctcccaaagtgctgggattacaggtgtgaaccaccacgcctgtgttggccaggctggtctcgaactcctgacctcaggcgatccacccgcctcggcctcccaaagtgctgggattacaggtgtgagccaccgcgtccggcctagcctggactttcttagcatttttcatttacgctgatcacagagctgacctttcccagctgagggcgctgaagaaacattgctggagaaagaggcttctcttaactggttccagctgctgcaccactggtcagcgctaagggtgtgaggtgtcataggccaggtaatgggattctcagacactgggggaggctttgggacccaggtaaattttcctattctggccacagggagagtgcaactcttcccaagctgatcttaggtgatggtgcccctagtggtgagtgttccaactgcagcagggtgcaatccctggtcccatggaattcagggttccaatgtcacctgctcagtggggcctccctcaaccactctgtttcataataaaatccccatctgtctgggccctccctgtctcccctgcctactttgttttcctccagaactttccaacatactctattatttgcttattttattgtctgcttcctaagctccacgagggcagagctttttgcctgtctcgttcacttagaagtatctagcacagtcacctggcacacagtaggtgttcataaatatctgttgacctgagttgcatgcaggtcaaccatgccctcctgccagttgcaactgcaccaaacaccatggagtcctttatcttggaggaaaagctccaggttttcaaggaccagcacaggtcaacttcccagactttgtgcttggcaggaaaaggaaaaatgtgggttttgaaaaatgattccctagagtgaggcttaggcaccctaccaccttcctaaagtaccccagttaacttaggggtgaagccaaggagaggaactaatggatcaatcactttggtcctcaggtcagaatcctggcggccacacacttgttaaacaaacagggatgaaaccccctccaggcttggctttgtcaatgacataaggctcatagggttagcgtggggtggaaggagggtcaataagatcatgtgagcaaaacccaaagcccttagcgcagtgcctgccacatagtaggtgcgcaatatatgattatttttgctgccaagcaaccatttcccattctcctgggggacttgctggagattgtggagcaggggtttgtgattgagacacctctccccaagccaatgggcaggcttgtgtcccaggtcaggacaatcaggcactccctccataggatgaaaaccttaaacgaatggcattctctttaccagagcagcagtgccctaaccacactgtccttgccaggcaaatattcccaagattcccctttctggccttccagagccaccttgatttcatcccatttcccagttctccaggctcccatgggctctgggatcacatattatcttcccagtttatttccttttgcctgaggaagccaaagtcagcttctgtggcttacggccagagacccctgacactgaccaatggaaaaaagggggctctggatccactgctgcacggagaggcactctaagctgccctctagtccttctgaaggaaggcctgaatactgggggaccctaaaaggcattgcaaatccttaacatcaccatcaaagtcatacagggttttggccctgcacctctctggccaacatcccaccaccgtccccattgttcacaccactccagccccacaggcatctgtgctatttgtcactgtttgactggacacactccctcctcagggactttgcatttgctgttcccttgactcaactgctcttcctccagaaatccccatggcctactccttttcctctttgcttaaatgtcacctgctcagtggggcctccctcaaccaccctacttcagaatacgatccccaggggtctgggccctccctgtcccccttgcctacttaatttttctccagaactttccagcatggtctgtccttttcttacatattttgttgtccgcctcctaaactccatgagggcagagttcattgtctgtcttgctcacttagaaatctctagcacagtcacttggcacagagtaggtgctcaataaatattgacctgagttgcattctgggtggatacagttagggacttggggtgaccaggggctcttgatggaacaaggcttttcccacagagcccactgcttgctcagccccagagatcctggctgacaagtgcctccttttggggccagactcctgggaaaaccccactcctccagtgacctgcatgtcggggagggagccacttaagtcccggcctctcctgaatggataaccagtgtatcttggaagactcttttttttttttttttttgagatggagtttcacttttgttgcccaggctggagtgtggtggcacaatcttggctcactgacacctctgcctccagggttcaagcaattctcgtgcctcagcctcctgagtagctgggattacaggagcacgccaccatgcctggctaatttttgtatttgtattttttttattttttgagacggagtctcactctgtcgctcaggctggagtgcaatggcgccatgttggatcactgtaacctctgcttcccgggttcaagagattctcctgccttagcctccccagtagctgggattacaggcagctcgccatcatgtccggctaatttttgtattttcgtagagacggggtttcactatgttggccaggctggtctcgaactcctgacctcaagtgatctgcccgcctcggcctcccaaagtgttgggattacaggcgtgagccaccgcgcccggctggaagaccctcaataataataattaataataataacagtaacagtggcaagcatttatgctcgctggcctttccccctgggtctgtattaagggcttcacatccaatatctcacttaaggctcagatcgttctgagacccattatgcccattttataccacattatacccattttaaagatgagaaaactgaggcttggagaatatcggtagtagccccaccatttcctgtgacttcctggagcctggcccacagaggagggttcaggacggacgctttccttccccgccctagggaagagggagggacgcgggcgctggcgtggaggttgggggagcctgagaggctcgggcgctgggtgcgcgggagggagcgtgcgtgcttggcgcgaaggctcctggcgcaggcgacccggctgccccgccgagcggtggctttccggaggggtggggcggccgcctcgggtcctgacgtcgggcgccctccggccgtcactcagcgctcggccccgccccgccgcggctgccgcagcagcgccgcggccggaggagctaccgccgccaccgccgccaccgcctcctgggactcggaacgcagcgctcggagccatggcctcggcccccgcgggtaagaggccgctggacacgagggcggcgggagggcagcgcccggcccccgcaccctctctcggctgacccgcggctctcgtttcttgtcccacagaggcggagacccgacagaggctgctacgcaccgtcaagaaggaggtgggtgccggggtgggggcactgggcaggactcccccggcagcagcggccaaacgggaaaagagtcttcgtggaagggtggcctctggcggcgggggggcggccagaacaggtgtggggctcacctgggtgggcattgacctcccgcagggcaggaggcgcagcgagggagtttgggggtgggcgtaggtgtggggaggctttggcccatttgaggctttttgcgggggcggatgcagcgtgagggccctccaggtgtggggcacacctggatgtatcccgataggacctcctcttgtggaggagcaggtgggcgcggctcaggaaggggaccttccaagagagagaagctgctagggggacgccccccacagggtgtgctggaggaggggctctgaatggggctgccgaaggtggggcacgcttcaggaaaaggcagaaggaaaataaaacctcccttcccagcccccgaattctcagtccttggagccacctccaagagccaggggactccctccctgagagtcacgggtcagtgagctgctcccctggcagtaggggtcccttcactccccccgccccactcccaccccacattcagagggtgagaatcagagaggttctgccattcctctgcccctccactctccttggggtcagcgcgtggagaggggggcagtctagtctttagggctcatggccaatgacctcccagaaccccatagacagaatttatagtccttggggtagcatctcgatgcctggactgcgtgctctggtgtgtatacctgcatgggtgaggacctgtggctgtgagtgtgtgcgtatgagaatgttgtgcatctgtctggagatacctaagtgtatctctttgcactgtgtgtacacgtatctatgtgtgtctttgtatctgtttttgtgagggtgggtctgtgtgtgtatattgtgtggtgcatgagtctgtgaatgagtgatgctgtgagtgtgtgtgtgtatcttgagtaggtgtgtggcatgtgatgcatgagtctgcatgaataactagggctgtgactccgtctgtgtgcgtgtgtcttgtgtgttgccctccccattcttcagtctcagaccccattgctgctgtgtcttcatcacttttgaaccttatcagcgcttagcccaaggccttgcatggcagcagacatcgtgggctggcctggtttctgggcctggctttcagtgtgtgtgtgtgtacatgcgtgcatgtgtgtgtatgtgttgggggtgttggctgaggtggcagcatcaagcatcactgatgacccctccttccctgcacagtggcagacagccaccaagggcagcctcgaggcttggacctgttgctgctcctccgtcctccgggagcatgagtatgtgcctgcgtgtgtgtgtgtgtgtgtgtgtgtgtctctgtgtgtggcatgtcctattttgtttaaagaatgagctccagggctgcttgcacattctagcattttcgaatgagacatgcaaaatacattggatccctcagaaaggcccagaagttttcagctcagcccttgtatagactcctgtgggtattccaagggagatccatctagaacctcttatcttttttttttcttggtgttttttttttttttttgagacggagtctcgctctgttgcccaggatagagtacagtggcacagtctccactcactaaaaactccacctcctgggttcacgccattctcctgcctcagcctcccaagtagctgagactacaggagccaccatgtccggctaattttttatttttttatttttagtagagacggggtttcaccacgttagccaggatggtctcgatctcctgacctcgtgatcgcctgcctcggcctcccaaagtgctggaattacaggcgtgagccactgctcccagcctagaacctcttttcaatagaactcacagaccaacaacatccttgtcactttcagtggaggggcatgtaccttacaaagcacctgctgtctttttgttcgtggtttaaccagacctacgtgtaatatgtgtccccgagatgtttttgcctggggtagctttgtttttaaggcaatggttggttgaatggggagggggctgcaggcagaagagaacaccagtaagacatctggggaaggctctggctgaggcccaggtcccagctcagctaccatcttcctcagtttcctgcgcaggttccttcttctctctaggagtcagtttctccatctgcagaaggatgcattagtatcagtgtcctctaaggtctgacccgtgtcagtctagtttgggtcttgggctcaaagagggggaataacttgcccaagagcacacagccaagatgggacagagttgggacttaccccccaggtctttttgatgtcagagccacactctgaccctcccatcccacaaacatgctcatccaaatctacacggtgccacaccttggacagaatgtgtgggcagtacagtttctactgtacagatgagaacactgtggcccagagacaataagtgacatttcaagggcacagaaccagtgtgagggaacaggttccgttcttctgtcttttgagttcctattcaacataggtaccctaagaacatggcaacaactcggtgccccccaaagcacgtctcccctgtcctttccttcctttgcttacctctttggggagcatctctctcagtgtcagagagccagtctctagtggaacagaagggaaagctctttgcctagaaatctgagagtcaaatcagatctccctcctccccactctctgggttcaaaggagccacatctctgcctgtcacagcctcacccagagactgcattgtatgtacacatatctacatgtgtctgtgtgtatatctgtcttctgtgtgtacatctgtttccccagccttctttctagaaggagtgccttaacaatcgacatctctagataggctgggcagctctgcaaggtttgccagagccactgcagccacgaaggggccaacagaggctgggagctggaaactgtccagtgctggcctggggagccagctggacacagcacccatgaggcaggtcaagaagaactttgggctcaactagagctggattccaaccccagatgtgtttatttactgagggctgtgtgtcagaccctgggctaggttctgtggatatagcagggacaggccccttgtagatgggccctgtccctgtcctcctggggctgaccttgcagcggaggaaacacactcccaacagttaccttatcaaaattacaaggataattacaggctgtgaacagagatgtgaaggagaggcacccggggctgcaagaacccaaaacagggacaactgaccatgtgcaggggcccaggatatgacgtttcagaagacaggtgcaagatgagtaggactttaaggtgaagataagagggttgagagacactaagaaaaaccattcctggcagaaggttttgtacatgcagaagctttgtggctggagggaacactgtgaatttgaaggaaccgaagtgaccggagcagagacaaaggagaaaggtgcagatgcggagaaggcggaacatgtggtcttatcgcaaaagcaagggaaaggaatggggaggacatcgagaacagggaaagaaggtgatggagctgaaattgctggcctgttcactgcacaatcttagacaagatctgtctttacctttatcagtgtgtgggtttccgtttattcataatggggatgaaaatgattcagctggcaagataaaccctgcgagaacacccaccacgttagcctgagctcctccagggcaagcatcctttttttttttccctctgtcctcggtaccaccaagagaaagctggaaacaaggtggcctcagcgtgatttcctccagttaaatctgaccagctctatcttggctccttcctggcttcctttaccctccctgccaacccttaattttgttttggttcccagagcgagcagggactggcttcccgttgccataacaactgccattaaaggagccagccatgtgatgccagttgataatggaagcaaagtgactaactgccttgttttcctgcctctgggctgggcctagaaagcctcttaattggaggggagaatgcaggggctggtgggaggcagatgagaccccaggaaggagacagggagatgaggcaggtcctggagtggaagctacatttagctctgcgaccggagctggtggaagggctgtaattggggagccatcatcatagctgctgaacagagcctgtttggagaactgagcctcccagcctctgggttaggggtgatgagatgggagaggcaggcaggacttgctaagaaggttggagaaaaacgagagaagcaattgacgttaccatggggaccctgcagttttactgtgacccagtggttcttaatgaaggggagcagttttgtctcccgtccctaggtttggttgccagataacatccaggtcgcccagttaaatttgactttcagataaacagtgagtaagtttttagtatgagtatgtgttgctaaatctggcaaccctactccaggggacatttggcaatgtctggaaacatttttggttgtcacagttgggggtgctatcagcatctagtgggaagaggccagggatgctgctcacattcctgcaatacacaagacaccccctcagcccaccaccactaggagcacaaagaagtggccagcccagaataactcttgttaaggcaggaaaatctgctccccgctcaccctacccatcctgcacctgctgcgcccttcacttctctaggctaatttgatacgaatgtactgttcttgaacaactcattcttactgcttttagattgtcttgaatgcatatttggagtctaaagccggggtgggggtgggcaggggcagggaacgaagtcttggctccctagccatgtcatttaggggaaacttccccagaatgcctcagtttctcacctgtaaaatggacttaggccatagaagagagattggactatgtaataacattagcaattcctggccgggcactgtggctcatgcctgtaatcccagccctttgggaggccaaggtgggatgatcacttcaggcttggagtttgggaccagcctgggcaacatagcaagacccccatctctacagaaaacaaaataaaaatagccaggcattgtggtgcatgcctgtagtcacagctatttgagaggctgaggcaggaggatcccttgagcccaggaagttgaggctgcagtgagctgtgatcgcatcactgcacttcagccaaggcaacagagcgagaccctgtctcaaaaaaaaaaaaaaaaattatgaccaggcatggtggctcatgcctgtaacagcactttgggaggccaagctgagtggatcacttgaggtcaggagttgaagaccagcctggcccaacatggtgaaacctcatctctacaaaaaatacaaaaattagccgggtgtggtagcatgcgcctgtaatctcagctactcgggatgctgaggcaggagaatcgcttgaacccgggaggtggaggtggcagggaactgagatggcgtcactgcacttcagcctgggtgacaaagcaagactccgtctcaaaaaaagaaaaaaaaaaagaaaagaaaaattaggcattcctaatttcctacgtgtttgctgggggcttctggcttcctctgtgctgggcattgtgccatgaactttctgagcattatccccttcactcctcataaaagccctaagggagagaaccatcatctctttccatgatagatgaggaactggaggcagagagatgttatgcagctcgctttaaggtcccactgtcagtccgtggagaagtcaggattcaaacctcatgttgccaagatctagggggatggcctcatgaccttggcttacagtgggcagtggtgggcagctatgagcttcagaaaagtccctggaaacacagcttggcttcaggcatgtgcaggggaaggaaatggggcaggaaaggtccattagtcccagcttgtgcagggctgtatgtgccaggctgtgccatttgaacttcccatagtggataatggggagctatagaagatttatgagcaagggagggttttgcttagggctgtacttcaggaagtttcagctaatagcagggaccaggatagacagtttctgccaactcttagaagaaaactttctccctccctctgttattttctttctcccccacttccattcttccttccttcctcccacaaatatttatcaagcatctactatgtgccaggccctgttctacaagctgcaaactgagaagtgagtaaagcaatgtctttgctcatatgccctcattcagtgtacagtatagtggcaggagggcatatagagaaaacaagaaatatgtattaaaggtaacaagagctccaaggaaaataacggctggaagagatgggaaaggcttgccagaggaggtggtcagggatggcctcactgatgggatggtgtttgagcagagacctgaaggaaggaagggagcagtgtcaacatctacaggaagtgtgtgcctggcagagggaatagcgtatgcagaggctgtgagttgggaacagaccagctgggaggccagtgaggctggagtgaagtaaacaagagtagagatgaggtttgagagagtgggaggctgattgttcaagaccttgtccatcgaaggcatcgaaggctttggctttgactctggtgagataggagccatgggagtattctgagcaggggaggaacaggcaagttttggggacaagttgagaggaagcaaagacaccagatcatcagataagacaggaaacgtctgcctttgctaagcttttccattcttgggctggaatcacagccccccacccactactcgccccactgtgccaaggagagactccaaaaatgcatgtgcttgaatgaatgcaggaatgccaggtgggctattttggggctctccgatgctggcaggattgactcaaatcagcttgcgtgtgtcgtgtttgctggcttaagagggcagaaacgctcctcatgaataatgcagccatatccacccgatgcgttttgatgctttttcaggtctctggcaacctggcttctgggagcttttgctagtgatgagcatctgtggcagcttaggcaccctggttcgatgtggtgaggatggcaggagggcccctggcttgcctggctgtgtctcttgtaccatatggctgggtctcccccagccacctcatgaggtgctccaggagctggtggtagcatttgttgctggctggccggtaggaaagggcattttggtcacccctaagggcccgcagttgctgtctgcagagcccaggatgggaggtgaggagacctgtgtccttgttccagttctgaccccaacaatgcttgtggctcctaacaggtcccttctcaaggtctcactttcctgctttctaagtggacgaggttggacagctccaggattccaagaacctcaactcatctaatttggccagtgtcactctctgagagccaagtctttgttttttccactctgaatttgccaagtatttattcaagactaattaaaactaagtagctggtaagacttttggagtgccttcagttcactcaaggaaaaccagggcttaactaatgtcattctaatgggataaagattaaaaaaacaaaacaaaacaaaacaaaacaaaaactagcatatactggcattttatattgatgacctcatttaattattgatcccccatgaagtagataaaatcccctcttttatggataaggaaatcgaggcacagagatggcaaggagttcgccctaaggtctcagagattgttgttggtacagcaaggggtctggctgcacaatcctcctctgtatcactcttgagctaaagccagcaatccacacagggttccaagctccaccgagagtgtggggtcagggagaaggccacaacagcaagggcctcaattaccactatgctatcactgtcaggcagttggcagtatttatggaggggtcaggcacaccgcgtggctcacccttttgggagtaagatggactcagtcccaaaaggacactttgccgccctttctggtcacatctgaacttaaaagatgccctcagcacaggatcttgctgtctctaggtaagccctgacctggaggtgctacagcccccagggcagtgctgtggaatttagtcagaagagatatttcttgaggtccaaagggacaagccctctaatgggctgagtcttggctggctgcatcgccatcatggggagggcagctgggtcttccctctgaggctggctgcccatcagctcctggagacagtccctcagcctaaggagctcagagtccctggtgactttcctggccctgcacttggttgctgtgcacccctggacaagggggctaagaatgctaaactcagatgtggggcagtgtatttttctttcacttagtgatatagaagatgagatgaatagatttctatgttttttctttgcacaattttgcaggaactcagattgtgggtatttgcaaagaacagtaacagttccttttgcagtaaggcctcattgagaaaatggatagctgaggtcctgagagttcaagagacttggtgatgttaccaaaatgctggggtgttggtgtgggtcctgctgctggccacacagaaggccaatcactgagataagtattgcccgggaagaagtctttagttgagtcccgcagccgaagagatgggagatcaggctcacatctatcttcctgaccaactaaactcagaggtttatatagcaggaagaaaatttaagtgcatggaagaaaactggaattagaggggctgggtgcagtggctcacgcctgtgattccagcactttgggaggccgaggcaggcggatcacgagttcaggagatcaggaccatcctggataacatggtgaaaccctgtctctactaaaaaaatacaaaaaaattagccgggcgtggtggcgggcgcctgtagtcccagctactcaggaggctgaggtaggagaatggcgtgaacctgggaagcagagcttggcagtgagacgagatggcgccactggagggcgaaagagtgagactgtgtctcaaaaaacaaacaaactggaattagagaggggtaaggaaaaggagttggtcagcaggaagcaggtggtgggttatgcagtcatgctgggtgaggggtgttgcatctctgtccagatgcaatgatctggtaagtttcagttccttgggggaggcctgatgtttggtttcctgagaaaggaactcagataagacaaatgtaactttctggagttttaaaactgggagggtcagtttctatgtatattcaaaagaaaccataaacattagttctatgggatagttgggccagtttcagtgatacttggggcattgaatgaattcctttttaattattattatttggtaaattatgcttacttggtaaattagaattgtagcaactaccatttaccaaatattgctgtaagtgctttgctgtctcatttaatccacaaaacaaccttcctacacagtaggtacgagtagcaactgctttttactgacaaggaaattcatgctcagagaggctaagaaactgaaccaggactacagagctgagaaacagcagagcagggtttgttagccagctccatcctccatccttttcaagtcggataaaccctgataaaactaggtagaatgataataaacataaacaaaatgagaaagtgaagctaaaaaattgatttcttttttttctttcttttttttttttttttttgagatggtgtctcgctctgttgcctaggctggagtgcagtggcacgatctcagctcactgcaacctctgcctcctgggttcaagcgattcttctgcctcagcctcctgagtagctgggaatacaggcatgcaccatcatgcctggctaatttttgtattgacagggtttcaccatattggccaggctggtctcgaactcctgaccttgtgatccgcctgccttggcctcccaaagcgctgggaaaaattgatttcttggtttaagtgtttgggaagttcaggtgcacctatatccaggggcgccaatgatgtcatcaggacactgtctcttgccatctctctgcattgccttcttctgttttggcattatgctcagcctctctgtggggaggtagagtgttgcccagcagctctaggggcacattctgccagcttggcatttctgcagaaaagaaaaccttctcttcctaagggttctagccaaagtcttgggatttggtctcactggaccactgtgggtcacttgcttcttttgtgccagtcacagtgggatggattgctccacttggtcatgggggggtgaggggtggagttagccctgtgagagtaaggaaacggacaccagaggagagttacggtgaaatcaccagacagggagatggaaggcaggcagacaaaccacagatgtccacatcaaagggctgagggcgcctgcatttggagctcagcctgtgatgcgggaggtatacactcctgtgctctgtgccttcctacagtcccgagtgctgcctggggatgtactatgtgccaggtgattatactggatcaaggatttctattctacgggtgtgcaaatccctgaagttgtagaaacatcttgtacttgctgtatggagagagtatcctcagatcctcagcttttttttttcttttttttttgagatggagtctcactctgtcgccaggctggagtgcagtggcgccatctcggctccctgcaacctccgcctcctgggttcaagcgattctcctgcctcagcctcctaagtagctgggattacaggtgcctgcaaccacgcctggctaatttttgtatttttagtagagactgggtttcaccatgttggtcaggcttgtctcgaactactgacctcgcgatcttcccacctcagcctccccaagtgctgggattacaggcgtgagccaccgctcccggccatgagtatcctcagctttcgtcaggacctctaagcaatccacaacccaaatacccaagtacggtttagcatcaccctgtgtcttgtttggggctggtgtaacaaagtaccgtgactgggtagcttcaaaacaacaggaattctctagtgactagaagtctgagatcagggcggcagcatggttggtatctggtgagggccttcttcctttttgcacactgcagacttttaatcatgtcctcacatggcagaaagggggtgagaggtctttggggtctcttttataagagcacaaatcccgacggggtgcagtggctcacgcctataatcccagcactttgggaggccgaggcgggtggatcacctgaggtcaggagttcgataccagcctggccaacatgatgaaaccctgtctctactgaaaatacaaaaattagccgggcgtggtggtgggcgcctgtaatcccagctactcaggaggctgaggcaggagaatcgcttcaacccaggaggcagaggtagcagtgagttgagaccatgccactgcactccagcctgggcaacagagcaagactctgtctcaaaaaaaaaaaaaataaaataaaataaaacaaacaaaaaacagtactaatcccatccaagagtcatcctcatggcttaaattacctcccagaagctcttcctcctaataccaccactttgggattaggattctatttatttacttatttatttagagacagagtcttgctccattgcccaggctggagtgcagtggtgcgatctcggctcaatgaagcctctgcctcccaggttcaagcgattctcctgcctcagcctcctgagtagctgggactacaggtgcctgccaccacatccggctaatttttgtatttttgtagagatggggtttcaccttgttggtcaggctggtcttgaacttctgacctcagatgatccacctgcctcggcctcccagagtgctgggattacaggtgtgagccaccgtgcccaggcgtggattaggacgttaaaatatgaattttagagggatatgccaaaacactgggtctgtaactccctgcagaacggtgtgatacagagatgattgcaatacggtttcctgtcctcagtgtgcccagaaatgaactggtacctcttagtttctaaaccagttccaataataatagctttctgataaaaataacaataattggccgggagcagtggctcacgcctgtaatcccagcactttgggagaccgaggcgggcggatcatgaggtcaggagatcgagacaatcctggctaacatgatgaaaccccatctctactaaaaatacaaaaaattagctcggtgtggcggtgtgtgcctgtagtcccagctactcgggaggctgaggcaggagaatggcatgaacctgggaggcggagcttgcagtgagcagagattgcaccactgcactccagcctgggcgacagagcaagactctgtcaaaaaaaaaaaaaaacaataatcacaaccccagtaataattataattagtatttattgggcacctactttgtccaggcctgccttgtcccagtatgttagccgcgagtcacaagtgcatatctgcatttcaatcaagttaaatttaaattaaattgaaaatgcagttcctcagtcacactagccatatttcaagtgcccagtagccacgtttggctgatgataacgtgggacagcacgggtatagagcatttctcaaaaagcctatcctgttccagacagtatgctatgcactttatatgcattagtgtatgtaatgtcaaaagaaagcaaacccaagaagcatcagagggaacagatgaggaaactgaggcccgaggtcacccagcaaatagcagagctggagattgacctgttgatgtttttacttacccagagtgcctcccttgatctggcaccagctatgtgctgggtcctgtttgaggccctctgcctctatttattatcccattttacagataagtactataaattgaagcacagagaagtgaagtgacttgcccaaggtcacacagctggtaagagatggagacaggatttgaaaccagtgttagacacactattggattgcttcttctaaggtcagatggaggtggttagtccttatctagaaaggtgataagtgctttctgatgtacctgtgtgtgttttaagcaataatttgggaatttccttttccgttttctgcagctgcccaaaccaccttcccctccacgcccccaagtttggctgtcttccagggatcttgggtgggctccaagtcttcgtgtatcttcctcatccatgaggcccctgggtctgtggagatgggggtgctgccagggaagccagacgcaagcagtgggcaggcacccaggaggaggctggccagtctccagggtgtgggctgggaatggaaaacgtgcaggctggcttctctggggatagaaggaggctggggagtgtcttcacagctccatcctctcctgtgcatgggcgtggcagcctgaaggacctttatacaagaatgtccccgagagaatgccttggaatcaggccccgggggagccttctggtcaaggggtgtctgaggaacctgggcagggtgataaggggaggctcatttgtaggaaccccagccccagaacaccccttccaggtcatggcaggttggctggccctcacactgtcacaggacaatgctggtgcctatttatagcaagccagtgaacgattaactcgggccaggttggcagcagccaagttagcggtgtttgcttctcccataagccccaataaccatgtttagggcaggttatgcggggaggaattggaggaagaatttttctaatactctaaaggtccacaggctcttatcatttttcattcccccctccccactgccacctatcccatggcctgtgtggctttgtttttgttacctatgctgtgtggaagtgacaggaaagatggaagggtgtggcaggagtggcgggggcacgtctgtcctaaaactgcatgtgagaggaagtccaggacaggaaactttgatccattcaccagcatttgctgagcgcctactgtgtaccagactctgtgctgggcatggcggagacaacagtgagcacaacaggtgagatccctgccttcagcctagagggcagaggcggataatgaccgtgcaaacagatgaagaaatgcgatgaattcagaaatggatgagaaaacagcaatgcagtggggagagagaggttgggatgagttgggtaggtggcagcttacctgggcagtcatggcaggcctctctgagatggtggcatttgatctcatatctttttttcttcctttcttttgctttctcctttttcctttcttgatggagtttcactcttgtcacccaggctggagcgcaatggcgtgatctcgactcactgcaacctccacctcctgggttcaagcgattctcctgcctcagcctcccgaatagccaggatgacaggcgcccgccatcatgcccagctaatttttgtatttttagtagagatggggtttgaccatgttagccaggctggtctcgaaatcctgacctcaggtcatccaccctcctcggcctcccaaagtgctgggattacaggcgtgagccatcgcgcccagcctgagccgatatcttgatgatgaaaacaagaggctgtgtagagaactaggaatggcagagggaatggcaggagcaaaagcactgaggcagggaggaacgtgcagcattggaggaaggcaagggagcaggaagtgaggaggagagagatgcgagacaggccagggacagagtgttcccctgaatgtccccctggggaggtggcagggaaggtttctgagctgacaccaccagacaccttctctacaaaagctccaaagtccattgcaagtcatggtgggctgcgggcacaggggatcccattgcaaaggaggcgcttggcctgtctgctgaaagtcgggatccctgctaacatcttccatgactgacagtgtgaggaaaggacattgctttcttattttcccccccaaagtctgtatttaagacttattaaagtcttattggagcagttataggttctcagaaaagctgagcagaaggtgcagagatttccctcatatcctcgaccctgccacatgtgcagcctaccccactgtcaacatcctcggccagagtggtacctttgttaggattaatgaacccacatggacgattatccctcagagtctgcagttgacatcggggttcactcttggtgctgtgcgttgtgtaggcttagacaaatgtctgagggcatgcatccgccatcacagtatcatgaggagagtgtttccactgccctgcaaacctcccatgctctacctgttcatctctctcttttttttttttttttttttgagacagagtcttgctctgttgcccaggctggagtgcagtggcacgatctcggctcactgcaacctccgcctcccaggttcacgccattcttctgcctcagcctcccgagtagctgggaccacaggtgcccgccaccacgcccggccaattttttttgtatttttagtagagacagggtttcactgagttagccaggatggtctcgatctcctgacctcctgatctgcccgcctcggcctcccaaagttctgggattacaggcgtgagccaccgcgcctggtctcatctctcttttctttccaacccctggcagcccctgatcttttcacatctccatagttttgcctcttccagaatgtcatattggaattgcatagtacatagtcttttcagattggcttctttcacttagtaaaaggcatttaagataggacatttctttttatcaccacgattcctcttggggagctgatgtggagcagagagggagccaggtggtgctgggcatgcagggagaggtgtactgtgaaaaatgatagccaagggcagaggtggagctggcaggtgccaccgtcccctggctctgggagcagcaagttggctgtgactgtgatgtttggtttcagagggctaagggagcaggtgcattggttgctctgccactggggtctccactgcaacatggggctccagagcaagagactttgatttaagtcccagcctcctcacaggtctgatggtctgatggtgtttgcctctcccaggacagctgcctcattgggaaaatgggaataataacaatgacacctacaatgcatggtagttgtgagtctttgggctcaagtgtgtaaagcacccagttgtgagaaacacccataggtgtctcttgaatgaatgaacaaacctactgtgtgccaggctcagtgcaggaaagacagtcctggatttgaatcttgccctgccatttctaagccttgtgctctcgggcaagtcatttcacctgaccggaactcagtttcctcatctgtaaagtaaagagggtaattgtactcatttcacagaaatactatggagattagatgagatcatacccccaggcatggtgccaggcactcagtaaacaacattttataaataaatgctggctatgacgacttaagacaaatgtataaagcactgagcatcgcagcaaatgttttaaatgtattgttttgccaggcgcggtggctcgcacctgtaatcccagcactttgggaggctgaggcaggcagatcacgaggtcaggaggttgagatatcctggctaacatggtgaaaccctgtctctaataaaaatacaaaaaattagctgggcgtgttggcaggtgcctgtagtcccagctactcaggaggctgaggcaggagaatgacgggaacctgggaggcggagcttgcagtgagccgaaattgcgccactgcactccagcctgggcaacagagcgagactccatctcaaaaataaaataaaataaaataaaatgaatttaaaaaaaaatattgtcttggctggacgcagtggctcatgcctgtaatcccagcactttgggaggccaaggcgggtggatcacttgaggccaggagttgaagaccagcctgggcaacattaaaaaaaaattaaccaggcaaggtggtgcgtacctatagtcccagctactcgggaggctgaggcgggaggattgtttgagcccaggagttcgaggctgccgtgagccatgatcgcgtcactgtactccagcctgggcaacacactctgtccctaaaaatatatttaaataaataaatgtattatcttacgccagtgaggcagatgctgatatcacccatttcacagatgggaaagctgaggttcagagaagggacaggatttacccaagatcatgcatggataagctgggattgggattctgggagtctgattccagagcctgatgcagcaggtgttactctaggagctcagaagatgggcaacctgcatggagtgctgggttcaggagggaatgcggagaggggcacgtgacttggccctgcaggactgggggatttttccagagctggagacagagctaggaatgggtgaggatatcaagtggaggggactgcatgggcaaggaccaggaggtgggagtcacctgggtcacacagaaggaatggcacatgtgaccagagcctagggtgtgggaagggaaagagacaggatttagcagggaaggaaggattggccacagcatagaaccaggcacagcttgtagggctgtggcaccgtctctccccttccccacaccccaagtctgttggtgtctgtgctttggagcgtgccaaaatactcctgtccccaccccatcaccatcaccagccccattccaacccctcccaactgtcacctcctgtgtgcctcaccctaatagatttaaaaattaaaagccaccagctctttccataggctgtttctccctgatacaatgtccttacatctgttccttcctttgagctccacggtggctatgtgggggcagtcacgggcgatttttttctctcctttacagtgggagaaactgagacccagagagttaacatatatttgttcttcagatcttgagccatcaccaccttcaggaagccctccctgaccttccccactacgctgtcaggtctggtttctttgttattcacctagaaccaaggtgcaaagaactggtctcactttgtaacgatttacccattttgtgattctgtttatatctttccatctccctggactgtaaggcttgcgaggacagggaccatgtctgcttgctcctcggtgcctgtctcgcaggagcactcgagaaatattgagtgcatgaatgacagttttggttcctgtgatatgtgcagggaaggaggtgttaatgggacatggaagaggcacacttatcccagcttaggggatggggagtccaggaaggcttctaggaggaggtgacaccttggctgaagcctgagttgcagctagccagctggagcattcggagaggggcacctggcagaaggcaccatgtgagcaatggtatggaagtgagcacatagtgccacctttggggaccagggctgagggtcagtggtccaggtagggctggagatgttggtccatgcaacttatcctgagagtcccaggtgcctgtcagagcagcagagtgacacagcctgccttctgctccttcccattgctccagtggtttttgagggacccttgagtcaccccctcttctccccgctgtgctcacttactaagttatttttattatttatgttttatgttttttgagacagagtctcactctgtcacccaggctgaagtgcagtggcatgatctcggctcactgcaacccctgcctcctgggttcacacgattctcctgtctcagtctccctagtagctgggattacaggcatgtgcctccacacctggctaatttttgtatttttagtagagacggggtgttaccgtattggccaggctggtctcgaactcctgacctcaggtgatccacccgcctcagcctcccaaagtgctgggattacaggcgtgaggcactgtggcgggcctgagagttatttttaaagccaccctgcagggccctccaggcatcccaatttaaccatcccctccactgccagtttcttccggaggtaagcgtcagggagcccatgtcataactgggtgctagctcagtggtcctcaccccacctgcatggtacttactccatctcaaccaccagagaccccaggtggggagtagaggtggggcgctctgattcagcaggcctcagaggagcaggggacagctggcccgggtgatttttatttagacctactgtgtgccacaagcactgtgctgggtgctttaaaccaggggtgtctgtgggccaaatgcaacctatttgtactttttaagggttgtaaaagcaaaagatactatgagatagattgtatgtgcctgaaaataggtttgccagttttagcaaatagaaatttaacaaataaaaataatttgccagatttggcaaataaaaattcagaatgccttgtttaaatttgaatttcagagaatcaatcaataatccatgtaatatttggagcatacctatactcaaaagattattctttgtttatctgaaattgacatttaactgggcaccctgtaattgatcaggcagtcctaccccaaaccctaaaacatttgctacccagccctttagagaaaaagttttctgatcccagctttaaatacgtatcaatgggatctagagccaagggggcttaggacactgcctggaaccaagctcagtaagcattagctgctggtgttagtgttactaatgtagtccgattatcgtcagcatttaccgagcacctgctgtgtggccaggcactgtcctgggggctcaagctcttcatgggagagatggatgctaaatagatgagcccagagatgtataaagagaggtcaagtgcatgagtcctaaggaagagtaagcagcagaggaaaagggtagcgatggcaggtgtgaggccctgttttagacaaggtgatcagggaggctctctgagggggagatattggagctgaccacagaatggagtgaggacgtggctttctgggggctacctcttttccagccctcatggtgtgcccggccctgttcaagtgctgtgtatgttttgctcatggtatcctcgcacagcagccctatgaggtgatgcaggtaccatccccgttacacagatgaggaaactgaggcccaaggtcacccagcaaatggcagagctggagactgacctgtttatgtttttacccccctagagtgcctcccttgatctggcaccggctgtgtgctgggtcctgtttgaggctctctgcctctattttctgcaatctttatgacagctccgcaccctggggcatgtaagtctcatctggggttcagaggagtaaacccagcccagtgtggggaggcagggatgagaagcaagttaatgtggaacctggcaggactcaaggtgggcagcggagggtacctgggtgtgggcaggtggcaggtgagaggactggagaagacagggcaggcccaggagacccagaatcccccttcctgcctcacggattgccctgggtttccctgcctggaattagcactcacttgccctgagtccctcctgagattaattctctttttatgctgtttaaatatttgcaggtggggagagggagggagggcggggctggtttctgaatggttgcagggtgtggctggacgtggtggggcaggtgctcagaggcctgacgtggagggacggggctgggctgcagccttggaggccagctaggtcctgactagccagcaggtgggaagcccagggaaggcggcactgagctgaaggacgcctcagcagccggccgttcacctgatgcccatgagcacctcctgggtagtccgtgtcatctcaagcacctctgtcatttgaagaatccctgctgtgtgtcaggcaccatctccaggatctcattcgggcctcctcaccttacccctaagagggaggggtgctgattaccacccacctcacttaacagatacccacatgacgttggaaacttgcccaacatcacacatacagtgaatagctgaggattcgactccaagtcagtgactccacattctgggctctcactctctcagctgcctcctgacaccctgtcctttatgctaatttgctggttccaaaaggaatgagctccccatcattggaggaatgcaagcagatgttggcggaccccttagagtggatgctggggagggataaaagcctcctgaccacctggacctttgtggacccctatctcctgaaaggccccctttgggtgtgattggtgcagtcttggcaggcaacccaggtctcctaactcccagtgtggtatttcctttggtcctcaagttgggagaagctgaggaatcccttctcatgggtttcctagcaccttgattttcagatgacccagtactgggtggggctggaggcagggcattaaggcaggccatacagagaggcctaggttcgagttccagcagtgccctttcctggctgtgtgaccctggggagaaattgcataaactttctgaggctcagtttatacacctttaaaatggggataataatgctcttttgaggattaaataagtattctataaaagcacctggcacgtagaggatgttcaagtaaggaactttgcaagagaaaagaaaacctcattaaaaagggggcaaatgacatgaacagacacttcgctaaaaaagacatgcatgcagccaacaagcacatgaaaaaaagctcaacatcactggtcgttagagaaatgcaaatcagaccacagtgagataccatctcacatcagtcagaatggccagggttgcagagaaaatggaatgcttacacacttttggtgggagtgtaaattagttcagtcattgtggaagacagcaataattcctcaaagacctaaagacagaaataccattcgatccagcaatcccattactgggtatataaccaaaggagtgtaaatcattctgttataaagacatatgcacgccagtgttcactgcagtactattcacaatagcgaaggcatggaatcaacttaaatgcccatcagtggtagactggataaagaaaatgtggtacgtatgcaccgtagaatattatgcagccacacaaaagaatgagattggctgggcgcagtggctcacgtctatgatcccagcactttgggaggctgaggcaggcggaacatgaggctaggagatcgagacaatcctggctaacacagtgaaaccccatctctattaaaaatacaaaaaaaaattagccgggcatggtggcgggcgcctgtagtcctagctactcgggaggctgaggcaggagaatggcgtgaacccgggaggtggagcttgcagggagccgagatcgtgccactgcactccagcctgggcgagagagtgaggctccatctcaaaagaaaaaaaaaaagtgagatcatatccttcgcaggagcaggagtggagatggaggccattatccttagcagactaatgcaaagcagaaaaacaaataccacatgttttcacttataaatgagagctaaatgatgagaacgtatggacacaaagaggggagcagcagacaccaaggcctatggaagggtggaaggtgggaggagcagaaaaaaataacttggctaatagactgagtacctggatgatgaaataatctgtacaacaaactcacgtgacatgagtttacctatataagagatctgtacgtgtacccttgaacttaaaacgtttgtttttctttaaaagcacatgttcaagtaaatattctcttacttaatcattcggttcaaaacagcctccagcttctgctgtgaggcaaggtattcattagaacaagggccctggatctgactcctgccacctttgagtaacctaggacagattacgtggggaaaaaaaaatctgtgcctcagtttccccatctataaaatggaatgatttggggactcacatcatctgggttgttgtggttatacacagttcctggaacgtagtgagtgtccagaaaaagtgaataatgagcttcaccaccataaagttcctacacacaggccacagtgatcccagaccaccactgcccctggaccaccccacactccctgggatctgtcagctttcaaagtggatcaagcccaagcccacatctgagagcctggaatggggagagggtgagctgaattccagctcttccttccagggctgcctggccctcttcccctgtccacagtctggtctgtgccccgggatgggttcggaggagtgtgtggcctcctctttcttcctgcatggagacaatgccctcttctgcagtgttcaagggtaataacctgttaccctccttgctaattaaccagccttttcaatttcatctcctggcctcgggctgtcagctcgggaagatactctagcctgtagctgggatatcaaactatcctgggagatatagccagtagctgggtagcaaaggtggaagaggtcttcacttggatcccgaccctcaggctgagaactacctgcacccttacccaggtgcagatccattcccagggtaagaaggttgcagccagcttcctggctgtgtgaccttaggagaggagcttaacctctctgagttttgagatccacagctgtaagtggacaaccttctccactctgcagcgtttggacttgagacagtgtgtgaatactgtcatgggggcaacaggaaatagatggctcccccaaacccagtacgttaaggcaaatttaataaaggggctattgactaaggtgggtgggaggaaggatgctgggagtccacaaggaaggatgtagtgccctgtggctgttaacattgggaaccaggaaccatcaccacccctgggtctgaaaggcgggagggagaggttaccagaaggaagcttttcctttcgcttgaactctaatgaactttgagcgtgcatgagaatcaccgggagggcttggtaaatgcctccagtagttggggaagggggttaggattagcatttgcatttccagccagttcctaggtgatgctgatgctgctggcccatgagtgagcagctctcctactgcatagcactttctctgaacctcttatctcatctgaccctctggctcactgcactaaaagcccctcctggacagggctgtgattccttccctgaggctctccacaccttgcacccagtatcacagccctgattagaggggctaggcttctgcatcctgtgtggctgaatttgcaggcattgcaccatttgcagcttgtctctattgacttggcccagacgggttcacgctgcaggttagtggtccttgatggagacggaggtcagcgtgcaggagggttaggaggaggtgctcttaggatcaacaccaggaggtggagcgcaggtgggttaggaggaggtgctcttaggatcaacaccaggaggtggagcgaagcaagcaggagaggcagagggagaagtcgggccatgatgcagcctcaggggaagcctcggccagccctgcggggagttccaaggggagctgggatggcctgtctgagttatcctgagttggggcaaagtggctggaggtttatacctcacatgcagcagtcattggatgtgcacctcccgggaaggagcaagaccttggaggaggctctctggatacctaaggcaatgtcatgtcccccatggggctgacagctgagggtctttgacagttctgatgggatctgggtggtgcaaggcagcaactacctcatcagccaaatttggccgaggagcctggaggcagtcagggccttctcacgctccctcctctgccctttcttcccatccttggttcccatggcccctgtaccccaaactcaactccttcctcaactccaaaacaaaaagccctcttgatatcctttgaacacacaggcccccagcggagacacctgcctatggctttgccaacagccggcctgtgcgtcttaatttttctcaaccaggccgtcctgtaatacagagaagtaaaagtccccaacgccccaacctagcgtgcactgaaatgaagaatcaacacatcagtgttgttaccctccaggtgcagtggttagaaagaggaaggggaagagactgtttgttctgtgttgtatcactgagtcctagagaggaggcctaggttggctgggtgcatcattcatcccacccagagagtcggggcagcagacgtctgcagggaggccccccggaatcctggctccctggctcagcccgtggctgtcttggggcaggcactccctcagctgtccaacacagtcctggggtttggagatttgatgagttagttcatctgatccctagatctgggtcagtgtgtggtgggaagaggcttcccttagaatcagattgaccagggtttaaacctcagatttgttgatgatcttgggcacctagtaaccaacatccctgatctttagtgatagtaactccctggggcatatgttatgaggattctgtttgctcgccatgtctgtgtggcaagtgccgggcacatatagataagagggttagtgttattttcagagatagtcattggctgaagcttctagaggtgcagttaagagtgtgggtttagcttccatttctgcccactatttactatatgaccttgggcatgttacttaatctttccttaatctttctgcccctcggtctcatcatctgagaactaggtatgaaatagaaactgtcctcacagcactgtggagagggcataatgagcgaataatacagatcaaacaaacctagatgccatctgttagctgagtctggcacacgagaagggcttggtcagagggagagatgatgaagatgatgaggatgatgaatatgatggtcatggtggtgccatcagtggatctgttacttcactagggctgcccttacggtacacagaatgggcagcttgaatgacataaactgattttctcacagctctggagatggaaatccaagatcaaggtagctgcaggactagttccctctgagctccatgagggaaggatcagatccaagcctccctccttggctcataggtggccatcttctccctgatcttcacatgatcttccctttgtagctgtgtctaaatttcctcttttttttttttcagacggcgtttcattcttgttgcccaggctggagacagtggcgcgatcttggctcactgcaacctctgcctcctgggttcaagcgattctcctgcctcagcctcccgagtagctgggattacaggcatccaccaccacgcccggctaatttttgtatttttagtagagatggggtttcaccatgttggccaggctggtctggaactcctgacctcaagtgatctaccctcctcggcctcccaaagtgctgggattacaggagtaagccaccatgcctggccaatttcctcttataaggacacttataatcatattggattaggacccaccctaatgacctcattttaacttagtcacctctgtcaagatctaatctccaaagacagcacattctgagatagtagtgttaagatttccacatgtgggccaggcgcggtggctcacacctgtaatcccagcactttgggaggctgaggcaggtggatcacgaggtcaagagatcgagaccatcctggccaacatggtgaaaccccatctctactaaaaatacaaaaatcagctgggcgtggtggccagtgcctgtagtcccagctacttgggaggctgaggcaggagaatcagttgaacccgggaggtggagcttgcagtgagttgagattgtgccactgcactccagcctggcgacagagcgagactccgtctcaaaaaaaaaaaaaagatttccacatatgaaatggaggtgaagggaacacagttaagcccatagcgatgggggaggtgacattttgcatgatgagattcccgagggtggaagaggcacgacaaaggaaaggaatggagaatgaaggcatgctagacagtgggaggtaggcacatctttgaggccagaggaataagtggggacaccctgaagggtggtgctcacttgagggcgtctgctagttggtgacagagctagaactttccaaggttggcagctcctcttcccaccctctcaccatgtgctctggagaaagctaggggtttgccacatgtcctgagcaagctcatggcttccttttgtggagagaacagatggggcccagtagcctctgctcactatgagggaggacacaggcaggtggccgcgctcctgcatcagagcctctctggaggtgacagcagatggttgcctccaaggaacaggatgttggcaggatggctacaaccttaagagagggccagccactgtgtatgggagttgtcagtcacgtcagcactgaccctgagagctgtccccgactgcagaccacctaagtaggccgtctgggccatgactcaggatacaggagcagtttccttggctggagctgcgaagtagaccagcctgctggagccaaacattcttgtgcagggttggccctcgggccaaatccagccttccactggtttttgtgaataaagttttattgggacacagccatgcccattcatttatgtattatctatggctgctttcatgctacaagggcagagtttaatagttgacatggagatcatattacccacaaagcagacattatttactctgtagacctttacagaaaaagtttgccgggtacatggaatgggcagcttgaacgacataaactgattttctcacagctctggagataggaatcaaagatcaaggtgtctacaggaccacttccttctgaactctgtgagggaaggatctgatccaagtctccctccttggcttataggtggccatcttctccctgatcttcacatgatcttcactttgtatatacgtctaaatttcctttttttttttttttattgtgacggagtttcattcttgttgcccaggctggtcctctgttttggagtctgaagtcttagatgtcaggcctggccctggatcttcctggttatgctgatttagaggaatgtcccctgccctctgagtctcaattgcctcctctgccagcggggattgtattcgcgtgatgttgtgaggcaaggtaggctggagagagctttgcaaactgcgactcactcaagacatacgttattctctgcgttcaacctgcctattgcctcctccccctcctttcctcctaggcaaaactcttttcatacctgctccatactgcccttggtggtgatgtttccccctgcaaagttaattttgctgtttcttcttaacttgatttttacctgcataaacatgcctgatgcagggaggtgggatgcacagaccagatgtaacttgttccagggcagcgggggtgtctctgtcatcattattcaaatgctactgattgttgagcacacaccgtgtaccaagccctatgctaaatgctttacctgcgtcgcctcatctaaacctccccattcattcaacagatagatattgagtgcatgctctgtgccaggccctctgctgggtcttgggagtagagcaccaccagatggcaggatgaattcctgacctcatagagcgtagaggccattacgtcagagagttagggaataaggtaaataagcaaaatcatgtagcgtggtggacatgtgaaggactatggagagaaaaaaggcagaaaaaggggtatgttgggtaccaagtggggtgcaggttggggagttgcaattttaaataggatcgtcagggaaggtgacatttgaagaaagagttgagattgctgggaaaagagcattccaggcaaagggaacaggaattgcagaggacatgagatgggctctgcccacggagctgggcaagcagcaaggaggcctgtgtgtgtagagcaggtgttgggatgggggagaggggcttgggaggtcagcagaggggcctccttgtgtgaggtggtgaggacttgggttgtcactctgggtgagacgggagccatggaagagttctgggcagaggagggacgtggtttgatagaacttttctttaactgaaaaatattcatttatttatactatgtgaacatataccatatgcacattttaaaatggtaaaatatacataatataaaatgtgccttcttaaccatttttaagtgtacaattcagtcttgagtacatttacattcttgtgtgccaacctccagatctcttttcgaaagataaactctatacccattaaataatgcctccccatttctcctctccccagcccctggcaaccaccattctcctttctttctctttaaatttgactactctaagtacctcttataagtggaatcatgcagcatttgttattttgcgtctagattatttcacttagcacagcgtcctcaaggttcattcgtattttggcatgtgtcagaatttccttcctttttaaggctggatagtattccattgtgtgtgtagaccacattttgtctatccattcagccatcgaaggacacttgggttgtttccaccttttggctactgtgaataatagtgctgtgaacatgggtatacaaatatgactttgagactctgccttcagttcttttgggtgtatgcccagaagtggaatgactggatgatatgctaattgtatggttaatcttttgaagaaccaccatactgtctaccatagcagctgcaccatttcaccttctgatcattgcacaagggttccagtttctccacatccccaccaacacttactttctgttttttcatagcagccatcctaataggtgtgagtggtatctcattgtggttttgatttgcatttcccattgaacatctttccatgtgcttgttcgtcatttgcacatcttcttcagagaaatgcctattcaagtcctttgtccatttttgaattcagttgtttgttgttgagttgcagttctccatatattctggacattaaccctttatcacatagatgatttgcagatattttcttctatttcacgggttgccgttttcactgtttattttgttctttgatccacaaaaagttttaactttgctgtccagtttacctatttttaattttgttgctcatgcatttggtgtcatatccaagaaatcattgtcaaatccaatgttgtagggaccagccccacagggtcggtgggtctctccctgtgtgcggcaacaagagagtgtagaaataaagacacaagacaaagagacaagagaaaaggcagctgggcccgggggaccactaccaccaatgcacggagaccggtagtggccccaaatgtctggctgcactgttatttattggatacaaggcagaaggggcagggtaaagaatgtgagtcacctccaatgataggtaaggtcacgtgggtcacatgtccactggacagggggcccttccctgcctggcagctgaggcagagagagagaggagacagagagaaagacagcttatgccattatttctgcatatcagggactattagtattttcactaatttactactgctatctagaaggcagagccaggtgtacaggatgaaacatgaaggcagactaggagtgtgaccactgaagcacagcatcacagggagacggttaggcctccagataactgcgggcgagcctgactgatgtcaggccctccacaagaggtggaggagcagagtcttctctaaactcccccggggaaagggagacccccccccccccctttcccagtctgctaagtagcgggtgttgttccttgacaccttttgctaccgctggaccacgatccgcctggtaacgggcgtcttcccagatgctggcatcactgctagaccaaggagccctctggtggccctgtccgggcataactgaaggcttgcactcttgtctaatggtcacacctcactatgtcccctcagctcctatctctgtatggcctggtttttcctaggctatgattatagagtgaggattatcataatattggaataaaaagtaactgctacaaactaatgattaatgatattcatatataatcatatctaagatctatatctggtataactattcttgttttatattttattatactggaacagctcgtgtcctctgtctcttgcctcggtgcctgggtggcttgccacccacacaatgtcatgaagctttctccgttttcttgtatgatttttatagttttagcttgtgttgaagtctttggtccattttactttaatttctgtatgtggtataaggtaagggtccaattttattcttttgtatgtagctatccagttttcccaacaccatttgttttaaagactatccttttgttaccaaaacaccagggatttggtctaggtcctgctgatcactgcacagaaagccgatcactgagatgacaagtattgccaaggaagaagggtttaattgggtgctgcagctgaagagaagggagctcagtctcaaatccatctccctgactgactaaaactaggtgtttatatagccaggaagaaatgcaacaatgtgtaagaaaacaagaactagggagcacaaggaagcaaacatggtgaatgagtgggttcccttccatctgtgatctggtgagtttcagttctttgatactttttttgacaggcctgaaggaccttctctgaggaaggaactcagataaatacaagtttcaagctttttaagaccacaagggtcaatttctatgtttatcaaaaaggacagtttatggggtagttgggtcagtttcactttcttctttgaatgggcatgacacccttgacaaaaatcatttgattatatatgtgaggttttagttctgggctctctattccatttgtctaaatgtgtgtttttttttaatgacagtaccacattgttttgatttctgtagttttgttataagtttttaaatcaggaagtatgagacctcgaacttcattcttcttgttgaagatttttcaagaatatttttcaagactgtttgatagtcagggttccatgagatgttccttgatattaattttaggatagatatttatgtttctgcaaaaaaaaaagcaccattgggattttgatagaaatttcattaaatctgtcgattactttggtaatatcaacattttaggagtatgaagtcttggaaaccataaacagaggatgcctttccatttatttgtcttgtttttattttgagatagagtcttgctcatttgtccaagctggagtgcagtagtgtgatcatggctcactgcagcctcaacctcctgggctcaagctatcctcccacctcagcctctcaagtagctggattgcaggcacatgccaccatgcctggctagtttttgtatttttgtatttttttgtagaagttgggtttcactgtgttgcccagactggtttcaaactcctaggcccaagtgatccttttgcctcagcctcccaaagtgctgggattataggcatgagcaactggacagtgaccgaccatgttcttttaatatgctgttgaattctgtttttagcattttgttgaggattcttgcatgcatatttatcatagatattggtctgtagtttttttgtgactggctttggtttcaaggtagccctgaccttataaaatgagtttggaagtgctcctgcctctttaatatttttggaagaatttgagaagaattagtttaattattttcatgtttggtagaattcagcagtgaagccatgtggtcctgggcttctcattattggagggttttaacttactgatagcatctccctgctatgatacatctgttaaaattttctatttcttcatgatttagtttgtatattgtgtgtttctaagaatttattcatcttatctaggttatccaatttgttggcatacatttatttgtttatagtattctcttataatggttttttctgtggcatcagttgtaatgtcctcattttcatttctgattttaattttgagaattcttttttttcttagtcaatcttgctaatggtttgtcagttttgtcgatcttttggacaaaccatctctcttttttttttttttttttttgagatgatatcttgctctgtcacccaggctggagtgctggagtgcagtggcgcgatctcagctcactgcaagctccgcctcccaggttcacgtcattctcctgcctcagcctcccgagtagctgggactacaggtgcccgccactatgcccagctaattttttgtatttttttagtagagacggggtttcactgtgttagccaggatggtctcgatctcctgacctcgtgatctgcctgcatcagccttccagattgctgggattacaggtgtgagccaccacgcccggcctgggcaaaacatgtcttgattttgttagttttctctgtttttaaattatctttcatttatggctgctctaatctttattttttaatttttgaatttttaatttttatgtatttattttgagaggcagtctcactctgtcacccaagctgaagtgcaatagtgcgttctcggctcactgcagcctccacctcccgggttcaagcaattctcccacctcagtctcccaaatagctgggattacaggcatccaccatcatgtccggctaatttttgtattttagtagagacagggtttcaccatgttggccaggctggtcttgaactcctgacctcaggtaatccgcccgcctcagcctcccaaagtgctgggattacaggtgtgagccaccatgcccagcctaatctttattatttccttctttctgctagctgtggatttagtttgttcttctttttcttgttccttaaggtgtgcaggtaacttgtttctttgagatctttcttattttaatgtaagcatttccagctgtaagttccttcttagcactgcttttatagcagcccatattgtgtttttgtttttattggccatgttgtgtttttgttttgttttgttttgttttttaagacggagtctcgctctttcacccaggccggactgcagtggcgctatctcggctcactgcaagctccgccacccgggttcacaccattctcttgcctcagcctctcgagtagctgggactacaggcgcccaccaccacgcccggctaattttttgtatttttagtagagacggggtttcaccgtgttagccaagatggtctcgatctcctgaccttgtgatccgcccgccttggcctcccaaagtgctgggattacaggcgtgagccaccgtgccctgctgtgtttttgtttttatttatctcaatatattttctaatttcccttgagatttcttctttgacacatttattatttaagagtacactgtttatgactcttatttgtgggttttctagttttccttctgctgttgatttcttgtttcattccattgtgaatgacaaagatgctttgtatgatctcatttttaaaaaaaatgtatgatgactagttttgtatcctaagatattctctctcctggagaatgttccatgtgcacttgagaaaagtgggcatcctgccatcattaggtggagtgttctgtacatatctgttaagtccagttgttggtttatagtgtagctcaaggcctctgtttccttattgatattctgtctggttgttctattgacttaccttttaacgagatccttctggctgtattaaaatgagcttcttagaagtggatgcagggagaccagtaagagtctacagcattgattcaggggagaggtgatggtgacttggactgggaggtggtggtggaggggctgagaaacggttggaatctgagaacattttgaaggtacaaccaacatatttgactgaatctttagaagttggtgctgttttttgtttgttttttgtttttgagatggaatctcgctctatcgccaggctggagtgcagtggcacgatctcggcttactgcaacctctgcctcccaagtactgttgtcctaagggggtaaaggaatttgcccaagttgtgataagtgtctcatccaggatttgaacccaggtctgtctgtccccaaattctcagttcttaattaaccatgtacattcatgaaagtgctcctgacccagctgcctggactcccccacccccaatgtctccctgacagtcctctaccatctacgactaagcctggactcactccctctgttgctacattcccaaatgtcatcagggtctgggtgcttggcaactgccttccagcagtttctcagcatcaccgtgtcctgccttagaggagcaaaggaaagaaagaggtagattcctgcagaggggagagaggtgtgcaaacgctctgagaccacctgggcttcatgacatgttgcagaaggagctcagcccctggagtcagacaaacctgggtccaaacaccaaatccagtcctcatagctgtgtgaccccagacagattactccacctctctgggcctctgtttcctcccctgacaaatagggataataatgttactgctctattatccacaattatggttataagaaaatatatattttttttcaaataaaatactctaccaaagcctgaggtcaatcatgattctttgagccattcattttccaaagagaactttattgagcacataccatgtgctggaactcaaggtagttgttggcaccatagccataaagcaaggaaacacagaatggttgccctcatggggatcagagcctggcagggaaaacaagtactgaccaaatgttacacgtctgatgggtgtttcaagagcagcttctctaggaacccaagcaggggaatttgatgtcctgaaccagcgacattccagccagggccaaaataacggtgatgggaggccagggaaggtttcaggcagagctgatgacctgcatgcagccgacatttatttgcagcacattttgcagacatttattgcgtgccaggttctgtgctcagcacatgatgatcattatcttgttcagccttcccaagtgccttgaagctggtgctatttctataaactttttagccaaggagaaaactaaggttcagagaagtgacatgatttgcctgaggaaacacagctaatagtgggaggagccaaggtacagcagcaggagccatgatgggagaaaaaaaaaagaaagtgataagtttcaatttctactctgctccttcctaccctgtgaccttgagtggtccggtttgcctccacgagactccatttccacatctgcaaaatgaagccaacttctcatgggcctccctagatagttttcagggttagaaatgctgcaggcaatgcccagcttggagttggtggagcactgaaatcaggagctgttcacagcgctggtgctgacttggttgtgtggggtgggggtggtgagccagctctagggggacactgccatgtgtttctgcagagaaggtggacagggatgcaccaaactgtgttcatctccaggaggtaaccagaaggcagggagagcaggcagggagggcctgggacagctctcagatggatgcatggatgtgctggcctggtggagtctggatgggccacaggacagtgggaaacgctgtgggttccactgggtgggggtaactcagaactttgctttatttaccccaaacatcagaatcctcagggtgacatagagctggaacaggccttttggattgttttccaacctcctcaacctcaaagtggggtaactgaggtccagagaggagacggactttgcttaaatcctacaatgactctgggcagaatcaggcccagaatctagtggagcagaaggtattcaggctgccagaggatcaacaccaagagcagagaggcacagctgcccttttgcactgtgtccctgtgcctggcacattagaggcactcaggtgagaattcttgagcaagggagtgcgcagggaagagcacacagcctgggtgtctgtctcgagctggaacctgtctctgatagccagctctgcctccctgggtaagtgctttcatcttgctgagcatccatttcccaaaataagatcagaaacccacttgggaggtctccaagcagggatttgaactcaggtctacctgattccagggcaggtttttttaccctgcactttcttgattcctttatatatcttattcattcatacactgattcattcattcatccagtcatttagaaaatgttgattgagcatctgccctgtgccaggcactgttctaggctgtgcaaattcagcagtgaatgaggcaaatgaagtttctgcccttgtggaacttaaattctagaagagagagatagacggtcaacaaatcaacaaatagaatgggaatagtggtagactgggcgcggcggctcacgcatgtaatccaagcacttttggaggccgaggcgggcagatcacttgaggtcaggagttcaagacaacatagtgaaaccccgtctgtactaaaaatagaaaagttagctagacgtggtggtgggcacttgtaatcccagctactcggaaggcagaggcaggagaatggcttgaacccgggaggcggaggttgcgatgagccaagattgtgccattgcactccagccggggcaacaagagcgaaactccgtctaaaaaaaaaaagaatgagaatagtggtgagtgccctacaggaactaaaacaggggatgggactggggaggggtctgccttagacagtgtggtcaggaaaggagatgacgttttgtgagatgcctaagagaagcagcagcctgctgtgtgaagaacctgaacgaataattgataaaatgagaagcatggagctgtgacaggcctcagacctccaaaagacaaggcgaggagggggaaggaaagcaggtgtcaaaacatcccaaacagcctgaaaggccttgtggggagcaatgcagcccttttggggcacctatacccaggtcaccttggtcaccttggacctcttcccctccggtcacctttgccttccaggtgaagcagatcatggaggaggctgtgacacgcaagtttgtccacgaagacagcagccacatcatctccttctgtggtgagtctgtgacctgggaaagtggcttctttctctgtgggctgcctcggggaagtggtgtcttggagccactgttttgctttatgactctgaagttagttttggattccagagggggactcgattggagaatttgaaaatacagaacagtgtagagaaacaattaaaaatgacttctgtaccccatgaagaggtcagtgtggttaacaccagaggggttgtcttcctgtaggcaccattcacaccgaccacaccccaagtgacacacagtcttgcatctgaggaatgggctccctgtccctcactctgcctgtggctattgctaggtaaagggagagggtagatggggacttttaaaaaagggaactaagagcccgtgacacatcctgaaggatcgcgtccatctggctcagcaaagaaggcaggccgagggctcagagcgtgactcagacatgtctccttgaaccagctctgctcacaagcttctggaaataaccccatggccaggcttttgctgtactttgagaatggctagagatggggtctgagtgtctctgaggtcaggataatcagtgtgtacatagaagtgggagtctttctgtctccctgaaaatgtcttaatttaataattggagtgtctcataatgcaggacatgttctaattcccctcccgtgatcttggtcctgtggagaggcctgagctgggagagctggccagcccatcagctgccgtccaaatggctgggggcaccaccccacggggcccacaacatgctgagcacacgctgtgacccgggaggcaaggacctcagttcaccctctcttcagccaggcagacctggatccacctctgccgctttcttgggaggcaaggacctcagttcaccctctcttcaggcaggcagacctggatccacctctgctgctttcttgtaattgactttgggcaagatctttcttttcttttcttttctttctttctttctttctttctttctttctttctttctttctttctttctttctttctttctttcttcatttctttctctctttctctctttctttctttttttttttttttgagacaggatctcactctgtcacccaggctggagtgcagtggcacaatcacagctcactgcagcctcaacctcctgggctcaagcgtacctcccaccttagcttcccgagtagctgggaccacaagtatgtgccaccatacctggctaattttaaatttttctgtaaagatggagtcttgccatgttgtcagggctggtcttgaattcctaggttcaagcattcctctctccttggcttcccaaaatgaagatcttatttttttttaagtgggatgtgtttatttaaacatatagctctacacacatacacacatgcacataattacatacatatatgtatgtgtatatatacatatatatgtattcccagttttttatgtgttcctgaatatttttatttccaaataaaattatatgcatgtccatcttaagacttgctagcctacctaccaattaacttagaggaataaaagtaataaaaatagtataataattcagtagctctactcaaaagtatttgggtgggagaaatttgatggcactaaatgaagcctaaagaatctcctcaaggtttcttttgtccattgtttcttataagctgttgtcaggaaggattaaactatgtctacaaagcctgaatagtcagttcacttacatcgccataagcaaatgaaaagtactgcatatgtaagttaaaattaagatatctaagagatcatctcctcaaatattttaaatctatgggcagattaggcaatatttgtttttttgtttgtttgttttttggggttttttttttttgagacggagtctcgctctgtcgcccaggctggagtgcagtggcgcgatctcagctcactgcaagctccacctcccaggttcatgccattctcctgcctcagcctcctgagtagctgggactacaggcggccgcccccacacctggctaatttcttatatttttagtagaggcggggtttcactgtgttagccaggatggtctcgatctcctgacctcgctctccagcacccagcatgtcccagatctgcccgccttggcctcccaaagtgctgggattacagacgtgagccactgcgcctggcccgagattaggcaatatttgatcattcattcaaaacaaagtgttttctaactcaaaaaaacaaaacaaaacaaaaacaaacaaaaaaccatggtgatgagaccaaaacttctcaatatttctccttgcacgtagcataaccttggtcaagctatgccccctgagagcactggtttgctctttagagctcttacttcatgagttttgtcacaagaattaggaaaggtaagtcttaacaattatccgacacccagcagatgcctaataaggagtacttcttatatagtcactttttcaataaacattgattatgcacctatacaagtgtgagctccctgtctctggggtaagacagaaggtaagaagattgagagggctctccaaggttccagtgtctgacagaagctctgggacatgctgggtgctggagtgcatgggcagggcagggtctgctgactgccatgtccctgcagcggctgtggaggcctgcgttctgcacgggcttcggcggcgggcggctggcttcctacgcagcaataagattgcagccctctttatgaaagtgggcaagaacttcccgccggctgaggatctgagccgcaaggtgcaagacctggagcagctgatcgagagcgcgtgagtgcaaagcatggggcacaggtgggagcagctcccccaatagtccacagtcctccctgggtcctgagagagcctgcaacccctagcactcttttcagtctccatcctgcttctcaaacccaccagactctttcccaccccagggtctttgcacgtgcctcaccctccaccagactcacccatctgatcgtccatagctgctttcttgtcatcattcagacctatcgttatctcagaaaattccaactctcactccatcttctcttccatatcaccctgtttatttccctccccgttgttgttggttggccatctatagttattcatgtcaggtttgtttgtttgttgtctgtctatctcacttgatgcagaacttcatgagagcaggcaactagatctgttttctcccattatgtctcaagcatccgggccagtgtctagcacctggtagatgcccaagaaacaattgttgagtgagtgcctgctaggacccacggcctgttctaaatgcaaggcaaccaaagtttgatagaaccaatatggcctctgtctgcatggaccagacacgagggcctcatatcaataggcatattataacacattcaaatacactgactagaagttaaaaaaaaaactctcatactgaagtaacctttgaatgggggaggtggcttccctccctcatcttggtgactggtggtatgtgttgggggaggctcatggacagaatgtgtgcatgtgagcaccttcagccagagccactccctgggaggtcctgtctgcacagccaaacccccagtctacagcctggtcagggaatgacaatttggtttcaactcctggcaacaaattcggtgctggtggcttcccagaggaatgtgctgtgattctgaagctgtgattgggcgttctggggaaaagcacatggattgattggtcatgtctgtcaagggcaaaggcagggaagacacaagcatgtcctatgtttgcagtctctgctgtggatggtcactccacttcactggatgagaatggccctttccttgcatttcaggccctgcctgcccagggctgctggccagaacggtatggtggtcagagctcaggatttgactctgtcaactcccatttggaatgacttctcagccaactgttctttgaataccttccagtccatctgctaagttcccaggtgtttgcagataacttcttaaaggattagatttgtcatgggccttccacaacactgggagtgacctcctagtggaggagttagagatgcctgtgcaagtggtaagggagaagcatttattcatatatgcaatcactcattcataaacatttactaagcttcctctatacgtcagccagtgtgctgggccctggagatacagaaatgaagagggccaatgcttgccacatggtagactctcagtaagtattttattaaaaaaaaaaaaaaaatgagttgcggccaggtgcggtggctcatgcctgtagtcccagcactttgggaggccaaggtgggcagatcacctgaggtcaggagttcaagaccagcctgaccaacatggagaaaccctgtctctactaaaaatacaaaattagctgggcgtggtggtgcatgcctgtaatcccagctacttgggaggctgaggcaggagaatcgcttgaacccaggaggcagaggttgtggtgagccgaattgtgccattgcactccagcctgggcaacaagagtgaaactccgtctcaaaacaacaacaaaaaaaatgagttgccgatttcatatcctcaagatcaaagcatggaggggacgacagaaaagtgagcagggagctcagctccagaggctgacagagtacagaccagctttggttggtccaggagggcttcctgtaggcaggaggcaatgccctcgctgagacttacagagtgagagggatcagcctgggaatgggtggggagggaacccggaagaagcggcagcccagggaaaggcttcagatgagactctggtggcctcaggcatctgcacgtatctctgtctggctggatcatggagtcataagcgttagtggtaaggagattgctggagaggtgagtgggacaaggtcttggagctctctgctggtcttgttgaagagcttgcttcccaagggcactggggacccaatgaaggatctatactccaagactcttcttggcccaccctcctttccaggagagagaggtggggggtatcagtatgagaatctggcttgccctaggaaagtgtcttgtttaaccacatctgcacactcactgggtattactattttttcaactcctgaccagcttgctagcggcaatatgggctcttcttgtttagctgccattccttcattttcctgagagattgaacattctcccatttgccaattagtcctgtgtagatttgctcttgtgagtatctattcccgtcttttattggtcttgaaggagaaaccagattcaaggcctccaggagaatgtgcggaagctgccgaagctgcccaacttgtccccacttgccatcaagcatctgtggattcgcacagccttgtttgagaaggtcctggacaaaattgtgcattaccttgtggaaaacagcaggtgagagggaaagacctgacacctggccatgctctgcccccacctgccggccgttgtggaaattgcaccccctggcacaaagctgctttctttttccccttgacagccactaaatttgaaagtgattaaatgcttggaaacttgggtagattcaagagcttaatggcagtgcaaggtcttcggatttagggtggagtatagggatcctgggtttcttccttctcctgtggattactccattcaataactgtgtggccctagagaatcgcttagcctctctgtgcccgttatctcttttggtaaatggcatggggattcccgatactccagagaagtgagaagggaatttggtgaatatgcagcattttgcaaatgcatggtgaggctgggcgcaatggctcacgcctgtaatcccagcactttgggaggccgaggcaggtggatcacgaggtcaggagatcaagaccatcctgactaatgcggtgaaaccccgtctctactaaaaatacaaaaacaaaattagccgggcgtggtggcaggtgtctgtagctccagctactcaggaggctgaggcaggagaatggtgtgaacccgggaggtagagcttgcagtgagctgagattgcgccactgcactccagtctgggcaacagagcaagactccatctcaaaaaaaaaaaaaaaaaaagaaaaaaagaaaatgcatggtgagcctttttaacgttttctccactagtttagattaatctgatgtgaaagttttatagtgtgagccctcttgggtaaccattcatccatgcattcattcatccagcaaatatttaaatgaggacctgctgtgtactggcattaacctagacgtcagggatatagtggtgatacctttcatgtcacagagcttgtatatcatcgcaagagcagtgaggagccatggaagaatttatcatctgacactccttgtggccagcatgcctctccagcccccaagaggtggcaggaagggaggggggggtggggggagagagagagagagagagagagagagagagagagaaatatctcagaatctctccatctttcagaatatgaaagtgctggcttaaccacatcttcacacagtggatgtttttattatcattctttgcccctttgcaaggaaaatatgcatgaaagtggagagaaaagtcccccttctcatgaagttcacgtgcttgtaaggaaaaccagccaacagtcatgctgataatacctgatggatgttccaagggggcgtggtggcgttgataattttctcccagtggtcagggaaagtgtcctggatggcgcaacggttaagcttccatttgaagagcatggaggcattagccaggtgatgggatggggaacaaagtgtttctggtggagggaatagcaggtgcagaggcctagagacaggaaagaaactgcaagaaatccaagctctggatctccagttccctatttaccttctagtaataacatgtctctgcctcctgccccatgaaggtttctgggcctctttaattattgcctttggcatatgaccttgagcatatgacctgctgattaagttggtcaaagggaattagtaatttatttgagaagcaatgtcaacctgctttttttccatttcaactttttatttttaatttacatttacatagaagttgcaaaattagtacagagattactaattgcctaaccccaatgataacattttacatacccatagtgcagtgatcaaaaccaggaaattgacattggtacaatactattaactaactgcaaaacttttttggatttcatcaatttttatatttactgaatttttttatacagttctatgaaacttttaacgcatgtgtagtttcatataacccacatcaccatcaggatacagaattattccgaaataaacctcatcaccccaaagaaactcccttcagctacttcttacagtcacacctcggttccaactctacctgctaatttttaaatttatttttatttttgagatggagtctcactctgttgcccaggttggagtagaatggtgtaatcttgactcactgcaacctctgcgtcccgtgttcaagcgattctcatgcctcagcctcccaagtagctggttttacaggcatgcaccaccactcctggctaatttagtatttttagtagaaacagggtttcaccatattgggcagactggtctcgaactcctggcctcaggtgatgctcccaccttggcctcccaaagtgctgggattacaagcatgagccactgtgcctggtcgttttttatttattttgagacccctacttgctgatttttaaggcagcatgttcaaagtttttgatcgtataattctgctgatttttagaaactgggtgatggcaaagtgaaaagtgttttgatgtattatcttcagatttgacaccaaaatgtacagccttgatattgaataagtccagagcatgtcaattctggctcatacgatattccagttgatggaagactcttggggggtaagattacgatgatgttgccaccattttgtgagaatttcctgatgttgggctctgtgctgtgctatgtaagcaagttgtcatttaatccttccaacaatccaggcatttgagttctatacttcctcccattttacagctgaggaccaaagctcagagaggggtgtcacttgcccagtgacacacagcaaggcagggagaggcagagctgggctcccacccactctgtctcactccagatcctgtgtcctttacttccttctgtatgttggcaagagctgagccatgtgggctcagcccaagcctgtatctgcctgctctgtggcctccagcaaataaatcgcttaccctctgtgggcctgagatcccttgggaggtcagaacaaggttcttttcaatcctgaaattgtttctagactgtatgagttttcaagaaattagaaaccactacacaataactcaaacaaacaaatccaaaaacattcagcacaaacattgtgttgatggtgtattagttcgttttcatgctgctgataaagatatacccaaaactgggaacaaaaagacgtttaattggacttacagttccacatggctgggaaggcctcagaatcatggcaggaggcaaaaggcacttctttttttttttgagatggagtcttgctctgttgcctgggctgtagtgcagtggcgccatcttggctcactgcaagctccgcctcccaggttcacgccattctcctgcctcagcctcccgagtagctgggactacaggcaccaccacgcctggtgaatttttttttttttttttttttgtatttttagtaggtatggggtttcaccgtgttagccaggatggtctcgatctcctgacctcatgatccgcccaccttggcctcccaaagtgctaggattacaggtgtgagccactgcgcctggccaaaaggcacttcttacatggcggcggcaagagaaaaatgaggaagatgcaaaagcagaaacccctgataaacccatcatatctcgtgagacttagtcactatcacaagaatagcatgggaaataccagcccccatgattcaattacctccccctgggtccctcccacaatatgtgggaattctgggagatacaattcaagttgggatttgggtgaggacacagccaaaccatgtcagatggcatcacttgctatttttcagagccagatcccagggggcatttttgagcatatttgaggccagtgctctcaatattagttatcaaggcaggaaagcctgttacacagcctttcagtacgcactgctgctaaacagcatttggttgccccagtaatagaagggcagacatcatctgagcctctaagtcacttcctgtctcaaatgggagatgtggtagaggcagatagagtcagccaggcctccacaacctgctaattattattcttgttactattataaaggctctatcatgaccatgtgttaaggaggtacatgctgagcaccccgctaaatacctttaatttttggttctctcaaaagtccttccagcaggctgggcttacaggtggcttatgcctgtaatcccagtgctttggaggccaaggtggtgggatcacttgaggccaggaattcaagaccagcctgggcaacataatgagaccctatatctaccaaaaatttaaaatttgaaaattagccagtggtggcgcatgcctctagccccagctaattaggaggctgaagtggaaggatcacttgagcccaggagttcgaggttacagtgcgctttgattgtaccactgcactccagcctgtgtgacagagaaagaccttatcttaaaaaaaagaaatccttttttcagccctatgagctatattattattatccccattttacagatggggcagctgaggctctgggtggtaaccgagtgacactggggattgaactctcatctgtggattgtgcgtcctctgctggtctccatccaaacctgcatattctctcctcttgctagtaaatactatgagaaggaagctctcctgatggaccctgtggacggccccatccttgcatctttgttgggtaagttgtcctgtgtgctgagcttcatctagacccgtggtcttgagtctgaggggcaccttctccaggactctctcacccctgtccagccttgcccatggaaatgcagcactgttctagctggctggaggggagggtagtgagatgggcggccatctgctggtagacatgcgggaggactttccggggcagtgggtttccagcccccacatgcccctcagtggggccctgtgccctagagtacaccaagatgaagactgcagatcacttctggaccgatccctcggctgacgaacttgtccagaggcaccgcatccacagctcccacgtgcggcaggactcgcccaccaagcgtcctgccctctgtgtgagtggggtggacagtggggcagtgggagggaccttacatgagggcaggaagcagggtaggagccctgaaaatcaccccaggcctcatccctctgtctcccgtcactctctaccagatccagaagaggcattccagtggcagcatggatgaccggccatccctctctgcccgcgactacgtggagtccctgcatcagaactcccgtgccacccttctctatggcaaaaacaacgttcttgttcagccggtgagaggttatcttgggcctagatcttgcactgagggtctcactccaggttatagaggaaaaggtctctctggctccagattgccaatccattcatccatttatgcactcacccatgcacacatccacccgcccaacactcattcatccatccatctatatttacacgcacccatccttacatccatccatccacccattgttatatccatccatccacccattgtcacaaccatccatccatccacccatctttacatccatctatccaaccatctttacattcacccatccacccatctttacattcacccatccacccatctttacatctatccatccatccatccatccatccatccctccatctatccatccatccatttgtccatttattttcctgtccatctcttcactcacctgcatacccaggcttctatccatctgttcgctcttgttctcacttcattgattcagcaaacatttccatggacctgctatgtgctaggtgcatatggtagcaagatcttcattctcatggccaatatttcttgatgcttcctatgtgtcaggcactgtgcaaaatgttttcaactgtattaactcttaaacctcccaacgaccctttgaggcaggtactgttattgcgggcctcagtattatcagatggtaatactgagggctgtacaggtgaaggcgccaagacagttatgatttgaattcaggccagctggtgccatagtcagtgccatcactcagtcaccttctctgccccatcacatggctaggctgcagggatgggtggtaggtgaggcatatgcagttcctgccttcatgcagtgtctcctttcgctgtcccctcaccagggccatttggttgcatggtcattgtggtgtttggcctcagcgggaggaagcaaagggaaaaccatcagccactccatctctgcaatcacagttttaatcactgactgactttgagccagtcacttttccctctgagcctccgtatctgcatcacaatgggtacaaaaccctattgccgcaaatctaagaagccattaatttaagatatacagtttcttttcttttttttttttttttctgagacagagtctcgctctattgcccaggctggcatgcaggggtgcgatttcagctcactgcaagctccacctcccaggttcacaccattctcctgcctcagcctcccaagtaactgggactacagatgcccgccaccacgcccagctaattttttgtatttttagtagagatgggatttcaccatgttagccaggatggtatcaatctcctgaccttgtgatctgcccgctttggcctcccaaagtgctgggattacaggcgtgagccactgcacccagctaagatacaccatttcttaacgtaatctaaacaaatttaaaaatgttatttagaggaccaagtgtggtggctcatgcctgtaatcccagcactttgggaagctgaggcaggaggatcacaaagtcaagagtccaagaccagcctggccaatatggtgaaaccctatctctactaaaaatacaaaaaaaaaaaaaaatagccaggcatggtggcatgtgcctgtagtcccaactactcgggaggctgaggcagaactgcttgaacccaggaggtggaggctgcagtaagccaagctcgcaccactgcactccagcctaggcaacagagcgagactctgtctcaaaaaaaaaaaaaaaaaagctatttagattatatacagtgtttttgttttgttttgttttgttttatttgctacttagaaattttagcttatgctttttgaaagaggtctttgaaacttacgtggatgtagttttgttttgttttttaatctatatcacttttataagtaacacacagggaaaatatcattgaaatacattaattaagatattcttcaaacttcttccagttcagagttccatcttccgtatcactttttgacttagagtcatcagtgccctcatttttccacacattgttttctgttccatcaagagaaggagttaacaatcatctgtgcctctacttgtttttgcaaataaagttttattgggacacagctacagcctatgactgctttcaggccttgctggcagagttgagtggttgcagctgagcttgtatagcttacagaaccaaacaatatttcctatttgtccctttacacaaaatgtttggtggtccctgatccaggagcacaggaagtgcagcatttcttgcaagaatgtccactctcatctcggggatgttttttgttttttgtttttttggagacaaggtctcactgtcaccaggctggagtgcagtggtgtgatcatggctcactgcagcctcaaactcctgggctcaagcaatcctcccacctcagcttcctgagtagctaggactacaggtgtgtaccaccatgcctggctaatttttaaattattttttgttgacatggggtctcgctatgttgcccaggctgatctaaaactcctgggctcaggtaattcttccacctcagcctcccaaacctctgggattgtaggcgtgagccactgcgcccagcctgtgatggttcttaagtcctgtaaagtatttggttgctttgcaagaaaatcttggccaggcacggtggctcatgcctgtaatcctagaactttgggaggccaaggcgggtggattacctgagatcaggagtttgagactagcctggccaacatggcgaaaccctatctctactaaaaccttatctttactaaaaaaaaatacaaaaattagctaggcatggtggcaggtgcctgtaatccccactactcgggaagttgaggcagaagaatcacctaaatccgggaagcagacgttgcagtgagccgagatcgcgccgctgtcctccagccttggcaacagagcgagactccatctcaaaaaaaaaaaaaaaaaaaaagaagaaagacaatctggacttgtgggcttccctgcagggatgaattacgtgcctgccttgccagcatctcacaggcactctaccgctctgttcccagccttcctatgggcacagcaggtttccaattcaaagttgaatcgcagtcaaatctttttgaagacatgtaaaatagcacctacatttcacatgtgaaataacaaccatgcccaaaacttaattgaagtgatgacgctttgaacagctgtggctgagtctgtgcgagaccaggcagggcagccacgtcacagttgtgattagaagacctgcacccatttcaggtacatgaaaacgtgaacaatcaagatgtgtgtctttggatcaatgaaatactgcactgctcctcccttggggttataggtgcgtgtggttaaatcaagacagtgcgtgtgaaggctgagccgtgattgggacacacttggtgctcagtaaatgttagggtgaatttgatggaggggtggtgacatcaccctccccacacacccacctggaataaaacaaagccggtgagaattcctgtaggtaaatctaggggagaaaagggaccggctactgggcggggagtgtagggggggtttttgggaggaggtctctgagtattgtctctaggaagggccctagagctcaactgccatctctttctcccttaagcctagccaagataaatgccttctgttttgaaaagcgtgattttcagtggggcagagcctccttcctggctctgaaggaacctggggtcagggaccctggagctcaggaggaagtcagagtgtgaaagtgatgggggtgggaggctttcacagctggacgatgtagaacccatttgggaggctggctgcaaatggctttgcttagcatggccatctggaaggaggctttagagtcttccacatggccagggccttgaagggattaacccaacctcttagttctgattatgtgttcttaaatcaaacgggccaggacctatgtccacagcaactccagcaccatggccagacctgagtcctcctctctctgcagagggacgacatggaggctgtgccagggtacctgtccctgcaccagacggctgacgtcatgaccttgaagtggacacccaaccagctgatgaacgggtctgtgggggacctggactatgagaagaggtagggcactgggtctgatacgtatcccttgggtccctccactcgccttggcacaaggaagttcctccccgggggaggggaggtttgtatcccgcccctgcttctgccccctcctctgcctggttgttaggaccacttggctcagcctccccgcagctgtggcctcccaggaaactcaaaggcttgagaggacctggaaaccaactggaagagtcttagggcatggaagttggcaatgccctggacaaaaccatccagagggagacatctttatagagatctcctaagcctgcaaatggcaaatattcttcagtctctgtcttccctctcccatcattcaataaaaagggaaggcaggaggtgttagcgagcatctggtccagggctgcatctgccatgaaatcttgtgatttataagacccagcaaaggctttcgagtcacacttgaaagaaatgctgggacaggggatttcctgctgcaatgcctgggttccagcccaattagggaagactttaggaggaacaaagaaagccatggtgcagaggtgtggctggttcaaatattttagcttgaggaggcttggctgctggtggggaggagaagcagtggtttttcctgctccaagtccacatcgaatcttattttacattttattgctttcctaaaaaaactttctacaatgaagaatttttaacctaaagatagacagaactcaggtacccatcgccctgccctcgtggccatgaacccatccccttctccccaataatattattctgggccgggtgtggtggctcacacctgtaatcccagtgctttgggaggctgaggcgggtggatcatgaggtcaggagttcaagaccagcctggccaacatggtgaaaccccatctctactaaaaatacaaaaattgccaggcatggtggcacacacctgtagtcccagctactcgggagggtgaggcaggagaattgcttgtacccaggaggcagaggttgcagtgagctgagatcatactgctgcactccagcctgggtgacagagcgagactgtcttaaaaaaaaaaaaaaaaaaaaaaaaaatatatatatatatatatatatatataattttgaagcaacatgcagacatgatatgatttcatctgtaaatattttaatgtgtatctctaaaaaaataaagactcttttcaagaaacatcaggccttggagtgatgaaaagtgttctctaggctgggcgcggtggctcatgcctgtaatcccagcattttgggaggctgaggcaggtagatcatgaggtcaggagttcaagaccagcctggccaacatggtgaaaccctgtctctactaaaaatacaaaacttagctgggcatggtggcgggcacctgtaatcccagctactcaggaggctgaggcagagaattgcctgaacctgggaagcagaggttgcagtgagccgagatcgcgccactgcactccagcctggatgacagggcgagactctgtctcaaaaaaaaaaaaaaaaaaagtgttctctaagctgattacttcctgtgcaggagtcaccatctgtcctcagagctggtcagtgggcaggacaattggtcctgtgctgggcacaataattcagctccaactagaccctgtagtctctctctctctctttttaaacattttaattttatttatttatattttattttatttatttattcatttttttgagacactgcctcgctctgtcacccaggctggaatgcagtggcgcgaactcggctcactgcaacctctgcttcctgggttcaagcgatcctcccacctcagcctcctgagtagctgggattacagggacttgccaccacacccagctaatttttgtattttcgttagatacggggtttcatcgtgttggccaggctggtctcgactcctgacctcaaatgatctgcccatctcggccgcctctcaaggttatttttatttttttttaatttctattttattttatatggagatggtttctcgttttgtcacccaggctggtcttgaacttctggcttcaagtgagtctcccacctcggcttcccagagtctagagtttctttctttctttctttttttttttttttgagacagagttttgctcttgttgcccaggctggagtgcaatggcacaatctcggctcaccacaacctccgcctcccaggttcaagcaattctcttgcctcagtctcctgagtagctgggattacaggcatgcaccaccatgctagtttttgtatttttagtagagacagggtttctccgtgttggtcaggctggtctcgaactcccaacttcagctgatccacccgtctcggcctcccaaagtgctgggattacaggcgtgagccaccgcacccggccacccagagtctagagtttctaatcaggcgaccatcatggaagaataggggaggggtcccaggggtgctctgggtctctttatcttaaaccttggtctaaagccttctttgacctccctgctgagtccagatcacacaagccctgaatctccattgtagcatttagaagattgtagtcacacagtccatctgtgcctgtgtacctaccatcttgccctcgagagctcagtgccttaaaggcaagggtcccgtcttgttcgcttcttatccccagcacctgccacaggttgtagtacatagtaggtgctcagatcatctttgtgaaatgaagcagggaagtcaggacctggattcattcactggatgtttactgagcccctactctgtgccagccactgtgctagatgcaagggagacagatgcaaggaaaggaggggaaaatctttaccttctcagagcttacattctactggaagacaatgaatgagcaaggagatggatggacatacgctatggaaccaagcctttgctccactgtcaccttgctgggtgacctggggtatgtcactccacctcaatgagcctcagggttccctttttatcaagtgggggagtaggacgagatatggtctccttagaactcaaggcattcccaggggtctgcaggggcttctcaaacactgaagcgtcttgcacccaacgtcaaagctttcacagcgcgaggaccctgtttgttgcttggacttgagcccagggttgtgtgggccagaaacctgatgctaatgttttgggaaaagcattggatccgaggattgccaagccccgccccagcgcagataatcggggacccgtgtttctgcatcatctttcgctgttggtgaacaggcacctcataggcactgtttttgtttgtttgtttgttttcttgagatggagtcttgctctgtcgccaaactagagtacagtggcacaatctcggctcactgcaacctccgcctcctgggttcaagtgattctcctacctcagcctcccgggtagctgggactacaggcgcccaccactatgcctggctaattcttttctatttttagtagagacggggtttcaccatgttggccaggatggtctcgatctcttgacctcgtgatccacccgcctccgcctcccaaagtgctgggattacaggcgtgagccaccgcgcccggccatcgtaggcgctttgatactgagttcggttgaatcagaacttctaaggtcactgcccaggagctggggcatctctagccctgggccatgaactcctgtctatcgttgttattctcaccagaacctgaggctcaatggaagataaatggcaggagtcagaaatgtgggggttggtgtgtcgggaaggggtttgccccaggagctccagcatcccttgggggaccaagaagcaatgaaatggggtggtttttgtctgagcttgtgcaggagctctttttttcttcttttcttttttttttttttgagatggagtttcgctcttgtggtccaggctggagtgaaatggcatgatctcggctcactgcaacctccgcctcccaggttcaagcgattttcctgcctcagcctcccgagtagctgggattacaggcatgtgccaccacgcctgactaattttgtatttttagtagagacggggtttttccatgttggtcaagctggtctcaaactcctgacctcaggggatccatccacctcagcctctcaaagtgttgggattacaggcatgagccactgtgcctggccagagctcttttttcttttcacagccagcctcactcttgcacagccacgatcctcactcactagctgggtattccaatgttaaagagaaaatgtcacgaaaaagctagatattggggttctgaagtcaggctggacttgcctccgatctcagccctactgtgtggagcagcagtggaaccctcctaccctgctggtggacaaccaatttacagaccaacttggcagtttcttgtaacatccccttaccttgtgacccagcaattctgctcatagggatctacccaagagaagtgaaaacttagcccacacaaaaacttatacacaaatgcttataacagcattattcataatagcccaagactccaagaccggaagcaacccagatgcccatcaactgaagaacggatgtagacatttgtggtccatccatgcaacagaatattacttgtctataaaaagagataaatcaccagtggatattacaacatggatgaacctcaaaagccttataccacacaaaagaagccagccacgaagggtgcatgttgtaggattccatttagatgaaatgtccagaaaaaggcacatctgtggagtcagaaagcagattattgttggttgcctagggctgtgggtgggaaggaagactgatcgcaaacaggcaagaggaatcttttgggggtggtaaaaatgttctaacactggcttgtgatgatggttgcccaaatctgtacatttactcatcaaactgtacacttacagagagtaaattctatggtgtgtaaattatacctcagtaaagctgctaaaacacgcaaatgaaaatgagaaacagcccttgctccttcctagctctgtggcctgagacaatcaactacacttccttgagcctcagattatttatctgtaagatgggaatgtagtcagggaaccactgaataagcatatagggagaatttatgtaacggaagtgcatggaaaacccttagctgggagcctggcacctggacagggctctcagtcatgagggctgttggtgtcattttcatggatccaaagagactgtggccacagagctcctccttgctgatggctggtggtagctttgttcaccgggcattccagtgctcagcattcactatgcactgtgaacattgtctgagcatcacagagaagtgaacaaagcagaaccattctgcaggtgttcagcacctttgaggaaccagaggagaggacaggtggttgcaacccagcgtgatgggcacacagggctgtgggagcccagagaagacaccctggctagactgggtatgggaggggctcaacagaggctgctgcccttgtgttcttgactgtcctcgaaggacatttacttccgtgaagtctggtgaggctgattctggtacaggccagggcaggaagggctttcaaagagaaaaggtccccagcagtgtgacttgagggtttctctgagcctatcccacttttctcatttcacagctagggaaactgagggccagaaactgaggtaggaactggctaaggtctctggtggaagtgggatttgaacgctgcctgaccttgaagcctatgttagtttgagtcctccaagaagcagacaccaagacaggattgaaccagcagagatttattggggacacacctgtgcaggttaagggaggggcaggagcagacagggagagccttcagactgccatgcggggagggagagaaggaaggaaggaaggttgggcagaaggagtctgagacacagcatggctctaagaacatttggccaggtcagttggaagtctccggtggaccattgactgttagaggagttccttgtcttgcaggaatgggcggcactagtaccccggcctgctaggtcctggctgggagcagcctaacggaagcctggctttggtgcaaatgtggtgatagatccagggagtggcctctgaagttaatccgctctgctcccctcagcaaggtcttctgaaggagatgtgagtggtgcatttccatggccaccacaaagcccaagttcctgtggcctccacctcccagtgtgttctgatgagaaaagctatttgtttcaggacagcagcaaggttttgagctggaaatggaaacacttaaataatcatagggaccacttcccaggtacgcacttcttaatgtatcagctctgtgttgagcccttcaaatacttgattctatttaattctcacagcaacacaatggggtgggtgttattctagcccccattttatagatgaggaaactgaggctcagagaaaccctcgagtcacactgctgggaacctgtgaagctattgagaggctatcctgactcctgcgcgtggacacatagtggcctggagttaggatgtgagttagtcaagactcctagatgccagttagagaaaacgaaattcaagctgacttaagcactggcccacatgaattgaaaactccaggggtagtagcttcaggcatggatggatccagggacttgaatgacagggacctgcactctttccatctctttgctctgtcttcctgtcttttgacaccattctcaggcatagtcgcttccatcttcagacttctgcccttaccactactctccagacaggatggggcatctctttcccagtcattcaaatggaaatctaataattgagtctcattggttctgccagagtcaggagtcagtcctgcactgaacactgtggccggaacagtgggacaggttgattggccaggcctgggtcaggtggccattcctggagtccgagggtggagagtgggtggggtcgacctcacctcccatatgaactgggggtgggaaggatggtaacctcggaaaattggggttctgagaccagaaaaaggggagatagagtctgggcaggctgggacacagatgctggggacctaatgggaagggtggaggagctcctggttgtggtctgctggcctctgagcccctccgcacagtggggtaggcagaagtcctgcaagcctgaccctccgtccgcttccagcgtctactgggactatgccatgaccatccgcttggaggagattgtctacctgcactgccaccagcaaggtagggactgtggggacaggaggggtctgcgtattcctcttggatcccctgcctgtctccatccctgcctattcattagcatcatgagcgaatgatatggtggacaccccatgttacctgtgcaaccttaggcaagcgacctcaccgctctgtgcctcagtttccccatctgtaacatgggaattataacaggaccctctcatggggtagttgtgaagatgaagtgatgtatgttaagggctcagcatgaaatccacctatggctatggcgttagctgctgacacttactaagcagtgataatgtgctaagcacagttctgagcactcacatgcccgttattcagtcatcacagccacccactgacagggtgacatcatttccattttggaggagaggaagcagcttagtataagggcacacagtctggaagctccagagccgggactggacccagctttttgtgactctaaagtcagtgctctgaagattgggatcaataactgcagtacttctttaaagccagaagaaagtacagtcagagtaagcagagggccatcctgctttagaaagcaaatggtccgtgcctcaccaaggaacaaaacacggtgatttaagccttttacatgagacagacctggattcagacccagactctgccattgatcagctgtgtgaccttggagaagttacttaacctctctgagctttggttttactatttgtaaaataggcaataatagataggactcttagggatattgtgagtatttcaataagacagtgcctctaacatgctgcgcttgtattcagtaagtgctcaatacacgctagccagagtcagctactgccccgagacaggggaagtctgaaggcctccatacaaaaataggtcaggtagacttgtaaaggattcctgaggagcgtagggttctagggggcgtctttttcctctggtggttaatgtcagggaggtcaactcggttcttcttgactttgtcctgtagtcccgtcagaggtggatggtggatgagatgagagagactcaggggaggtaaaaactgctcctgacctttgcccaggactttcccagagcctcagagcaggatccctgggtctggcttggcacccctgggggatgtgcttgcaggaaggggctgtcaccgtgcctcatagtgacttccactgggtcttctctggctggtggtggcggcagttgacagcggcgggacagtggtattggtcagccaggacgggatccagaggccgcccttccgcttccccaagggcgggcacctcctgcagttcctctcgtgcctggagaatgggctgctcccacatgggcagttggacccgccactgtggtcccagaggggtaaggtgagtgatcatcgggacccagggaggctggggtggaggctggtcacagagggtggttgtttttgcctgtgtgcccttatgtggctatgtggcctcatgcgctctccactgataccctcagactaagcaagttgtggggacagatgtgtcccaaggaccttgttttgggacatgtttttgcagggcaaagtgtttcctaaactgcgcaagcgaagccctcagggttctgccgagtccacatcttcagacaaagatgatgatgaggccacggattatgtgttcaggatcatctaccctggcatgcagtcggaattcggtgagctgccctgtcccgggccccggggagtcacctgctaactgatcctgaaaatgactccaggtgtttgaaactagaagatgacaggtctggattctggggctaacaggaggatctggaaacagaaagtcggtttcttggcagcctcagtttccccccaaataagaacaataaccaccctctacttgtctaataaagttgccactaggagaggtggcctggggtagtggcaatggcataggctctggaatcctggctgaacttgggcaagtcatctcagccctctgtgcctcagtttcctcatctgtaaaatgggcatgttcatagcaccagtttcatagtcattctggggattaaacgaggtaaggcggccgggcatggtggctcatacccgtaatcctggcactttgagaggccgaaatttgggagggagcactttggattgcctgagcccaggagtttaagaccagcctgggcaacatggcgaaaccctgtctctacaaaaaatacaaaaattagccaggtgtggtggcatgcatctgtggtcccagctatttgggaggctgaggtgggaggatcacctgagcctggggaggtcgaggctgcagtaagccgtgattatgtcattgcactacagcctgggcaacaaagtgaaggcctgtctcaaaataaatgcaaattaaaatactttttaaatgagataaagcatttcacacatacagaacactcaaatgttgctgctgttgttaatattctacttccccttttataaagattcaatgagatgatgagatattcattgtagagcccatagagtaaggccttgcacacagcaggccctcagtaagttgtagtcaaactttacaccggtagaggcgaagcagagcaccaggcactggcacatgagatgggggtgaattcaagcaggttgcacggtgcctgccgtgacacagatgcgcagcaaatgtaagttcttactagtaagcgcatcaccattgcagggctatggtgaggattcagtgaattaagatttgaaaagtacttagaagagggcctggcatttatgaagcattgtatgggtgtctgttaaacaaatcagtattgagtggtaggttctttctgttcacttcattttatttaacatggagcggccctcatgttcccatccgaggataatggctctgagcctccctttgctgaagcagccacgtgctgggcagtgagaggctcttttgagagcagatgtcctcctggacaaggctggaaccccttaagcgctacagtgtcctgaagtgttcatgaccatgtctgttcctgccctggatcagggcctcccagccactccatggaaccaggcgcccactatcctggctggacaccaaggctgttatgggccccaaggctgaaggggctccatgtatgagggtgaaatcccctgggatgttgagccagcgtctgttctgttgcccatgaacttgggcttcccacccctgtgaagaccaacattcattaagagttctactcgagagccagttatcagagagggccagatcctctatagttgccttcccaggaaactccacagcttctcatccaacaggcaatgtgtacactcccgctgggagctaggcagagtgctgggtgtttaatttatttggagattctctatgtcatcctcctgtggcttgatgaaggccagtggaacagtgaggacactggctgtgctcacccacatcctcagcatttcccattctgtgcatgctattcagctaccagctgcagctccctgcctcagtatctctttgcctgagggttttctctggccacaagagtcccttctggccagggatggggcatattggaagcatcggggaaccagtgcctccctggagcagccctcagcttatggctgataggagttagtgtatcaatatcccagctcactgtccctttgtgaggcaaactctgacatacatgttcggcacagtctcccagagcttccatgggagattaagcacagttacctctattggtaacttgcttggcaactaaccctttactccctccccttttcttcctttgtctcaatttgcctctcccttactgatgtgcctttggaacttgtacttggatccttgtctgcccttgaggaaactcccaactaattcagtttatctagaattggacatctgaaccttagcgttactgtcatttgggatggaataattctttgttgtaggaggtggtcctgtgcattgtgggatgttgagcacccactagatgccaagtagcgaacttactttgctctaagttgtgacaaccagatatgtctctagacattgccaggtgtcctctggagggtggcaaaattgcctctgcttgagaaccgttggtttagagaaaagaaggcatcactgtattcagctctgccactgcggtgtggttaagtgacctgtcctccgcaggcctcacttccttctctgtagaatggggtaacagcagtccccaccagcagcatattctgaggaatcagcaagatcattcctaaaacacctggtgacctgacatggggcctgacgcttggcagatgctcagtaagcaatagtaggtatcgtgtcttgagtgccactgtgtgccaggcccacttctgtctgctgtcccactgtccctatcttaactcattccatcctcaccattagccctcccaggttgtcatcaccatcccccattttgcaaggaggaaactgatgcacagaagggttaagcaactagtccaggatcacacaactaattcttgtcatggctgggatttgaacgctgggggtctggctccagagcctgtgcctctaaccaccactccatgcacatcgttttgactggcagggagagggcattgtggtttcactcccttcagtctcaaggtcaacttcaacccacatggaaatggcaaccgcatccttggttgattttctggggcttgagccgcacaggcttaagaaaaacagtcatcctgcggtttccatttgtgagaggtttccatctgtaagagataagaagttctttctgaaagagtgcctaaatcagaagtcaacaaaccccttttcatgggccaatttcagcccactcacctgtttttgtaaataaagttttattggaacacagccacatccattcatttatatatcatttatggctgttttcatgccacagcagcggaggtgaatcgttgtgacagaggtcatatggcccacaaagttgaaagtatttactgtcaggcttttaacagaagaaatttgcagatatatgccttaaatataaaggatttcaccctgtgggaggggagatatgaccacagatgtttctaagctgcctctcagtgtctcatcagacctgtctccgctgggttctttgcctgccccttgtgctctggggaggcaaggacaagttccaaaatatgtggacaggttcacatcagataagggcattttcagacccctctgcttctgagattgtctctgtactgtctagcagggtagccatgggctacatgtggctcttgggctcctgaaacatctccagggcagatggggatgtgctggaagtgtaagacacacactggattttgagactttgttaaaaaaaaaagtctcaataattttatattgattagatgttaaaatagtaacattttggatagactaggttagacaaaatatattgctggaattgatttcacctgttcttttaaccttttaatgtggctacaaaaatttttaaattatgccaggcccagtggcccacgcctgtaatcccagcactttgcggggccgaggcaggcagatcacgaggtcaggagattcgagaccatcctggctaacacggtgaaaccccatctctactaaaaatacaaaaaactagccgggcgtggtggcacatgtctgtagtcccagttactcgggaggctgagtcaggagaattgcttgaacccgggaagcggaggttttggtgagccgagattgtgccattgcgctccagcctgggcaacagagcgagactccatctcaaaaaaaaaaaagaaatttttttaaattacatatgtggctcaattgtaatttttttttttggcagggtctcgctctgttgcccaggctggagtgcagtggtgcgatcatggctcactgcagcctcaacctcctgggctcagtcgatccttccacctcagcctcctgggtagctggaatcacaggcacaagccaccatacctggctacttttttttggattttttgtagagatggggttttgccatgttgcctaggctggacttggaactcctgggctcaagcaattcatccgcctcaggctcccaaagtcctgggattgcaggcgtgagccacctcccagcctcttgattgtgtttctattgggtaatgctggtctagcgtggggtttctcagcctcagcactgttgacatttagggctgaataattccttgtgtgggggttgccttgtgttttctacgatgttgagcagcatccctggcctccagctactagatgacagtagcacctaattaatccccaaggcgtgaaaacccaaagtgtctccaaacatcaacaggattgccctgttttgagaacagatggtgtggagagacaagtgcctatgagaaacagctgagggagaaagagtaggctcagagtcaagtcctcaggccaggcacagtggctcatgcctataatcccagcactttgggaggctgaggcgggaggatggcttgagcccaggaattcgagatcagcctgggcaacatggcaaaaccctatctctacaaaaaattttaaaacattagctggccatgctggcacgtgcgtgtagtcccagctactcaggagactgaggatggaggatcacttgagtctgggagatcagggctgcagtgagccacgtttgtgccactgtacatcagcctggatgacaaaacaagaccctgcctcagaaaaaaaaaaaagtcaaatcccctgggttaggatcttggctcctctcctcattagctgggtggttttgggcatgttgcttaaactctccatgcctcagttttctaatctgtaaaaggggttaatgatagtactgtactcagtagggacagcagttgttagtggaaagaggagagggacttcagtcaaaaagactagatacgtctgttactgcctggcagggctttgggtgattaagtcatgccatcattctgagcctcagtttcttcttctgcaaaatagaagagggaggatgcatccctcacagggtcgtgaagaacaataactggtttccttaggtttgctcaggtcgtaaacttcctagcctgacactcagcgcatagttggcactttataaaaatcagcattctttcttctaattgaacacagtgaatgtgggagctgtgtggagccgggaagggggagggttggagcccccagaaactggctcttccagctgtctcagtgtcctgcccaccgcagaacccccacctcactggttctttctgttttgtgtctcaagttgcccccgacttcttgggcagcacttcctccgtctctgtgggccctgcctggatgatggttcctgcaggccggtccatgctggtggtggccagagggagtcagtgggagccagccagatgggacactactctccccacgccaagcccgaaggagcagccccccagtaatgtctgggatctccccgtccccaggggctgggtgccagccacctctgccatgttgtcatttgagttctggtcccaagggagatggaggcaggaagggagatggaggcagagggattgatgccctcctgctgtccagcctccactctatggaaggcagcttgcagtgttgtaggttcagtagcgaagggatcaattggtgatgtctgcatggatgtgggtgtgagaggctgagatggaggaaggcatggttgccatgcttgggctaaactggtcagtgcatccctgagattggctaagaactggggcttttcttctagaacattttacaggggcttactgatcttggctagctcatgggtgagtctacatggggaagaatagtgtaacaagccacatttggtggctgcaagaattacatcgtacaggcagcttcctcttctgtctgtgggtaggggctgaccttgtcagctacggagctctgatggcaagaggaccagttccacaactctcccttaccttggggcccaaggaagagtcagggtattaccagttgtcctgtggggaccatgacatatgggaaaaaaagtgtgcaactctcttcacttcctacagcagggattagaaaactaagattcatgggctgaattcagccccattctgtaccagcctatgagctaagaatgttttttcaatttttaaatgatccaaaaaagccaaaaggagagtaatattttgtgacatgaaaatgatatgacattcacatttcagtatttataaataaagtttattttattagaacatgtgcatgcttccttttttacattttgtttatggttacttttgcactagaacaacagagtcaggtgcttatgacagagaccaaatggcttacaaacactaaaatatttactagctgtccctttacagaaaaagtttttatggatccctgttttaaagaagataaaagaatggcgtgaacccaggaggcggagcttgcagtgagccaagaccacgccactgcactccagcctgggcaataaagcgagactccatctcagaaaaaaaaaaaaagaaagaaagaaaaaagaaaaagaaaataaagcttttgcacctgtctaggactaccaagaggccaggaagttgactatagaaatggtaatgcatatgtccccagtatgtttgttacgtggttttgtagactctgcagttcttatgaagctgagaaagaaaaataaataaaggaagctatgagtgctgtatcctgagagtggctggtcaggaatcaccagtgtccaaaagttaggaaatcagagtccatcgaatatacctgctgtatcaaaattgctttagaaatacagatttgagagctctgtctctaggatttagttgagtaggccaggagtgtggggcagccatattgctttttaacaagcttcccacgtgattttagggagttgctaatatgtttgagacccacttgctggagcagctttagcctcaggaccatggacagcgcaggtgccctcttcctcagcaggggcttcactgggtctctggcacttgggtgccctgcctcatctattgagtcaggctcccttccatctcagccatgaggcctgtctcttctccagaatcatccagcaggctccccttccctcctgcagcatcctgtgagcatgactaagtgacaacatggcaaggcttggcctcctgctctgggattgggcctggtttcttggctcttggctctctgtgtcctcttcttctctctttggctgtcatcagctctgccccagattttggtggtggctttcattggatcaggcaaactcaaggatgattagggctgctgtttcctactgtcatcttcagggtcttttcctatctctgtgctggctggggcgggtgagctgcttgctctagggtgagatttctgtgacccacataggtttaaccagggtgattcttctgcccctccttctatccaccacagtgccccaggatctgatggacgtctctgtaagcaacctcccatccctgtggcagcccagtccccggaagtcctcctgttcatcctgttcacagagtggctcggctgatggtagctcgaccaatggctgcaaccatgagaggtatgaggggcttgagctgcagatggagagagctgaaggatgtaccagagatctgtagatgcccatgtcttaccctgcactgaattcagagtgagcataacctgcggactcaggcagatataggttaaatcctggccatgaaatcctagctgttagaggttacatgtaatagtcaggataaacaaggttatgctgcagtaacaaacagtcctaaaacctcagtggcttttttacaacaaaagtttatttatcatgcatgctgtgtttctatcatgggtcagctggtggctgttttttccacactaaagggcctgggtgatggagcagctaccatcttgaatgttgccagttacaatgacagggaaaggtagctctgcagaggttggaacctacgataaaaaggctctgcccaaaagcagcacatgtcatatccactcacagcccattggccccatccacaaggggacagtaagtgcagccctaccatacacctagaaggcaaaataatcccagaaatattatttaacaacaaccacatctcagtttgcacccccacacagtggaaattccagttcttaactttatatggctgtggtaaggaccagctcaggtaatggtttaaagtggccagaatgtggcacctgcacatggtactgttcagtaaatgacacttaatgttttattatataaagttaaatctcaagctcatcttctgtttgcccatagatcctttgtctctttgaaactcttcagccaattcatgagactgatcttgttttcccctggtccaacctggcctggcctgagaaaatagaacccttttgtccttgcggggcttctgtcctagtgggtggtccagtcatcagccataggatataaggggtgggggctggcatcaaatttttggagtcatccaatcccctggttcctcagggtgtggtccgtgaaccagcatcagcacctgggcaaattctgagtctctcatcccaaacttcctgaatcagaacctgtatttaacgtggtttcaagaccatgtgtatactttaaagtttgagaagtgctaatattactggagattctttctttcttttttttttttttttttttttttttgagactgagtctctttctgtcgcccaggctggagtgcaatggcatgatcttggctcacttcaacctccgcctcccgggtttaagcaattctcctgcctcagcctcccgagtagctgggactacaggcatgtgccaccattcctggctagtttttgtgtttttagtagagatggggtttcactatgttggccagtctgctctcgaacccctgacctcaagtgatccgcccaccttggcctcccaaagtgctgggattacaggcatgagccaccgcgccccgcctggagattctcttatcatgcattagaatcacctgggctaggtggcaaaacatatcagttcctggactatttcctagaggtcctgactgagtaggtatgtgcaggacccaggaatccacatgttggagaaattccaagtaactcttgggctgatggtccgtggaccagtgagaaaggctgctataacccattgccccctctcctgttgtagcatctgcttacacacttggagtgatggagagctcactactttgcagaaagcgaagtctacagcgggaaagctgttgatgtgatcctattctgatgtaatctgagcaagtctgagcctcatcaacctgagggcacaaaggggaactctttactgtttaatgttcctaactgtctcaatgtgcctaagtggaggacttcagctatgctccttctgccctgccccagtctacctgtttttctggatgtctcctgggatgtcctgagaacaaatatgcagatattcttccattctatcctctatgagagtgtacaacactcccttcagcagtcctggatttctccaacaatgctagaatctgactcctctcacctctttcagccgaaaaagttcccaaaaattcccatgcaaggagaagctttgaggcatcacctacttagcaatcagccagactctgaatcccactttggctcagcttggttcagctggatcactttacaaatcagaactctttctgcaagtgatagaaacccacttcaaactggttcaagtacaaaaggaaatttgttggtgtaactgagaagcttagaggcacagtggcttcaggcatggctggatacagatgatcgaaataggaatctctgtttcttcagctcttggctctgcttgcttctatgatggttccatcctcagacaggtgcttcctatgcagtggcaaagatggctcccagcagccactgccctatatcccactggcttagaaacccattcagaaaagtgtctgttacctagtaattccaacaaaagtcccagggctaattctcattggctcaggttgggtcacatgaccatctctgccccaatcactgtgactccaacctgagtcctgtagtgggcagagtcatccacatacaaaccacacagacagttgtggagagcgtgatttctcaagggaaaatcagggggccggtaccagaagaggcaatgatgctgtacaggtagaggtaatagcagccctccctacagtctccctgactggctgatattaatctgccctctagagatagcacgtggttatcctctccagaaaatctgggctgtgtttggatctattctaagcatctccctctttctccacctgcagggctcccctgaaacttctctgtgacaatatgaagtaccagatcctctccagagccttctatggatgtacgtatagggctccattgccagtgtgtctccgtggagcagctattggtgcctgctgtatgccagcaatatcaaaagatactggctctggagtttgaacctctcctcctctattccctagatgtctggtttcagtgacgttacatgaacttctctgagcctcagttttcttgtctactgacgggataaattttacccctgggtcctgagagaggacagtggacagtggggtcccctggggacagagatttggtttaatcaccactgcatccccaggtgctacagtggaggatttgttttcaggattgaatgaggaccacgtagaaagccccagcacctagtattgcatgctgtaggtgctcaataaatgtcagtttccttctctcgtgggcagaaagagcagaaagagtaaggtgaccttatccctcccccaaaacttaaatattaaattcataatacttgtattatgattattcctgtttaacagatgaagacactaaggcacagagaggcaagatgacttgcctaaggtcacacagctaacaagcagtagagctgagactcaaaccttggcatgtctgactccaaaagctttgtgttttcctctctgctgtctttttttttttgagacagagtctcgctctgtcacccaggctggagtgcaatggcttgatctcggctcactgcaagctccacctcctgggttcacgccattctcctgccttagcctcttgagtagctgggattacaggcacccgccaccacacccagctaatttttctgtttttaatagagacgggtttcaccatgttggccaggctggtctcgaactcctgacctcaggtgatccacccacctcaggctcccaaagtgctgggattacaggcatgagccaccacatctgtctctgccaccttgatttttcagttttatttccccagcctgacagcctagatggggaagataaaacgtgtgtgtattttcaggaattctagaaacatcttaatacaacctgcatgggtctgtgaaacagcagtggagctcacaccctgagtgcctggagaggcagggagagtgtgacttcactaggacaggggttttatctgttctgttgccacccatccacagtgcctaatgcaggacctggcatgaagtaggcattgggcaagtatttattggacccaaatggaagcaggaaggggtgggggagtcgagatgggtctggagcaatgtctttggacaatgtggctcatccctaatggtgactgagaacctgagttctggagcgaggtgacctggtttcagatcccagcgatgcgacttgggcaagtgacataaccggtttgtacctcagtttaccccatctataagatggaaataatgggcaggcgcggtggcttgcgcctataatcccagcactttgggaggccaaggtgggtggattgtctgaggtcaggagttcgagaccagcctggtcaacatggtgaaaccccgtctctactaaaaatacaaaaaaattggccgggcatggtggcacacgcctgtagtctcagctacttgggaggctgaggcaggagaatcgcttgaacccaggaggcagaggttgcagtgagccaagattgcgccactgcactccagcctgggtgacaaagcaagactccgtctcaaaaaaaaaaaaaaaaaaaagatggagataataatagtaactaattcctagggttgtggggagaatgggatgagttaagttatgcaactctgggccgggcgtggtggctcacgcctgtaatcccagcactttgggaggcctaggtgggcggatcacgaggtcaggagattgaaaccatcctggctaacatggtgaaaccccgtctctactaaaaatacaaaaaattagtcgggtgtggtggtgggcgcctgtagtcccagctactcaggaggctgaggcaggagaatggcataaacctgggatgcggagcttgcagtgagttgagatcgcgccactgcactccagcctgggtgacagagcgagactccgtctcaaaaacaaaacaaaacaaaacaaaacaaaaaaaaccagcaacaacaacaaaaatagttatgcaactctgggaacagttccttgccatgcagcgtgtgttgtgtaagtgttagctattatatcatcgtcatcatcatcatcctcctcctcctcatcatcatcactatgactgtctcttttgttaaagtttagtctgcagtctccagaaggtccagggttctctctgagaactgaggatgaaatagtcttggagagccagaaggaaggggcacagccagagcaaacagcacaggctgccatttgctgaggcactttacctaacaccctccaggtgccagtgtgggccagataaggggtggcacgttggtggatatgctttaagaaggcagggccatctttgaaagcaaacttgatgccctgtcagcatctccctggttactgacttgggggggggcctttttaatccagcttcaatttttgtatttttttttatttaaatttaaaatttctacttttattttagttttttgagacagggtctcgccttgtcaccccggctagacgcaattatggttcactgcaccctctacctccctggctgaagcgatcctcccacctcagcctcctgagtagctggaactacaggccggtgccagtatgcctggctagttttttgtattttttttgtagagatgtggtctcactatgttgcctaggctggtcttgaactcctgggctcaacagatctgcccacctaggcttcccaaagtgcagggactacaggcttgaggcactgtgccccgccctgttttttatttattttttgatagatatattgtggttgtacatattttaggggtacataggatattttgatagatgtatccattgtgtattgatcaagtccaggtaattgtgaaattcatcacttcaaacatttatcttcatttggagaacgttacggttcttctataatagctattttgaaatatacaataaattattaactataatttccccactataccatccaatacaagaacgtattccatctaactgtatttttgtaccattaaccaacgtctctgcatccttctgacctccttcccttcctaccctctggtaaccactagtccactctccacctccatgaaaactacttttttagatcccattataagtaagaacatgtgatatttgtctttctgtgcctcgcgtttttttgcttaacataacctccagctccatccatgctgctgcgcatgacaggatttcattcttttcatggctgaataatattccatcacatttgtataccacggtttctttttttttttctttctttttttttgagacagagtctcgctctgtcgcccaggctggagtgcagtggcgcgatctcagctcactgcaagctccgcctcctgggttcacgccattctcctgcctcagcctccggagtagctgggactacaggtgccggccaccatgagctaatttttttgtattttttttttttttagtagagacggggtctcaccgtgttagtcaggatgttctcaatctcctgacctcgtgatccgcccgcctcagtctcccaaagtgttgggattacaggcatgagccaccgcgcacggccaccacggtttctttatccattcattcactgatggacatttaggttgattttgtatgttggctatcatgaatggtgttgcagtaaacatgggggtgcagatatatctttgtttcctttcttttggataaatattcagctgcaatttgaacaggagttgtccacgtttcacattctctttcttgctgtatggattagagacagacagaggcacagcaagcccacagagtcactggccaccttcctttctacccccttctctgcctctagcctatgaattaaatgctttggcttagagcagagaagggtgccatcaccctgactgaggctgagaaaggtgataagacttccctagggttatagagctatttagcagtccagccagcaagtgcataaagctctgtcttccttgtctggaaaaggggaagttgacaagaattcactgagtcatggcgtttagtaagatcaggagtgggccaggtgcagtggtttgtgcttgtaatcccagcactttgggaggctgaagcaggaggatcacttgagtccaggagttcgaggccagcctgggcaagatggtgaaacctcgtctctacaaaaaataaaaaattagccagacgtgctggcgcgtgcctctggtcccaggtactcgagaggctgtggtgagaggatcgcatcagcctgggaggttgaggctgcagtgagccatgataataataaataatagagcaagactctgtctcaaaacaaaaattttaaaaaatttgaggtgggacagaacttgggaagtcccatgagacaaggtgaggggcttcaggtggtggatgatgacactttccctccctccctcaacagggctggcctactgcagacacctgtccaccgtgagaacccacctatcagccctggtcaatcacatgatcgtgtctccagacttgccctgcgatgctggacagggactgacagccaggatctgggagcagtaccttcacgacagcacagtaaggcttagctgggcttggtctgcagtgatgcagaggctgcaggggggtcatcttattatctgagaaataagcccacatgcttgtggggacttgagctgacgtgcttggattctgcatatgcaaattggagttccccttctccttgagagttccaagacctacagctcacttctgcccatcagtgtggagattgaatgggaggtaaaacatatgctcacctggaaggagtaaagaacaaatcagtctgtagcatttattattaagcatcagctgggatgggcacggtggctcacgcctgtaatcccagcactttgggaggctgaggagggtggatcacttgaggtcaggagttcaagaccagcctggcaaacacggtgaaaccccatctctactaaaaatagaaaaattagcttgccattgtggttgagtacacctaagactaaagtgaaataggcttttaatatcggaatgtgaatagatgagggggaagaggccccagggcccttcagggcagccttccaacaccatcacttcccacagcgcatgtacagttaggacctgctggccccacagcttgactaattgtaactgcaaaacctttgcctgaaaatgaaattttaaaaagaaaacagacaaactcaaccccaccatacaccacatacctgttaaagtcatcctagtgtgcacaaaagatattagtgtatgaggtagcagcgagaattgtacactttggattaatttgctttagataatttttttttttttgagatggagttttgctcttgttgcccaggctggagtgcaatggcatgatctaggctcactgcaacctccgcctcctgggttcaagcaattctcctgcctcagcctccaagtagctgggattacagtgcctggccaattttgtattttaagtagagacggggtttctccatgttggtcaggctggtctcaaactcccgacctcaggtggtctgcccgcctcagcctcccaaagtgctgggattacaggcgtgagccgctgcgcccagccaagaaattttcctagagctgagtcaagattaataattgcaagataatattttcaaataagcataaggcaaaaatgggcttaaaattaattaaaatattaattcattatagcctcccctttctctttttacataaacggactcataccacatagttttacaacttatttttttttttcgattagcgacacacattgagcacctttttttttttttttttttttgagatggagtctcgctctgtcacccgggctggagtgcagtggcacaatctcggctcactgcaagctccgcttcccgggttcaagcgattcttctgcttcagcctcccaagtagttgggcaccactgtgcccagctaatttttgtatttttagagacgaggtttcaccatgttggccaggctggtctggaactcctgacctcgtgatccgcctgcctcggtctcccaaagtgctgggattacaggcgtgagccactacgcccagctgaacacctttttatgtgggtccccatagatgtatccctcgctcttttacatctctgtgttgcgtacccgtgtagggacgcatgttcacccattgatgcgcagttggagagttacctgagtttggctttttcatatgatgccacgacagatatccaagtacctgtgactttccttattcacgccaggatatctgagggctaggtccaagaagcaggactgctggaccacggaagtagatcatagaagtagatcatgcctccaagtagatcatggaagtagatcataatgatacagttagggtgttgccaattagtattctagaaggacaggtgcacagaagttgaggaatattggtgagaagttagctcagggtggccaggcgcagtggctcacacctgtaatcccagcactttgggaggccaaggagggcgaatcacctgagatcagagtccgagaccaccctggggtcaggagttcgagaccagcctggccaacatggtgaaaccccgtctctactaaaaatacaaaaattagctggatgtggtggcaagcactggtaatcccagctactcgggaggctgaggcaggagaatcacttgaaactgggaggcggaggttgcagtgagccaagatcacaccactgcactacagcctgggtgacagagcgctctgtctcaaagagaagaagatagctcagggtggctgggtgcagtggctcacgcctgtaatcccagcactttgggaggccaaggcgggcagatcactgaaggtcaggagttcaagaccaatctggccaacatggtgaaaccccatccctactaaaaccaccccctggttttctgttgaccaaactctttgctcctctccacccaccacagagttacgaggagcaggagctgctgcgcctcatctactacgggggcatccagcctgagatccgcaaggccgtgtggcccttcctcctgggccactaccagttcgggatgacggaaacagaaaggaaagaggtcggttacctgccatgggcactgggatctttggcaacaaaaggagccagatactgtggggctggggagcgctggttccacgctggaccaaggaaggggagggagatacggggaagatgggaacctgaaggcggcgctgtccaatagaaacataacacaagccacataggcaatttttacgtttttaaattttggactaagtgtagattatgcagttgtaagaaattaatgtggagaactatgtgcatcttttacccaatttttttctgatggtaatatcttgtaaaactgtaaggtagtaaaatatcggaaccagaagattgacatggtataatatactcatcttaatcagactttcccagttttacttgtacttatttgtgtgtgtgtgtgtgtgtgtgtgtgtgtgttttctctgcagttttctcacgtgtagatctgtgtccatcaccacggccaacatacagtacatttttaatgctataaggacccccacgttgtccttttatagccagactcacctcccccatacccacaccctggccctaattcctggcaaccactaatcatatgttcttcatttctataattttgtcatctcaagaatgttatataaatggaatgatacagtgtgtaatgttttgggattgactttttttcactcagcataaaacctcatccaagttgttgagagtatcaagagttgattccttttgatggctgagtagtattccatgatgtggctgtagcacctgttgctagacagctgagttgtttctggttttttggctgttacaaatcaagctgtaatgaacattcgtgtacagtttttgtatgagcataacttgtcatttatctgggataaatgagtaagaatgtaattgctgggtcatatagtagtcgcatgttcagttttatatgaaactggcaaactttcacagtagcacatgcctttagtctcactcagcaagaggttcgcttgagctcatgagttcaggtgcagcctgggcaacatcgggagaccctgtctctaaggagagaaaataaactaccacacttctgcagtgactgtatcattttctgtgtccaccagcaaaatatgagtgatccacatttgcatcttcaccagagttttgtcttgtcactattttttatttcagccacctgacatggataattgatatttccttgttttaatttgcatttcctaaacggctaatgaagttgaaggtcttttcatgtgtttatttgccattgtgtatcttctctggtgaaatgtctgctaacgtcttttgtccaccttctaattggattgtttggttttttttcctgtggagttggagagtcctttatatactctgataacagtcctttgttcagatacgtgattggcaaatatttcctccgagtctgtaacttttcatcttgtaagcagggttttctgcaaaacaaatttttaaatttttaatgaaactcagtttatcaatttttccttttatgaattgtgcttttggtgtcaagtctaagaaaattttgcctagccctaggtcctgaagatcttctcctacgatttatcctaaaaattttctagtttacatttgaggtaaaatcttttgagtttttttttcttatatacagtgtgtcatttaggtcaaagttcatttttcgttttttggtgttcaattgctccagcatcatttgttgaaaagatgtccttcctccattgaattgctcttgcactgttaaaaaacagctggggccgggcacggtggctcacgtctataatcccagcactttgggaggccgaggcaggtggatcacctgaggtcaggagttcaagaccagcctgaccaacatagcaaaaccccatctctactaaaaatacaaaacaaaaacaaaaatcagctgggcatggtggcgggcgcctgtagtcccagctactcaggaggctgaggcagaagaatcgcttgaacctgggaggtggaggttgcagtgagccgaagtcatgccactgcagtccagcatgggcaatagagcaagactccatctcaaaaaaacaaaacaacaacaaaaagacagttgggaacatacttgtaggtctgtttctgggttcttctgttccggtgatctatgaatctgtccttctgccagtaccactctgtcttgattattgtaacacatgtgtaattttaaatgttttcatagtcacctttttttttttttttttttttttttgagacagagtgtctgtctgtcagagtcttgctctgtcgcccaggctagagtgcagtggtgcaatctcggcttactacaacctccacctcccaggttcaagtgattctcctgcctcagcctccccagtagctgggactacaggcgcccgacaccacgccaagctactttttgtatttttagtagagacggggtttcaccatgttggccaggctggtcctaaactgctgacctcgtgatccgcctgccttggcctcccaaagtgctgggattacaggcgtgagccaccgtgcccggccctcatagtcacattttaaaagtaaaaagaaacagatgcaattcatatttttgagcttcttattttgaaatataaatggtccccaacttccaacggttggtcttacaattttttgacttcatgatggctttatcacgttattaaatgtatttcttttttttttttttttgaggcagagtctcactctgttgcccaggctgcagtgcagtggtgtgatcttggcttactgcaacctccgtctcccaggctcaagcaattaccctgcctgggcctcccaagtagctgggattataggcatgcgccaccacacctgcctaattttcgtatttttagtagagacgaggtttcaccatgttggattataggcgtgagccaccgggcctggccttaaattgatttttttttttttgagatagagtcttgctgtgtcgcccaggctggaatgcagtggcgcgatctcggctcactgcaagctctgcctgctgagttcacaccattctcctgcctcagcctcccaaatagctgggactacaggcgcccgccaccatgcctggctaattttttgtatttttagtagagacgaggtttcaccgtgttggccgggctggtcttgaactcctgacctcaagtgatccacccactttggcctcccaaagtgctgggattataggcgtgagccaccgggcctggccttaaatggatttttttttttttttgagacggagtcttgctctgtcgcccaggctggagtgcagtggcgcgatctcggctcactgcaagctctgcctgctgggttcacgccattcttctgcctcagcctcccaagtagctgggactgcaggcgcctgccaccacgcctggctaattttttgtatttttagcagagacagggttttaccgtgttagataggatggtctcgatctcctgaccttgtgatccgcccgccttggcctcccaaagtcctgggattacaggcatgagccaccacgcccggacttaaacggatttttgacttaagatattttcaacttatgatgcatttattgggacataactccatcgtaagtcgagaagcatttgtaattataagttcacaagaagctgcaaaagtaagaggtcccaggtacccatcacccagctttccccagtggtaacagtttatgtaactaaagtaagtacactgtcaaaaccagagtgttaacactgacacaatacaactagctagactacaggtcttactaggatttcaccagattttgcatctgcttgtatatgtttttttattattattatttttttgaggtggagtctcgctctgttgcccaggctggagtgcagtggtgcgatctcagctcactgcaacctccacctcctgggttcaagcgattctcctgcctcagcctcccaagtagctgggactacaggcacctgccaccacgtccggctaatgttttttgtatttttagtagaggcggggtttcactaggttggccaggctggtcttgaacttctgactttgtgatctgcccgcctcggactcccaaagtcctgggattacaggcgtgagccaactacccccagcctaaaatctggtggtattttacactctatattcgtgtatcacttgtactattatttatttaacatttgatttaaattgactcgcttaagatttatacaacttattttaaaagatattttatatccctgccataaacgagaagccagtataacttgtcgtgaatagaaggaaactataaaaatagagtgagattaaatggtgtaattctgttctaactagatgttatagcctgcctaaggcctgccgtctctttgttaaaaagggagattatgtttgggaggccaaggcaagaggattgcttgaggccaggagttcaagaccagcctgagcaacatagcgtgacccccatctctacaaaaaatttaaaaactagctgggcatggtagcgtgtgcttatagtcctagctactcaggaggctgagacgggaggattgcttgagcccaagagttggaggctgcagcgagctatgattgtgccactgcatttcagcctgggtgacaaagtaagaccctgtctaaaaaaatataaaggatggaggggagatgacaaagtatcgagaagtgtgggaagcataggagcaccagactggccctttctccctggggtaatcagaaaagttgaaggagaggagaaagcagaaagtttctgtagttctgtattataaggacccatgctagtgaaatgtctgaagttcatctcagtactagtgtgaggcccctccacacttcacccatgcctggtggcttcctggggagtcagtaactgacaactctgatgtacagagccccgtattcagagctggggatgcagaagcacattaggtgaggtccttcccagtttcatgggggttgtggtggtcactggtgggattgaggcaaccccgagggctgcaggagcatatgggaagcacctaagacgggcaggggtgaaggcagtcagagaagactcctggaggagctggttgttcgtaaattctcagaaggaattacttttcgggccaagagggtgaagaagggaagagaagacagcacaggcagaggtctggaggggagaccagcgtggtgtggtgtgtgtgtccgcatgggtttagggaggggcaggaagggcatggtgggtgtgagttgctgagacatgaaggagtaggatggtggaggcagcagtgagaggggaggctggagaggaaacaaggatcacgactgctaagtggtgcacggttcagggggcggggtggtcaggctgcaacagagacctggatggaggctgctggggccatgcatctaggtgaaagtggtgtaaccctggcccaggatggcactgggaattgggaggtgggcagggcttggaggagtctcagggaggtgggcaggagggagtggctcaggcgaggcccttgggcaggatggaccctcagtccccctcccgaagtcctgagtagccataggagagggtcgggctccccaccctctcttttcccatcctggctctccttacctagatcagccaatccgtccccgtggtgcccagaggtctggcagacgcagagcctgttacctgggctgtgttactcagggacaatggaagctccccacctctttgctgaatcccacaaggaaaaagctggaaatctgtggcccttctgtaaggccattgctgtaaggaaaggaagcgggttggttttatttgtattgtatcctcagcacctgtagcccatgtggggtacatgggaggccctcaggtcatgcgttgattgagtggataggtgggggaaggtcagcatcttgctcatcttgtattccatatggctagtttggtgcctggtatgtaataggtacttatcaaattgagtgagtgaatgaatggatgaatgaatgagtaaagagagagggaaggtagtaaaaaagaaagaaacagtcttctcacttttggccgggcgcagtggctcacacctgtaatcccagcactttgggaggctgaggcgggcggatcacgaggtcaagagatcaagaccatcctggccaacaaggtgaaaccccgtctctactaaaaaaaaaaaaaaaaaaatacaaaaattagctgggcgtggtggcgcatgcctgtagtcccagctactcaggaggctgaggcaggagaatcatttgaacccgggaggctgcagtgagtcaagattgtgctacagcactccagcctggtgacagagccatactctgtcaagaaagaaaggaaggaaggaaggaagcggaggggggggagggaaagaaaaatagaaacagtcttctcacttttgtatccccagggcctatgtactatctagcacatagtaaggactcaatgaatagttgaaatttatatatgtatgcatgaatgaataaaggaaggagggaaataaggaaagaagtagccttgctccctttgtgtcttcagagcctaaccagtgctaggcatagcatagtaggtgctcagttaatatctgctggatgttaactgcgtgaatgttggatggatcagagccactctcttccacgttggtctggccctccccaggcgcccctttgttgacacctcgggtgacattgcatctgccctggcaggtggacgagcagattcatgcctgctatgcacagaccatggctgagtggctgggctgcgaggcgatcgtgcggcagagggagcgggagtcccatgcggccgccctggccaaatgctcatccggggccagcttggacagccacctgcaccggatgttgcacagggactcaaccatcagcaatgaggtgatgggcggctggcctcggggagcgcgggggctggggaaggtcagggtctgcttcattgggctgttctaagagtggtgaagactgggtgtctggggcctggtgacagtctcacccctggctttttctttaagagtgtgcggtgactttggaatcagacctgaattcaaactctagtcccaccatttagtagttctggggttccctaccagtaccttttcttctgggcctcagttttctgcatctgtaaaatgggaataatcaggtgtagaggaggttcgtgtacagtccaaacaagacaatgtatataaagtgcctggcgcactgcctgactttcattgattcaacaaatgcttattgagtatctactatgtgcaggtactatcaggaatatcctgggatatcaggaatgttccagtgacccagacagactggtctgtcctcccagaacttccagtttaatagcccaaagtaggatctcagtaaaaagtaggatctcaccacccttgactgagggtggtggctcacgcctgtaatcccagtactttgggaggccaaggcgggtggatcacctgaggtcaggagttcaagaccagccttggccaacatggtgaaaccccatctctgctaaaaatacaaaaattagctgagcgcctgtaatcccagctacttgagaggccgaggcaggagaatcacttaaacccgggaggcggaagttgcagcaagccgagattgcatcactgcactccagcacgggcaacgagcgaaactccctctcaaaaaaaagttaattttcttcagcagtgatgatatcagtcatcaattgccacaataacagtgtgtaacaaacaaccaccaaaaatcaatgacttccaacagtcagcgtttatttttgctcacaactctgggtcagctggcaagttctgttcttaactgggctaggcgaggcttattctggcaccagctgtccgtaactggtcaactaaaacatttgtttatcttggttgggctctcgtatttgcctggggtgactcagctgtgctccacgtggctcactgcccagcaagttaacctggacgtgctctcacggtgaaagcagatgccacagagagaaagcggaaatgcacaagggtgttctaagcctctgctgagtcaagtttgttaacatcccattgacaaaagcaagccacatggccaagtctagtgtcagagtaggcaaggactatgaggttatagggcagaagcatgtatacagggatcatgggaaaaaaaaaagtggagccattaatagaaccagttactctgtgagttgaactgaaatattggccagaagtctcaattacagagcagttaaaggtggggtgctctagttgcagaggtgagaggtgggaacccagaggtcaaagcggtctctgaagaggctccaggaagcagggagtggtgcccccctttcattttacagctaggaaactgatgctctgagagaggacttgtgcaagttaggaatagagatgcaactagactttctggctcccagcccagcagtccttcctgctctgggccagggtgcagcctcaccctccctccctcctgctctttcttttctcagtcctcccagagctgcagttcgggccgccagaacatccgcctgcacagcgactccagcagcagcacacaggtgaccttgtggaggcctcgccccctcccacccactcctctcccttctgcctggggtcatgggggttgggtgtccgtcatctgtaggtcactttttgctttatttgttttagctttttatattagcattaaacattgttttttgttttttgtttagtaatgcaagaaatatatggatctatcacccctgcaaaaaactaaaacattgtagagaaagtcaaagtctgctttgatcgtccttaatctctgcctgccctctcttgaaataacaccactatcatgagtttgctgtgttcctttcaaaaccttctgtatgcatatacatacacagaaatatataatctatagcaatgtttggtagttgttttttaaatgtgtacataaatgccatcatatatgttgttcaacaactttccgtttcaattggtgaaaagagataactcaatctcactccgtttttaaagaaaaaagctggctgggcatggtagttcacacttgtaatcccagcactttgggaggccaaggtaggcagatagcttaagcccaggagcttaaacccagtctgggcaacatggcaaaaccctgtctctacaaaaaatacgaaaaaaatcagttgggcatggtggtgcgtgcctgtagtcccagctgctccggaggctaaggtgggagaatcaccagggcccaggaggttgaggctgcagtgagccatgatcacgccactgcactccagcctgggtgacagagtgaaaccctgtctcacacacacgcacacacaaagccaagtgcaaaaacatgcatagtgtgttgtcaccttttgtgtaagaagaggcaatattaatatctgtatatatttgcctccatttttgagaatggtatgaggagcaaccagaaacgaatcagaatgattaccgagagaggagggggcagagacagaagctacatttccttgaatatgccttgcttcctaattttgattttggagtaaaaaaaaaactctggttttgactctgaagctaggtaaactttttacataattaaaatcaattgaatcaaaaagaagtttttgaaaacacagaaacacatgaaactaaccataaatcaagttggtgacataaccacacagggaagaaatatttcaggtgactttggaacatgatctttaactgtgtacccttgatatgatccaagaacacaaagagtcacaaaaaaatctctaaaatgtattctggagatttttttcatagtatttcatgtatatctaacttgaaaaattgattcataatagtcaaccacctgggtgtaaaagtaatagggtttttttattttttgttttttggtttttttttttttgccttttccgtgtgttaactaattttttgaatgagaaaaattatgtatacatgaggctgggcacggtggctcatgcctgtaatcccagcactctgggaggccgaggcaggtcaatgacctgagatcagcagttcaagaccagcctggccagcatggtgaaaccctgactctactaaaaatacaaaaactagctgggcatggtggcacatgcctgtaatccaagctacttgggaggctggggcaggaaaattgcttgaacccgggaggcggaggttgtggtgagccaagatcgtgccacttcactccagcctgggcaacagagcgagactccatcttaaataaataaatacatacataaaaataaaattaggtacacatggtaaaagtctatatgatgaaaagttattgtctccccttattttgattccctagtacccccttctcagagtcaactgcacgcggggcgtggtggctcacgcctgtaatcacagcactctgggaggccgaggtgggcagatcacctgaggtcaggagttcgagaccagcctggccaacatggtgaaaccccatctctaataaaaatgcaaaaatcagccaggcatggtggcgagtgcctgtaatcccagctactcgggaggctgaggcaggagaatcacttgatcccgggaggtggaggttgcagtgagccaagattgtgccactgcactccagcctgggcaacaagagagaaactccatctcagaaaacaagacaaaacagagtcaactgcagtacttttttgtctctttgtggattattttatgcatacacaagcacatagatcacttttttattgctgtttgagacagagtctcactcccatcacccaggctggagtgcagtggcatgatggtcacagctcactgaagtcttgactccccaggcttgggtgattctcccacctcagccccccaagtagctgagaccacatgtgtgtgccaccataccaggctaattttttgtattttttgcagagaccaggtttcaccgtgttgcccaggctggtgtcaaactcttgggttcaagcagtccacctgccttggcctcccaaagttctgggattgcaggcgtgagccaccatgcccagcctagatcactttcttatttgtcacaaatgggagcgtatattacaccttgttttgcctcgttcttttcactgactgtatggtattccactgcatgcttgatccatatttaagccgatcacctgttgttggatgtttaggttgctgatgtaagtaatgctgcagtcgacatgccggtccatctgtttttgtgcaccttgtcctcaggtgtttgagtctgtggatgaggtggagcaggtggaggctgaaggcagattggaggagaaacagcccaagatccccaatgggaacctagtgaacggcacttgttccccagactcgggtcatccttcctcccataacttctcctcgggcctctcagagcactcagagcccagtctgagcacagaagacagtgtcttggacgcccagcggaacacccccacggtgctgcgacctagggatggcagcgtggatgacaggcagagcagcgaggccaccacatctcaggatgaggctccccgggaggagctggccgtgcaggacagcctggagagtgacctcctggccaacgagagcatggacgagttcatgtccatcacgggcagcctggacatggccctgcctgaaaaggacgatgttgtgatggagggctggaggagcagcgagacagagaaacatggccaggcggacagtgaggacaacctctcggaggagcctgagatggaaagtctcttccctgccctggcttctctggctgtgactacttctgccaacgaggtgtcccctgtgtcttccagcggcgtcacctactctgtaagtcaccaggaccctccgttccatttccttctttccagctgcaggagggtgggatgtactacaagcctgttatccagaatgaccccggagtcagacctctggttcgttgcattttttccgtcatggaggattcactgtagaaacccatttgggagagaagataacgtagcatttaaaaaggggggctgggcactgtggctcacacctgtaatcccagcactttgggaggctgaggggggtggatcacgaagtcagaagatcgagaccatcctggctaacatggtgaaaacctgtctctactaaaagtacaaaaaattagccgggcgtggtggcaggcacctgtagtaccagctacttgggaggctgaggcaagagaatggcgtgaacccgggaggcggagcttgcagtgagccgagatcgcaccactgcattccagcctggacaacagagcaagatctcaaaaaaaaaaaaaaaaaaaaaaaaacgtgtacagtgttataatattttatgcaactactgtaaatgtcagtgcttgcattattttaacagagtaataggtaagccatgtagtaaactgtcctaatttttgtctttcctgtaaaaaaatttgtttttcctagatgtgttttccttttcctgttttctttttcttagtttgctgcatatttaaagtcagttcacccccagaagtctttgccactttcctaaatctcttttcaaacatttagacatatcatgtttttcatttgttctgtgtgtccaaggacttctccccaaaagcctactgatgccctccactccactgcacctgatgtgtcattatcattcacaatcttcctcgtcctgatcttgagcttccttttgtgtcagtcatgttttcctctttcttagtctactctcttatttagatgaagcacatacctcagtggcttccacattttttgcttttcttttcttttttttttttttttttaattgagacagggtctcgctctgtcacctaggctggagtgcagtggcgtgatctcggctcactgcaacctctgcgtcccgaattcatgccattctcttgcctcagcctcccaagtagaaggactacaggcgcccgccaccacgcccggctaattttttgtgtttttagtagagatagggtttcaccgggttggccaggatggtctcgatctgctgacctcgtgatctgcctgccttggcctcccaaagtgctgggattacaggcgtgagcctccatgcctagcttgcttctcttttttatcatttctttgtccttctgtgctgaattctggattgtttgttcagatctcctttcaattcagtaattctctcttccagaatgttttattttctgtcacctatctctagtgtttaatatattttttaacattttatttggcctttcttcaaatatgctataaaatgacttacttgattattttatagtctcttgcttttttttttttttgaaatagtctccttctgtgcgtgatttggagggcagtggtgcaatcactgcagccttcacctcctgggctcaagcaatccttcctcccacctcagccccacaagtagctgggactacagggctgtaccaccatgcctggctaattttttgtattttttatagagatggggttttgccatgttgctcaggctggtcttgaactggcctcaagtgatctacccgctgtgacctcccagagtgttggaatgacaggcatgaaccagtgcaccccagcttttgttcttattgttaacctcttctttctttctttctttctttctttctgtatttttgagacagagtttcgctcttgttgcccaggctggagtgcaatggcgtgatctcgactcaccgcaacctccgcctcccgggttcaagcgattctcctgcctcagcctcccgagtagctgggattacaagcacgcacccacgcccggctgattttgtatttttagtagagatgggttttctccatgttggtcaggctggtctcaaactctcgacctcaagtgatccgcccgcctcggcctcccaaagtgctgggattacaggcatgagccacggcgccccgccttatttctttaaatacagtaaacatacttattttatgatctgtttctgatacttctaacaactgaggccctgatggctctgattctgttttcttgtatttatgccaaccatcactcctggcaccttctttctctgagtgtttcatgatttttgaacatgagctcatatttcttgggatattatctgctgtactatttaagacccaggtggaaggtagattcctcaagagaggggttttcttctgcttctttctagtgccagggaaataacaaatatgagatgacaactacattctctgatctttcagaccacccaggtaatgggagtttgggttataaaccgcatgagttacaaacctgacttgtggctcttaattatgcagggagataacatttacatttaatttaataactatgttcaaggtataatcagtcaggtattgtaactgtttcactcagacccaaagtgacaacattcatgaggtgaactgtggatgaaaaatattgctgtcactgcgggcaggcaattgttttgagatcccaagatattagtgggtttttctagttttccctttctgagggtgtgactccttagggccctaccttcctgtaggaaggtctcttattagatcttcaacttgagtaggggagcaaaaaccaatcaaatctaagcttaaattttcccactttggcagctttccttaaggcaaaggccagctttggtgttttctcacctttctgggttagtttttggtccttaaatatttcttattttcttgccacatcattgagccattttgaaattaaggtacttgttcaagcagccaggccagtacgttaccagaatttgccctctgtgcagttcttcattctccttgtccagttttcagcagagagaggttcacttccagctatagttgtaactctctgagggagaattttcatcctgcaaattaaacacaccctcccagaaaacaaacaaacaaaatcaaacacctggctggtccaggtgggagatgtattttcagtgacaacaggagagggttaggaagaggagataggattgctgctttccagtggggacttagatgtgatttttcatttcttccccctaccccctgccccgatggcctatagccagagctgctggatctgtacacggtgaacctgcaccgcatcgagaaggatgtgcagaggtgcgaccgcaactactggtacttcacgcccgccaacttggagaagctgcgtaacatcatgtgcaggtggctggggacagcgaggggatctaggggatggggatggcgggtgggtgggatgggggatgtagggggcccgcctagaagttatttcagcttctgaagctggcatcatactcacctggaatcttacttagcccacagtgaaaatttaacaacaataatatagaacatttattaagcacttactgtataccagccactgtcctgaggcctgtactatcatcgctcacttattcctcaacccgacgaggtattaaccccttttataggtgacgatgtggaggctccaggaagagcctcattgctgagtgggcatcgggcagtggctgagcgggaactcatagccatgtctctggctgtagaatctgtcctttttctatttttctttaagccaagatctacgactggttattactgttcactaaaaagatattattcctgtaatcccagcactttgggaagctgacgtgggaggatcacttgaggccacttgagttcttcacagacttcaaaaaagtagagactggcctggcaacatagtgagaccctatcactacaaaataattttttttaactcaacatttagctggacatagtggcatgcacttgtagtcctgcatacttgggaggtggaggcaggaggatagcttgagcctagaggttagagggttgtagtgagctatgattacaccattgtactccagcctgggtgacagagtaagaccccatctcttaaaaagtaataaaaataataaaaataattattgatatttcttaaaatatgaaagtaacccatgcttgttaaaaatctaaatcactgacaactctaatcccagcactttgggaggccaaggcaggaggattgcttgaggccaagagtttaagacccagtctgggcaacataacaagaccccatctctacaaaagttttaataaattagccaggcatgattgtatacgcctatagtcgtagctactttgggaggctgaggcagcaggatggcttgaacctgggaggttgaggcaacaatgaactgtgatcacacaactgcactccagcccgggcaacagaatgagaccctgtctcaaaacaaaacaaaaatctaaatcaaagaaattagaagttcataagatagaaagagaaacttctcccttcatctctgcccggcagtgccactcacccagaattaatgactactaacaatttagtaatatctaattgattgtatattgtataacataatatgaatgtacttttttttttttttaatggagatggagtctcgctctgttgcccaggctggagtacagtggtgcgatctcggctcactgcaatctccgcctcctgggttcaagcaattctcctacctcagcctcccgagtagctgggactataggtgcacgctgccaggcccggctaattttttgtattgtagtagagatggggtttcaccatgttgcccaggctggtcttgaactcctgagctcaggcaatccacctgccttgacctcccaagtgctaggattacagtcatgagccatcgcacccagcctgaatgtacatattttttaaatgttttaaactatgatatagtctcataagtgttacattaaaatgaaaaaaatgctgggaagaagtaaaaataaactgactcctccctggttaaggcatagggagaaatcatggaagacttcacagtggtggtgacctttgagatggattttgacaacgttaagaaaactaaagaaaccataggctgggcacggcggctcatgggaggtcgaggcggccagatcacctgaggtcaggagttcgagaccagcctggccaacatggcgaaaccctgtctctactaaaaatacaaaaattagccaggtgtggtggcacacacctgtaatcccagctactcaggaggctgagacaggggaattgcttgaaccggggaagtggaggttgcagtgagccaagattgcaccattgcactccagcatgggcaacaagaacaaaactctgtctcaacaaaaagaaaaaaaaaaaaaaaaggaaaaagaaaaagaaaactaaagaaaccatttagcatagaggctaagatcatatatccttgagtaaggcctcctaggttcaagtactgcctctgccacttattattaagtgtatgatttgggacatgtcatttacctgtctatgcttcagtcccctcatctgtgaaatgggataatccatggacattttttaaatgtacatttaaaaaatgtgtacattcaggctgggtgcaatggctcatgcctgtgaaatgggatagtccatgtttcacatgactattttgaaaatagtgggttgagaggccgggcgcagtgtctcacgcctgtaatcccagcactttgggaggccgagacgggcgggtcatgaggtcaggagatcgagaccatcctggctaacatggtgaaatcccatctctactaaaaatacaaaaaattagctgggcgaggtggcgggcgcctgtagtcccagctactcgggaggctgaggcaggagaatgtcgtgaacccagggggcggagcctgcagtgagcagagatcacgccactgcactccagcctgagcaacagtgagactccgtctcaaaaaaaaaaaaaaaaagaaaaagaaaatagtgggttgagtatacagtaagagctcgataaatataagctgttattagtaagggacagattgcaattcctgacaaagggagctgtaaggcaaagatacagaaacataaatttgtgatttttttgtgcaaagtgaatacgtcaatgttgctggagaggaagacagtgggaagcgatgtttgaggctgtgaagatgagttgagaggaggccattactccttgtacccccagtaaaggagtttggataacatcccatcagacagcagggtgcttgtgcaagttttgagcctgaagaggcctcctgagttggcctttagggaggtcatcctggtggctgcacataggatgtttgaagagagagatcggggatggagatgcaggcaggaggctgagggaggggtccaggtgagggattggggaccgaagcaggaggaacagaaggtggagtgggttggagaggcaggccacggctgccatcattggccccttgtgtctcttctagctacatctggcagcacattgagatcggctatgtccagggcatgtgtgatcttctggctccactgctggtcattctggatgatggtgagtgtgtctttactgccctagggctgagggtgcatttcctttccactgcatggcagaaggcttaatctcactttgtgactctgtagaatgtggctccagccaggtgctctgaaggcctgtctggtgaacacatcaagatcctagtgaaataaaaaagtccttatattccatggtgccccatactcaacacccagacaggcctttgctaaccactgattatatgaatatgaatgagaacaaacaaacaaaacaaaaaaacaaacccagacggcttcactggtgagttctatgaaacatttaaagaagaattaatgccagccgggcacagtggctcacgcctgtaatcccagcactttgggaggctgaggcgggcggatcacaaggtcaggagatcgagaccatcctggtgaacacggtgaaaccctgtctctactaaaaattaaaaaaaaattagccaggcgtggtggcaggcacctgtagtcccagctactcaggaggctgaggcaggagaatggcgtgaacccgggaggtggagcttgcagtgaaccgagatcacaccactgtactccagcctgggagacacagcgagactctgtctcaaaaaaaaaaaaaaaagaaaagaagaaaagaaggattaatgccaattcttcgtgaactcttcaaaaacgtagaaaaggaaggaatgcttcttaactcattcaataaagccagacctcatatgaggactgggtgtctcattggcacccagataccaataacagacaaagacataacaagaaaactacacaccaatatccttcaataatacaaatgcagaaatcctcaacaaaataccaataaacttaattcaccaagatataaaaaagcttatacaccatgaccaagtagggcttatctccagaatgcaaggatggtttgacatgcaaaaatcaatcaatttaattcactacattactaaaataaagggaaaaacccacacaatcatatcaattgacacagaaaaacacaacaaaatccaacaccctttcataataaaaacattcaacaaactaggaatagaaggaaactaaacacgatagagggcatttatggaaacctcacaaatatcatcatactcaatggtgaaaaactgaacacttcctccctgagagcaggaacaggacaagtatgtctatttttgccgccaaaggttctagccagggcaattaagaaagaaaaagaaataaaagtaattcagattggaaagaaagtaaaactatctttgttcacagatgatgtgattttgcgtatagaagatcttaaggaataaaataattaaaactgataagtgtatcaaggttgcaggatataagatcaataaacaagagtctcttgtatttccatacacttgaaatgaacaatcccaaaatgaaattaggaaaacaattttatttgcaatagcatctagaagaatacagtactggctgggtgcagtgactcatgcctgtaatcccagcgtttcgggaggccaaggcgggtggatcacctgaggtcaggagtttgagaccagcctgaccaacaaggtgaaacccagtctctactaaaaataaaacataaaaaaaagtaaacaaaaatagccaggcgtggtggcgcatgcctctaattccagttacttgggaggctgaggcaggagaattgcttgaacctgggaggcagaggttggagtgagctgagattgcaccactgcactccagcctgggcaacagagtgagactccatctcaaaaagtaaaataaaaaataaataaataggccgggcatggtggatcacgcctgtaatcccatcactttgggagcctcggtgggtggatcacctgaggtcaggagtccgagaccagcctggccaacatggtgaaaccctgtctctactaaaaatacaaaaattagcccagcatcgtggcgggtgcctgtaatcccagctacttgggaggctggggcaggagaattgcttgaacctgggaggtggaggttgcagtgagctgagattgcgccattacactccagcctgggtgacaagagcaaaactccatctcaaataaataaataaataaataaataaataaataaataaataaaagaatacaatacttatgagtaaacttaacagaaatgcaagatttgtacattgaaaactacaaggcattgttgaaataaattttaaaaacccaaataaatggaaagatatctcatattcatggattggaagacttagtgttgttaaggtagcaatgctctccaatgatctgtaaagtcagtgcaatctctgtcaaaaatcccagctgcctttgttttttgttgttgttttttttggttttttggtttttttgcaaaaattaacaagctgaccctaaagttgatatggaaattcaagggatttagaatagccaaaacaatttttaaaaggatatgttggccgggcgcagtgtctcacgcctgtaatcccagcactttgggaggctgaggtgggcagatcacgaggtcaggagatcgagaccatggtgaaaccccatctctactaaaaatgcaaaaaattagctgggcacagtggcaggaacctgtagttccagctactcaggaggctgaggcaggagaatggcatgaacccgggaggcggagcttgcaatgaactgagatcgcgccactgcactccagcctaggtgacagagcaagacgccatctcaaaaaaaaaaaaaaaaaaaaaaaagatgttgcaggactcacagtacctgatttcaaaacctactacaaagatacttaaaatagtgatatttctgtaaggatcaacatgtagatcaatggaatagaattgagagcccataagtaagcccttacattgatggtcaattgattttgacagagatactaagacaattcaactcagtgaggaaaaacagtcttctcaacttatggtgcaagaactactggacagacatatgcaaaagattgaagttgaacccttacctcacaccacatacaacaaactaactcaaaatggatcatagacctaaatgtaagaactaaaactgtaaaatttaaaacaggagtaaatctttgtcaccttgggctagggaattttttttagatatgacaccaaaaacataaagaaagaaaaaataggcaaattagacttcatcaaaattaaaaacttttgtacttcaaagaacaccatcaagaaagtggaaagaacccaaagactagaagaaaatatttgcaagtcatatgcgtgataaaggacttgtaaccaaaatatataaacaactcttacaattcaacggtaaaaagacaacctggccaggcgcggtggctcacgcctgtaatcccagcactttgggaggccgaggcgggcagatcacgaggtcagaagatcgagaccatcctggctaacatggtgaaaccctgtctctactaaaaatacaaaaaattagctgggcgtggtggcgggcgcctgtagtcccagctactcgggaggctgaggcaggagaatggcatgaacccaggaggcagagcttgcagtgagccgagatcgcgccactgcactccagcctgggcgacagagcgagactccatctcaaaaaaaaaaaaagaaagaaagacaacctgattaaagtgggtgagggatttgaatagacatttctcaatagaattgaagatatgcaaatggctaatatgcaaatggccaataagcacattaagggatgctctacatcggggccccaagccctgtgccacagacaggaaccttgccgcacggcaggaggtgagcagtaggctagtgagcattacagcctgagctccacctccctcctcctgtcatatcagcggtggcattaaattctcataggagcgtgaaccctattgtgaattgtgcatgtgaggggtctaggttgtgcactccttctgaatatctaatgcctgatgatctgaggtggaacagtttcatccagaaaccatccccccgactccactccctgtccatggaaaaattgtcttccaggaaactggtgtctggtaacaaaaaagttgaggactgctgttctacatcgttactcattaggaaaatggaaatcaaaaccacagtgagataccacttcatatacactgggatggctagaatcaaaacaatagaaaatcacgggttgataagaatatggagaaattggaagctttggacattgctggtggaattgtaaaatggtttggccactttattatttatttatttattattattattattattttcagatggagtctcatcctgtcacccaggctggagtgcaatggcaccatctcagctcactgcaacctccacctactgggttcaagcaattctcctgcctcagcctcccaagtagctgggattacaggcgcccaccaccacatctggctaatttttgtatttttagtagagacgggatttcaccatgctggccatgctggtctcgaactcctgacctcaggtgatccacccaccttggcctcccaaagtgctgggattacaggcgtgagcgaccatgcctggctggtttggccactttaaaaaacagtctggcagtttctcatagtaataaacatagagttatcatacgacccagcaatttcatccgtagatatatgcctaagagaattgaaaatatatgtgcatacaaatacctgtacatatatgttcataatagcattattcataatacccaaaaaagtggaaacagtccaaatgtccatcaaattatgaatgcataaacaaaatgtggtatatccatacaatggaatattatttggcaaaaaaaggatgatgttctgatgcaaactacaatgtgggtgaaccttgaaaacataatgctaagtgaaagaagccagacacaaaagttcacaaatggtgtgattccatttatatgaaatgtccagaatagacaaatccatggagacagaaagactagtcgttgacagggacttgggggagaaagagatgtgaagttgctgcttcattgatatagggattttggggttgggggggtaaagaaatgttctggaactaatagtggtgattgcacaacattgtgaatgtactaaaaccactaagtggtacatttaaagggtgaattttatatgagaatctcaataaacctgttaaaaaaatgggggctgggtgcaatggctcacacctataatcctagcactttgggaggcaggaggattgcttgagatcaggagtttgagaccagcctgagcaacatagtgagactccatctctataaaaatttaaaaattagctgggcatggtggtgcacacctgcagtcccagctactcaggaggctaagacaagaggattgcttgagcccaggagttggaggttgcagtgagctatgatcatgccactgcattccaagcctgggggacagcaagactctgtctctaaaatgtaataaataagtccaggcccagtagctcacacctgtaatcccagcactttggaaggccgaggcaggtggatcacttgaggtcaggagttggaaaccagcctggccaacatggtgaaaccccatttctactaaaaatacaaaagttagccaggcattgtggtggggacttgtaattccagctacacgggaggctgcggcaggagaaacacttgaacccaggagacagaggttgcagtgagccaagatcgtgccactgcactccagccttggtgacacagcaagactctgtctcaaaataaataaataaaataaaataaataggcaaggcgtggtggctcagcctgtaacctcagcactttgggaggtggaggtgggcagattgtgactagcctgggcaacatggtgaaacgtcacctctacaaaaaatagaaaaattagccaggtgtgttggcagacacctgtggtcccagctactcaggaggctgaggcaggaggatcacttgaggctgccaaggtcgaggctgcagtgagccgtgattgtgccactgcactccagcctgggtggcagaatgagaccctgtctcaaaaattaattaaataaataaatacataataaatggggagcataattccccactttttttttttttttttttgagatggagtttcactcttgttgcccaggctggagtgcaatggtgccatctcagctcactgcaatctccgcctcccaggttcaagcaattcttctccctcagcctcccgagtagctgggattacaggcatgaactaccatgcctggccaactacctacactttagacacggactgcacatagtgacttgtttccaaaaagtgcagtatggaaggcagtgatgggatgagaaacctgacaaacacgacctcagccaggtgaccatggccaacatcagcagtcataaatcatggtgacagtatatacccttatgatgtgattaaactggcccattacctctgtggttttcctctcgataacccatagcccagtcttaccatgagaaaggcatcagataaattccattactaatagtgcagcatcctgcaaaaatacctgaccagtacgcctcaaaactatcaaggtctctaggcgcggtggctcacgcctttaatcccagcactttgagaggctgaggcaggcaggtcacaaggtcaggagatcgagaccattctggctaacacggtgaaaccccgtctctactaaaaagacaaaaaaattagttgggcttggtggcgggcgcctgtagtcccagctacttgggaggctgaggcaggagaatggcgtgaacctgggaggcggagcttgcagtgagccaagattgcgccactgcactccagcctgggcgacagagcgagattctgtcttaaaaaaaaaggaaaaaaaaaaaaaaactatcaaggtcatcaaaaacaagaaaagcctgagaaactgcgacagccaagaggagcttaagggaacataaccaattgatgtaatgtgctgttctggatgagagcttggaacagaaaaatgacattcagtacacgctaaggaaatctgaatacaatatggactttagttcataatgtgtccgtattggttcaacaaatgtaccatgctaatgtccagatattaatagaggaaaccacgtgtggggtgcatgagaagtctttcctgtcttctcagtttttctgtaaatcaaaacttttctgaaaaataaagccttttggccaggtgcagtggctcaggcctgtaatcccagtactttgggaggccaaggcaggcagatcacgaggtcaggagatcaagaccatcctggctaacacggtgaaaccccgtctctactaaaaatacaaaaaaggtccacccccaacattggaggtcatatttcaacatgagatttggagaggacaaacatctgaaccatatcacttgggcagcggggcatctgactgttctgtgatgctttctcagaggcccttgccttcagctgcttcacggagctcatgaagaggatgaaccagaacttcccccacggaggcgccatggacacgcactttgcaaacatgagatcgttgatccaggtatgacccagcatccattcttgctttggacttttttgggaaacagttagtaaagcttagtggctccagactgagctatttagagcccacctggattggaatccaggtttgtatttctgccatacaaactcagcatatactcttatctctgtgggcctcagttttcttatctgggaaataggttttctcacttatatgagtcccaataaattattagaattatcatggaaatgaagtaaactaatgattttatagtgcttagcacagtgcatgtcagtgcctctcagagcatagtccacgggctggcaacatcagcctcacctggcaacttgttagaagtgcaaattactaacacggtgaaaccccatctctactaaaaatacaaaaaaaattagcagggcatggaggcaggtgcctgtagtcccagctactctggaggctgaggcaggagaatggcgtgaacctgggaggcagagcttgcagtgagccgagatcgagccactgcactccagcctgggcgacagagcaagactccatctcaaaaaaaaaaaaaaaaaagaaagaaaaaaagaagtgcaaattactgggcacctttcctccaccgaataaaaatctctgagttgggcccaggagtctgtgccatatgaagctctccaggtaattctggtgcaagctcgattttgagaagtattgtaataaatgctagctctttggcattcatagcgattggtatatctactccccagaggaattaagacactcaaccctttgattagaaggaatgcaaatgtgttaacttgagtaaatattatggatgctttattatctacacactagcagtggggctacagttagctctgacttcttctttagtggaactttaaaatactacaaagtattttggacataagaaaggtaaaagagtaatataatgaacacccatgtttccacccccacctccccaagaaataacacattaaccataggcctggggtggtggttcatgccagtaatcccagcactttgggaggcagaggcgggcggatcacttgaggtcaggagtttgagaccagcccggccaacatggtgaaaccccatctctaactaaaaatacaaacattggccggggtgcggtggctcatgcctgtaatcccaacactttgggaggctgaggtgggtggatcacgaggtcaggagatcgagatcatcctggctaacacggtgaaacactgtctctactaaaaatacaaaaaattggccgggtgcagtgactcaagcctgtaatcccagcactttgggaggttgaggcgggcggatcacgaggtcaggagatcgcgaccatcctggctaacacggtgaaaccctgtctctactaaaaaaatacaaaaaaattagccaggcctggtggcgggtgcctaaagtcccagctactcaggaggctgaggcaggagaatggtgtgaacccagcaggcagagcttgcagtgagctgagatggcgccactgcactccagcctgggcgacagagcaagactccatctcaaaaaaaaaaaaaaaaaaaagatacaaaaattagccaggtgtggtggcacacgcctataatcccagctacagctactcaggaggctgaggtaggagaattgcttgaacccggtaggtggagattgcaatgagccgagatagccccattgcacaccaacctgggtgacagagcgagactctgtccccccccccaaaaaaaaattaaccatagatttttcattattcgtgtaccccttcttgatggcttttccccatcactcctgtcctcccagtggtaagcactttgcagattcctatgttcaccattataatgcatttttaaaaattcttttacaatatatgcatatattcctaaacagcatacaactctgtttctttactccccactttacataaatattttaaatggtatgaactcttgtgcagctcgtctttatactcagtaaggagtttgagaggctcgtcaaccacggggcagttgattcctctttcccggaagtacagtcttttgtgttaggagtacaacgcattctatcacatttgatttggatccattttcctgttggtggtcatttaggctgtttttatttggtttggttttgcttttgctttggggaatttggggttttgtttttggcctttataaacagtgctgcggccgggcacggtttctcacgcttgtaatcccagcactttgggaggctgaggcgggcggatcacgaggtcaggagattgagaccatcatggctaacacggtgaaaccccgtctctactaaaaatacgaagaaattagctgggcgcggtggcgggcgcctgtagtcctagctactccggaggctgagataggagaatggtgtgaacccgggaggcggagcttgcagtgagccgagatcgcgccactggactccagcctgggcgacagagcgagactccgtctcaaaataaataaataaataaataaataaacaaacagcgctgcactgaaattcttgtgtgcatccctgctgcatgcacgcaacaactttgcttgggcatctactcagagtccaattgctggagcagagggaatgcacatcctcagttttatcaggcacaaccgaatcactcttaaagtgattgtactagtttcttaatgctccagggcagtatggtaaggatttcaacacacaccatcctcacttgatattgtcacacttatatatttttgccaatctcttggatatgatcgagcatcccattgtgatttataattttttttatttttaatttttgtgggtacataataggtgtatatatatgtggagtacatgagttgttttgagacaggcatgcaatgtgaaataagaaaatagagtttgtggaaaatagagtttccaatccctcaagcatttatcctttgtgctccaaacaatccaattatacacttttagttattttaaaatgtacagtgaaattattattgaccatagttaccctgctgtgcgatcaaatagtatgtcctcttcattcagtttttttcattgtgattttgtttgcattgtcttgattgacagtgaaattgagtatcttctagtttttggttcatttggattgtgaagtgcctattcatatgctttgcccattttctatgtacatgttttccataattagagtcatttgtacatacttttctttctgtacattatttttcaaacatgtttttttcccactgaatagcatatccaatagctggaggtattcgtccaccatctgtttttttttataagagttttgttaaaatataatttagatacataaaatttacccttttgaagtgtacgattcagtggcttttcgtttattcacagagttatgcaacaacaccaatttcagaacattttcattaccccagaaagaaattcttcactaacaaccactccccatcccctccatctccccagcccctgaaaaccaaggagctactttctgtttccgtggatttgccttttctaaacatttcatgtaaatggaatcatacaatatgtggccttttgtgactggcttcttttacctagtataatgatgtcaaggtttatcctgtatgtatgatgcattgtagcatgtatcaaaacttagttcgaggccaggcacggtggctcactcctgtaatcccagcactttgggaggccaaggcgggtggatcatctgaagccaggagttcaagaccagcctggccaacatggtgaaaccccgtccgtctctattaaaaataacaaaaattagccaggcctggtggcgggcgcctgtaatcccagctacttgggaggctgaggcacgagaatcgcttgaacctgggaggcagaggttgcagtgagctgaaatcgcaccactgcacttcagcctgggcaatagagtgagactcagtctcaaaaaaaaaaaatttgtttttattacgagataatattaaattagattgtatggataggccactttttatttatccattcatgtcttgatggacatttgagttgtttcccagttgttggctattatgaataacacattacacacagtcattcatgtacagatttttatgtggatatgtttttgttttcattttgtttttttagatagggtctcactctgtcacccaggctggagttcagtggtgtaatcatagttcattgcagccttgaactcctgggctcaagtgatcctcccactttagcctcctgagtagctgggactacatgcccaggccaccatgccaggctaataaaaaattctttttttttttttttttttagagacagggtcttgctatgttgcccaggctggtctcaaactcctggcttcaagtgatcctcttgccttggcctcgcaaagtgctgagccaccacacctgaccaacagatgttttcattcttcttgggtatatacctaagagtggaattgctgcatcatatggaaatgatgtatttaagtttttgaggaactaccacactgttttccacagcacacaccattttacattctcaggagcagtgtatgggggttccagtttctctgcatcctcgccaacactttttattgtctgtcatttttaattttaactatcctagtgcgtgtgaattggtatcttgttgtggttttgaattgcattttcctaaggattaaggatgctgagcatctttcatatgccgcttggccatttgtgaatcttctttggacaaatgtctattcagatcttttcccattttttaaactgtaactggctgttaaggaccgtatggtgtctggtgtgtggatgtaccaccatttattcagctgtctcctctgctccaaccttttcccaggaggctgatgctgcctttccttccttgacagatcctggactcagagctgtttgagctgatgcatcagaacggggactatactcacttctacttctgctaccgctggttcctgctggatttcaagcgaggtacagactttaaattggggacctgtgtccagactctttgtagcagaactttcaggggaaaagatcccgtggaggtgaggttgaggggttggcaacagaggcagcagaggagagaagcacatgtttatggagtccagactaccgtttcacctgccttatcttgcactgacactctgtagtaggtgctgttaagatcttcatcttaccagtgaggaaaccgaggctgagaagggttaagttcagagctagggagagttaacttcagggctagggtgagtacagccaggacttgaacccatctctttcattctgctgtgctgcttttcagagcccaagaactctaaagcccatgaagcagggactatttcatgcacgtttccaacatgacataaaagtgatgtataacacagtaccttgttgctattgttcagatttggggtgatgttaataattatagtatctgacatgggccgggtgcagtggctcatgcccgtaatcctagtactttaggaggccaaggcggtcagatcatgaggtcaggagattgagacctaacatggtgaaaacctgtctctactaaaaatacaaaaaattggccgggcatggtggcacatgcctatagtttcagctactcaggaggctgaggcaggagaatcgcttgatcctgggaggcggaggttgcagtgagccgagataacaccattgcactctagcctgggtgacagagcaagactccatctcaaaaaaaaaaaaaaatctgacatgtatggagtgttttagtgccacgcactgtgctgagtcatttgtatgtattatctctttagtctttttctgttatcagcttcagcccacttacagatgaggaaagagacaggctcatgaagaagtaactaccccaggctccccttgccagcaagtgatggaggaaggaaggattcacaccaagtttatcggacataggaaggcttgcttttctttttttttttcttttttggagacggagtcttactcttgttgcccaagctggagagcaatggcgcgatcttggctcactgcaacctccgcctcccaggttcaaatgattctcctgcctcagcctcccgagtagctgggagctgggattacaggcacccgcctccatacctggctaattattttgtatttttagtagaggcaggtttcaccatatttggccaggctggtctcaaactcctgacctcaggtgatccacccacctcagcctcccaaagtgttgggattacaggtgtgagccaccacacccggcctttttttttttttttttttttttttcgagatgaagtctggctctgtcacccaggctggagtgcagtggtgcaatctcggcttactgcagcctccacttcctgggttcaagcaattctctgcctcagcctcttgagtagctgggattacaggcacctgccaccatgcctgactaattttttttgtatttttagtcgagatgggggtttcaccattttggccaggctgatcttgaactcctgacctcgtgatccacccgcctcggcctcccaaagtgctgggattacagtcatgagccaccatgcccagccaaaggcttgctttgaaccgttgctctattctttctcttcactagactcagaggccacagccggctctgccagtgtgtggggggaaagaagaaagggctctatgggtgctaatggagatggaggtgcagggatagcaggtgttgcttgtcaaagggcagggcaaggacagatccatgtaattcatacctgcacgtgcctggttctgccacttacagaatgtcagagctggaaggaacttagaactcacctggcttacacagcccatcctacagatggggaaaactgaggtttctggtggtcaaatgacagagcccaggtctcctgccttctgacctgagttctatccactgcaccagggcacaggcataaggcaaaacttgcccgggattttcccaccttggggggcttcccaaggcagggcaacactgtgagccccgtcaccaattctctccccatgtgtgttggtgtcttggcagaactcgtctatgatgacgtcttcttggtctgggagaccatctgggcagccaaacacgtctcctctgcgcactacgtcctgttcattgcgctggctctggtggaagtctaccgtgacatcattttggagaacaacatggatttcacagacatcatcaaattctttaatggtacccacatgactggggcctcatgagaggggtgcaggcttctggaggccccttttgggcatctcaggaggaatgaagatgggctgagatggatgcatggtgaaggggataaagagggctctgcacacttcttatggctatttccaaaaggacgagttcacatcttgtaatgctgagggtgcatttttctcagggatctggcagggggaccacagatgttgaaatcagctcaggggcaaagtctggttctatcgctgaccagctgtgcccatggtcaagtcacttcccctctctctaaacatccacttcctcatctgtgaaatgggctagcagtgtctgctttggagggttgacatgcataggaaaagcaggcccagggcagcaatttgagtaacacgaaaaagacacagcctttgaaatcagacagatgcgaattctgatccaggctcctgggagctgtgtgactttgtccaagtgacttcacgtctctaggcctcggattcttcagggataaaatggtactaacactccctccctcacagggaggtccagaggattacaggagacaacatggttaaatcccagcacgtggtacctggctcataggagggacccaataaacaaaagctattgccactgttatcactatttaaaaatgtttttaatgaaagaaagttctggaaaaaaacaaaagaaaaaagccaactgtgacctcacttttgaaacattattagggttcttaatttaagtaaactttttgggggaataattttgcattttaattgtctactaaaattgtagattgagaactgttttagatttagatgtacagagaatgcacgataccttggcctcgctttgcctactgttagcatttacataaccctggtacatttgccaaaactaagaaattatcattggcacgttaccatctattaaactacaggctttatttggatttcacctggtttttcactagtatcctttttctgttctagggtctaatccaggaaaccacagtcatgtttatttttatgtttttacataatcagaatccacttgtatatgccttttttcacttaatatttcaactattgtctttcatataatctttttttttttttgagacggagtctcactctgttacccgcgctggagtgaagtggcacgatctcagctcactgcaacctccgcctcccaggttcaagtgattctcccgcctcagcctcctgagtagctgggattacagacacgcaccaccacgcccggctaatttttatatttttagtagagacagagttttgccatgttggccaggctagtctagaactcctgacctcaggcgatccgtctgccttggcctcccaaagtgctgggattataggtgtgagccactgtgcccagccagtcattttttaaaactacaaaatatatctcaagtgactattctataacttactgaaccatttcttatcattagcatgtaggttattttcagtttgaaggtgtgatcgagagtccaaagcaattcatctgttagcataaagattcccaaattttctcaattcatgcacccctagtgtctctgtaaaattataacagcaccccaggccaaaagtttcatttagtaagtagttaagtccaaaccgcttaataagtatttatatcctaacaatttagaagccattgaaaaaataatacatatgtatctttttttttttttgagatggaatttcactcttgttgcccaggctggagtacaatggcatgatctcagctcactacaacctccgcctcctgggttcaagtgattctcctgcctcagcctcctgagtagctgggattacaggcatgcacaaccacaaaatactaattttgtatttttttagtagagacagggtttctccatgttggtcaggctggtctcagactcccaacctcaggtgatctgcccacctcagcttcccaaagtactgggattacaggtgtgaaccaccgtgcctagccaataatacatatatatctaaagaaaataacatttttacatcattcccgaataagcacaattgctaatggggtgtatgcacccattgggctttgcataccttctcaagccttggaatcagattggacaccacctcttttgttttctattccatattgattttcacatggcacttactttctttttttttttttttttttttgtgatggcgtctcgctctgtcacccaggttggagtgcagtagccaatccagctcactgcaagctccacctgtgggattcacgccattctcctgcctcagcttcctgaatagctgcaactgcaggcgcccgccaccacacctggctaattttttgtatttttagtagagatggggtttcaccgtgttagccaggatggtctcgatctcttgacctcgtgatccgcccacctcggcctcccaaagatctgggattacaggcatgagccactgtgcccggccttttttttttttttgagacggagtcttgctctgtcacccaggctggagtgcagtggcgcgatctcgactcactgcaagctctgcctcccaggttcatgccattctcctgccttagcctcccaagtagctgggactacaggcatccaccaccacacccagctaatttttttgtatttttagtagagatggggtttcaccatgttagccaggatggtctcgatctcctgacctcatgatccacccgcctcggcctcccaaagttctgggattacaggcgtgagccaccgggcctggcccatggcacttactttctgttgcagcagctgctgaaaacctagctttgcaaagacaaagtcattgatgggaccctgggtacagtggcttacgcctataatctcagcacttgggcaggccaaggtgggtggattgcttgaggtcaggagttccagaccattctggccaacatggcaaaactttgtctctactaaaaatacaaaaattagcccagcgtgatggtgcatacctgtaatcccagctactcaggaggttgggattagaggaggcatgagaatcacttgagcttgggaggtggaggttatagtgagtcgagatcacaccacaccacactccaccctgggcaacagagtgagaccttgtctcaaaagaaaaaaaaagaagaaagttattgatgggagtgtagtgaaatttgtgaactcactccagctaacagttgacatggtgctcaacttagatggagtattcccacgcttccctcgaaatacccaaatactccacagtgcccctgcaaatcactatgacacgctggggtaccttggtacccagtttgggaaccatgtcttagttttagtgtttttcttttttttctttctactaaatggtttatttatgataaatgtctacgtttaggattatttggcttagaagtctgaccacattgtgtggctcttgataaaattatttttttctttggtttttttgtccctttctcctcttccttctccatctttcctccctctgttgcttcctccttttcatatctttcagcgtctactgtgtgcccagcactgctctcagtcattctgtttataggagaggggtggaaggacttcaccttttcatttttatttttatttttttttgagacggagtttcgctcttgttgcccaggctggagtgcagtggtgcaatctcggctcaccacaagctccgcctcctgggttcaagcgattcttctgcctcagcctcctgagtagctgggattacaggcatgcgccaccacacccgactagttttgtatttttagtagagacagggtttctccatgttagtcaggctggtctcaaactcccgacctcaggtgatccacctgcctcggcctcccaaggtgctgggattacagccatgagccaccatgcccggccgacctcacctttttatggcacatcctgtgaaccagcattatcccattcaatccgcacagtaacttggtgaggtggctgctgttccaatccccattttacagatgaggaaactaaggtccagaggtagaggccttctccagggcctctgcttcctgagtcaatctgtgatggagatgcccccagagaagcctccaggggctggaattgtaccctaagactggacacagaaggaggctcatgagatttttctttctgctctttcagaaatggctgagcgacacaacaccaagcaagtcctgaagctggcgcgggacctcgtgtacaaggtgcagactctgattgagaacaagtgaggggcacctcaccccggcagcctcagccaagctgcccctgccccgctcctctgcttacttttcctcctggctggatgggcaccccgggagcggggtcctggtgtctgttcacaagcgtggagttcagtgcgcaaagaaactaccctgacttttacttctgggcagatggggtggagggagtaccccttcaattcagccttacattttcctgtttgaccaaagattgcccaagtctggcgttcctcccttgcaggaggtggaggttgttggtggaggaggagccatctttgtttgctggtgcccggaatggtctcctcttcttctttccctatccctccaaactgtcttgtaagatgagacctggggaggaaacttctttttggaaattggtgtagaagaggtgtgtggggctacctctatgctcctctgcaaggggcctttggcgatgttctggacatggctgaagattgacttagagattgaccctccacctcgacattactgacatttggggccaggtgattctttttgaggggactgtcccctgcattgtaggatgctgagcagcatcccgggcctcaccagatgccagtagtgccatcccccaaccatacccctggttgtgacagcccccaaaaatgtctctagacattgcgaaatgttccctgcagggcaaaattgcccccatttgagaaccactggcttggagaagggactacaaatgtacttcctcccccattcttttgacgctaagccaccctggtcctgacgcctcccctcacttagaaaaggcatacaggaggccgggcatggtggctcacacctgtaatcccagcactttgggaggctaaggtgggcggatcacaaggtcaggagttttgagaccagcctggccaacatggtgaaaccccatctctactaaaaatacaaaaattagctgggtgtggtggcgggtgcctgtaatcccagctacttgggaggctgaggcaggagaatcacttgaacctgggaggtggaggttgcagtgagttgagatcacgccactgcactccagcccgggcgacagttcaagactccatctcaaaaaaaaaaagaaaaggcacacaagagtccctcacacatctctcttggagtctgggattccatctgttgtattttctccttttttctcctctgtctgatgccagaagatacttgttttcttcttttcaagaaaagtatctccccacataggcggtggacccaaaaagtgtaggcatgagacggtcagagctctttggggtcctgctcagagtcccccaggcagggcagagtctgtatcctgctgccatcttgcaagggaaaaccgcctctccttccaagtattgggtcttggaaaggtgtgtgtttggtgaaagccacttaatggtggtggggtgcagcttttctctaagtgcagttactcactcaggacaaaggaggaaaaggaaggcagaggtcagccagggtagagggtgatgtctgttttccttgggaaacatctgctgatgaactgggtccagggccgtgctaggtctgggaacaatcctctccaggtcttcacacagagtatcaccaatccacaaacagacccgaagtgaactagtttactctgcctacctgtcctttcaatagagcagtctttcccgctcttctgttctgagaatgcacccggaatgggggaaacccagcaagcagcagagagaaaggctcttcccgggagacctgccgcctctagggtggtcagagaatagcagctgggattttggagagggagaggataggtaaagcagcgtattgaagcatttgcggaggggtgtattagtcctcccaccctgagcacaccaggacggggatgcatccttgccttgtgtgcttgtaaaggcttctttcccttggtatagcaacttcaactgcacctgaacctccaacctctgcccagcctctggtgcagggtggatagaggtctagccagcccttacttcctgaagagagctctgtgggaaactcgaggctacagtagcttcccggctcccagctcctaccctacccccaccaaagcagaaacgggagacggcaacgttctggctgccattagacttacgtctccctcccctacgtcccctagcttcccaagacaggaagaaatgtgcaaaaggcccctccggagaaaactattttgccgttcagctgttctttacagaggatgttattttagtgagacccaggtcctagaccttctgattcctatttatttttttaacagactagtctcaaagtacagcacaaaatctcttctctgccttctcttgtgatgttccagagagcatctgtggttgtgatttggaataagtcatatttatttggtttactgtgcctattcagatctctgtatgttgtgtgtgtttctgtgtcctggaattggatgcgtgggactcgttctgtccgcggagtgcactctttttttcagtgtggcccacatatcttgtaaatgtttgctgaagagttgtgtctatatatagagaaaatatatataaacagagaaatatgtgaatctgtttttttttgtctttttttttttaatttgaaagaaaaaaatgcttgcttctgaggactgtgtcctcccactcacaccccagtgaccctatatggggtcagatttttgtaatagctgcctggccttttcccagaaaaggtgaatcacttctgacttcttgtattagctggctcttaccacaagtaatgctgcattacaaatgacccaaaaagtagtggtttaaaacagccatgtatttacctcataattctgtgggtcagcatcccaggctaggttcagctaggaggttcttctgttctcagacttcttcatgtgtctgtggtcagctgatgtccagataggcaactctgcttctgatggttgtctggctgttgactagggcagtgggggaaactggattccgtatcttgcatcctccagcaggctagcttaggcttgtttacatggctatgatagcagatcccagaaggtaagcagaaacacacactgtctcttggtctcagcttctctggcataaagtcatttctgccacattctgttggtcagagtaagtcacatgactcagcccagcttcatagggtagggaaatagactgtacttcctgatgagaatctttggaaagtgacactgaaaaggagcatgggccaggcacagtggcttacccctgtaatcccagcactttgggaggccaaagcaggaggatcacttgaggccaagagttcaagatcagcctgggcaacataatgagactccgtctctccaacaaaaacaaacaaacaaacaaaaaaaaaattaaaattagctggatgtggtagcgtgtgtctgtggtcccagctactcaggaggctgaagtgggaggattgcttgagcccaggagatagaggctgcagtgagacatggtcatgccactgtgcctcagcctgggtgacaatgcaaaatcctgtctcaaaaaaagaaaaggagcatggacccaggctgggagataattgaggccatttttgcaaagagtctaccacattcccaaaggtccagtgcacaagaggggttcccagtcagccatttgacatgagagcatagctctaaattaacacttctctgaatcccacctgctgagctagctcatttctcacctctgatgctcccaaagacaacgagttcatttcccccaacatcgctggttctcactcatggctgccattcagaactatagtcatcaggcagtgagcaccttgcgcagatctccatctccatcagtctctaaacatggactcaggaaaactagttttcagctacggaagtgcagcctgatttaatataatgagcaccatcaaaacttcagattttaaatagaaaaagatttccaactgagccagcaaagtagaggagaagtttgcaggtggcattggctgcctgggtgtgccacatcaccactttcttggaagactcccagcagaggcaagaatgaaacccacagcagccggcaggtgggggctcttttagttggaacatatgcttcctcctgggggaagcatctcagagcaaatactggtcctgatgttgccactgtcccttgaagcctccagtctcatttctctgacttcaacctgaactctgtccgtgggctatactcctggagggcgccactattgtttgcagctgcctggcacggccagacctggggagtgctgggcacctgttgcgtgtgcacagatgcctggtcacatgtgctattggcctttgatcattggcaatatattttacagggaaaaaaaatcctaagagaacatttttgcttttgtaaaggcttttctaaatacatgcactcgggctgggcacggtggttcactcctgtaatcccagcagtttgggaggccgaagtgggtggatcacccgaggtcaggagttcaagaccatcctggctaacatggtgaaaccccgtctctattaaaaatacaaaaaaattagctgggtgtggtgtcgggcgcctataatcccagctgctcagatcgcgccactgcactccagcctgggcgacaagagcgaaactccgtctcaataaataaataaataaataaataaataaataaataaatgcacttgaactttgcatagatgcgaaaagatgggtcttggatcatgaggcacattttcacgactcagtggggctgaagaagtggtcttggtttccatgggcacctgcagttggcatcgtggcccctgctcttctcttcatccccctttcctgcacctctttctcttttccttccccttcatcatattcctttcctcctcccccttctctctccccttcttttgcctcctctccttatatcaaagagcacttggatagcgtctgtgctcacattttctacctgaattatgctggtcttacacagagcaagactgcagtgtgaagccctttctggatgttccaatttttttttttaaaccatctgccatttccttttctcctagaattttccttttggcttataggagagaacttggggcagctgagaagcacttttcatgccaagaatttgggaggcccttgccttcccatttcagaacagctggcagccatgttctgccattttattttatcttccttcttcccctctgtcctctccaaggcctgagatctcagtagcccagggggaagggaagtaagggtgtaatcagggactgtgatgggatttctcttctctctcatctttttttttttcttttcatcagatgctcttagaatagaagttcgctgtcttggctggccatggtggctcacacctgtaatcccaccactttgggaggccaaggcaagtggatcacttgaggtcaggagttcgagactatcttggccaacatggtgaaaccctgtctctactaaaaatacaaaaattagccaggcatggtagcgagcgcctgtaatcccagctacttgggaaactgaagcaggagaatcacttgaacccgggaggtggaggttgcagtgagccaagatcacgccactgcactccagcctgagcgacgagtgaaactccatctcaaaaaaaaaaaaaaaaaaagaatagactgtagctgtcaaaggaaataatgattattttacaaaaatactatttcttaccaagggctttgagtctgaagcctgttctttctctctcacagagagatgtagcaagagtttgagaggcattgaagacatgctagtaccccatgagcctttcttcttggaggattcaaaggggagttgaaacaagaatgactttctctgctgagtgcggtggctcacgcctgtaaatcccaacactttgggaggctgaggcaggcagatcaccaggtcaggagatcgagaccatcctggtcaacatggtgaaaccctgtctctactaaaaatacaaaaattagtcagatgtggtgggtggggggcgcctgtaatcccagctactcaggaggttgaagcaagagaattgcttgggcagaggttgcagtgaactgagatcatgccactgcactccagcctggcgacagagcgagactctgtctcaaaaaaaaaaaaaaaaaaagaatgactttctcaccataccaactaaaatcatgtcatatagctctgtccacatattcggggaacaataatgtaggatcccagatctggtactatggctgtgtggccttgggcaaattcctttacctctgtgaacccagaaaatctgaggcaggtctcagttaatttagaaagtttattttgccaaggttgaggacatgcctgtgacacagactcaggaagtcctgacgacatgtgcccaaggtggtcagggcacagcttggttttatacatcttagggagaaatgagacatcaatcaatatatgtaagaaatacattggttcggtctggaaaggcaaaacaacttgaagcaaagacaggaagacttgaagtggggaaggagcttacaggtcacagatgagtgagacacaaacggttgcattcttttcagtttctgattagcctttccaaaggtggcgatcagatatgcatctagctcagtgagcagagggctaactttgaatggaatgagtggcatgtttgccctaagcagtttccagctggagttttccttagtgatttggggtagttacctttcacacctcttagcctcagtttccacttctgcaaaatggagataataatgcctcctttggttctggactcagtcttggcccctccaccctcattcactggaactctctgcccctcagcatcactgaggatgggggtgggaacccatttgtcctgagttcccatcgtctacctttcttaggttctcaggtgagactttgatacttaagagaatgcagctgtaggaggagaactccagaaagggtgagccttggaccctcctgggctatgtcttagagaaactctgaaattcggtatgataaggccatcagttcttggcaggagcatcatctacactgacactgcagtctgcatctgattctgctgtcaggaaagggctcccagctccccatctttttggcttccaagccactgtgcatattgagagcttgagcccaggacaggtataaactctagaggagcacaatttgacactttttgaagtgccagcttgccagtccatttctaagtcaactccagcagaattcaaatgaccaacgggattgtggagactttccattacataaggatgtggtacagggacgctccaatgtcttcctggctttcttttttcaaatttgtgggcacagtaatttccaggctttgtaggtgcaggactccttgcaaacaatggatgcctcttgttttgatgaagagaaaattgcagcactccctctattgccaaataaagacagagtctctctgtaactgattctgctttaccggctggagaatcattccctttggctttgctgaaacagttcaaagagaaaattaagaaactcaggggccatagtgaggttattacagagaagaggcagcatgtttcaagcaccagtaggtgctgtgcagactgagtttgagcttctacttgctggcttccacttgcccctccttgtactgggatctgcccgaggcttaaggcatctacccatatgagacaggtttgcactgaagtgcttctgataacacttgaaatgaaccactggtcttcagtccatttgaaccccttggggtatcttcctagatttgctattactttttttctattgttctgttttaaaaagctgtcaagttgttcttattgttcatactgaaagataaataacaatctgtgttctctgtgaactatgtgtcttcagaacagtggaatcactcctggggggtgttcatgtatattcttgggtgggtgtttgaagccaaaagagtttgattatgaggagctggatggatggggacagaggaaacaaatccaggtgttattttgaatctatcacagagtctgacagacctgggttcaaatcccagctctgtcactgatcggctgtgtggccttgggcaagtaattttacctctctgagccttgattttcacttctgtgaaattgggataagaaagactcccttaaagagagaactggccattgagtttctgcctgctcagcatccttccctccttctggtaccagcaccccctcaactttggggaactataacggtggccttctagtgagactcctgacatggccctccctgcccaggggtgagcacatgactcattgcaggccgatcagaccccttccctgggatttatatataccaagagaggaaagagaagttcactctttcctctggggcagctatgctaggagatgccagcctagagctgcctatgaccatgtcttctgcagataggagtcaagtatggctgggtccagatgttcagatgaagttcttagagctccacctctctccatctcgtgcttctattctcctccatgctggcttccacagagcccatgcccaactctgaatcaatcattctgaccaggtgtgattcgccagaagggctcatttatccatcttaaagcccaaggtggccacagagtggctgtgggtcatttttttttttttttttttttgagacggagtctcactgtgtcaccaggctggatggagtacagtggcacaatctcggctcactgcaacctctgcctccaaggttcaagcaattctcctgcctcagcctcccaagtagctgggactacaggtgtgcaccacctcccccagctaatttttgtatttttagtagagatggagtttcaccatgtcggtcaggttggtcttgatctcttgacctcatgacccacccacctcggcctcccaaagtgctgggattacaggcgtgagccacggcgcctggccaactgtgggtcattttttataggaagattagggtactgctcccgaagaagagcaatgtatcaacacaggagaaatcaacagattgactcctggccgagcaagcagcatgtgccaagctgtagaggtgggaatgttccgggaccaaactgagggtcaggctgctatttctcatgacccaatagtgagatgcagatgaactggggagaaagaaagtttcctatttccgtaaccagttagagggagaaggtctggaaattattgccagaccaattcaaaattacaaagttttccagagcttatatattctaagttatatgtctacatgtaagtgtgcactcatctgaagatgtaagtggaccgggcgcggtggctcatgcctgtaatcccagcactttgggagcctgtgatgagtggatcgcctgaggtcaggggctcgagaccagcctggccaacacggtgaaaccccacccctactaaaaatacaaaaaaattagctgggtgtggtggcacatgcctgtaatctcagctaatcgggaggttgaggcaggagaatcgcttgaacccgggaggcggaggttgcagtcagctgagatcacgccattggactccagcctgggcaacaagagcaaaactccatctcaaaattaattaattaattaattaacttcttttaatctataactaaggtctgagtcttgaagaccttcctctggagcctcagtaaatttactaatctaaatgggtccaagtaatgagatgattacccttatcttgtctcctgctaaatcacggggatttggggggttccttcagacctctaataaagttgtttgtggaggcctggggagtttcttcagaaccccagtaaaacttgtttaatcctaaaatgggtagtgttaagaattccttcgttattttgtcatgctttgaggcccaggaaaggcctaggcaaaactcttggtgggcttttgttacattccagcctttgtataaggtcactggcttttaacattaaacttaagcactcggtcagtgctgaaacagtt

SEQ ID NO: 1692 - DNA, 2530 bp, Homo sapiens
ccgccccgccgcggctgccgcagcagcgccgcggccggaggagctaccgccgccaccgccgccaccgcctcctgggactcggaacgcagcgctcggagccatggcctcggcccccgcggaggcggagacccgacagaggctgctacgcaccgtcaagaaggaggtgaagcagatcatggaggaggctgtgacacgcaagtttgtccacgaagacagcagccacatcatctccttctgtgcggctgtggaggcctgcgttctgcacgggcttcggcggcgggcggctggcttcctacgcagcaataagattgcagccctctttatgaaagtgggcaagaacttcccgccggctgaggatctgagccgcaaggtgcaagacctggagcagctgatcgagagcgcgagaaaccagattcaaggcctccaggagaatgtgcggaagctgccgaagctgcccaacttgtccccacttgccatcaagcatctgtggattcgcacagccttgtttgagaaggtcctggacaaaattgtgcattaccttgtggaaaacagcagtaaatactatgagaaggaagctctcctgatggaccctgtggacggccccatccttgcatctttgttggtggggccctgtgccctagagtacaccaagatgaagactgcagatcacttctggaccgatccctcggctgacgaacttgtccagaggcaccgcatccacagctcccacgtgcggcaggactcgcccaccaagcgtcctgccctctgtgtgagtgggatccagaagaggcattccagtggcagcatggatgaccggccatccctctctgcccgcgactacgtggagtccctgcatcagaactcccgtgccacccttctctatggcaaaaacaacgttcttgttcagccgagggacgacatggaggctgtgccagggtacctgtccctgcaccagacggctgacgtcatgaccttgaagtggacacccaaccagctgatgaacgggtctgtgggggacctggactatgagaagagcgtctactgggactatgccatgaccatccgcttggaggagattgtctacctgcactgccaccagcaagttgacagcggcgggacagtggtattggtcagccaggacgggatccagaggccgcccttccgcttccccaagggcgggcacctcctgcagttcctctcgtgcctggagaatgggctgctcccacatgggcagttggacccgccactgtggtcccagaggggtaagggcaaagtgtttcctaaactgcgcaagcgaagccctcagggttctgccgagtccacatcttcagacaaagatgatgatgaggccacggattatgtgttcaggatcatctaccctggcatgcagtcggaattcgggctggcctactgcagacacctgtccaccgtgagaacccacctatcagccctggtcaatcacatgatcgtgtctccagacttgccctgcgatgctggacagggactgacagccaggatctgggagcagtaccttcacgacagcacaagttacgaggagcaggagctgctgcgcctcatctactacgggggcatccagcctgagatccgcaaggccgtgtggcccttcctcctgggccactaccagttcgggatgacggaaacagaaaggaaagaggtggacgagcagattcatgcctgctatgcacagaccatggctgagtggctgggctgcgaggcgatcgtgcggcagagggagcgggagtcccatgcggccgccctggccaaatgctcatccggggccagcttggacagccacctgcaccggatgttgcacagggactcaaccatcagcaatgagccagagctgctggatctgtacacggtgaacctgcaccgcatcgagaaggatgtgcagaggtgcgaccgcaactactggtacttcacgcccgccaacttggagaagctgcgtaacatcatgtgcagctacatctggcagcacattgagatcggctatgtccagggcatgtgtgatcttctggctccactgctggtcattctggatgatgaggcccttgccttcagctgcttcacggagctcatgaagaggatgaaccagaacttcccccacggaggcgccatggacacgcactttgcaaacatgagatcgttgatccagatcctggactcagagctgtttgagctgatgcatcagaacggggactatactcacttctacttctgctaccgctggttcctgctggatttcaagcgagaactcgtctatgatgacgtcttcttggtctgggagaccatctgggcagccaaacacgtctcctctgcgcactacgtcctgttcattgcgctggctctggtggaagtctaccgtgacatcattttggagaacaacatggatttcacagacatcatcaaattctttaatgaaatggctgagcgacacaacaccaagcaagtcctgaagctggcgcgggacctcgtgtacaaggtgcagactctgattgagaacaagtga

SEQ ID NO: 1693 - protein, 801 aa, Homo sapiens
MASAPAEAETRQRLLRTVKKEVKQIMEEAVTRKFVHEDSSHIISFCAAVEACVLHGLRRRAAGFLRSNKIAALFMKVGKNFPPAEDLSRKVQDLEQLIESARNQIQGLQENVRKLPKLPNLSPLAIKHLWIRTALFEKVLDKIVHYLVENSSKYYEKEALLMDPVDGPILASLLVGPCALEYTKMKTADHFWTDPSADELVQRHRIHSSHVRQDSPTKRPALCVSGIQKRHSSGSMDDRPSLSARDYVESLHQNSRATLLYGKNNVLVQPRDDMEAVPGYLSLHQTADVMTLKWTPNQLMNGSVGDLDYEKSVYWDYAMTIRLEEIVYLHCHQQVDSGGTVVLVSQDGIQRPPFRFPKGGHLLQFLSCLENGLLPHGQLDPPLWSQRGKGKVFPKLRKRSPQGSAESTSSDKDDDEATDYVFRIIYPGMQSEFGLAYCRHLSTVRTHLSALVNHMIVSPDLPCDAGQGLTARIWEQYLHDSTSYEEQELLRLIYYGGIQPEIRKAVWPFLLGHYQFGMTETERKEVDEQIHACYAQTMAEWLGCEAIVRQRERESHAAAKCSSGASLDSHLHRMLHRDSTISNEPELLDLYTVNLHRIEKDVQRCDRNYWYFTPANLEKLRNIMCSYIWQHIEIGYVQGMCDLLAPLLVILDDEAFSCFTELMKRMNQNFPHGGAMDTHFANMRSLIQILDSELFELMHQNGDYTHFYFCYRWFLLDFKRELVYDDVFLVWETIWAAKHVSSAHYVLFIALVEVYRDIINNMDFTDIIKFFNEMAERHNTKQVLKLARDLVYKVQTLIENK

SEQ ID NO: 1694 - DNA, 2266 bp, Homo sapiens
ccgccccgccgcggctgccgcagcagcgccgcggccggaggagctaccgccgccaccgccgccaccgcctcctgggactcggaacgcagcgctcggagccatggcctcggcccccgcggaggcggagacccgacagaggctgctacgcaccgtcaagaaggaggtgaagcagatcatggaggaggctgtgacacgcaagtttgtccacgaagacagcagccacatcatctccttctgtgcggctgtggaggcctgcgttctgcacgggcttcggcggcgggcggctggcttcctacgcagcaataagattgcagccctctttatgaaagtgggcaagaacttcccgccggctgaggatctgagccgcaaggtgcaagacctggagcagctgatcgagagcgcgagaaaccagattcaaggcctccaggagaatgtgcggaagctgccgaagctgcccaacttgtccccacttgccatcaagcatctgtggattcgcacagccttgtttgagaaggtcctggacaaaattgtgcattaccttgtggaaaacagcaggaaaatatgcatgaaagtggagagaaaagtcccccttctcatgaagttcacgtgcttgtaaggaaaaccagccaacagtcatgctgataatacctgatggatgttccaagggggcgtggtggcgttgataattttctcccagtggtcagggaaagtgtcctggatggcgcaacggttaagcttccatttgaagagcatggaggcattagccagtaaatactatgagaaggaagctctcctgatggaccctgtggacggccccatccttgcatctttgttggtggggccctgtgccctagagtacaccaagatgaagactgcagatcacttctggaccgatccctcggctgacgaacttgtccagaggcaccgcatccacagctcccacgtgcggcaggactcgcccaccaagcgtcctgccctctgtatccagaagaggcattccagtggcagcatggatgaccggccatccctctctgcccgcgactacgtggagtccctgcatcagaactcccgtgccacccttctctatggcaaaaacaacgttcttgttcagccgagggacgacatggaggctgtgccagggtacctgtccctgcaccagacggctgacgtcatgaccttgaagtggacacccaaccagctgatgaacgggtctgtgggggacctggactatgagaagagcgtctactgggactatgccatgaccatccgcttggaggagattgtctacctgcactgccaccagcaagttgacagcggcgggacagtggtattggtcagccaggacgggatccagaggccgcccttccgcttccccaagggcgggcacctcctgcagttcctctcgtgcctggagaatgggctgctcccacatgggcagttggacccgccactgtggtcccagaggggtaagggcaaagtgtttcctaaactgcgcaagcgaagccctcagggttctgccgagtccacatcttcagacaaagatgatgatgaggccacggattatgtgttcaggatcatctaccctggcatgcagtcggaattcgtgccccaggatctgatggacgtctctgtaagcaacctcccatccctgtggcagcccagtccccggaagtcctcctgttcatcctgttcacagagtggctcggctgatggtagctcgaccaatggctgcaaccatgagagggctcccctgaaacttctctgtgacaatatgaagtaccagatcctctccagagccttctatggatggctggcctactgcagacacctgtccaccgtgagaacccacctatcagccctggtcaatcacatgatcgtgtctccagacttgccctgcgatgctggacagggactgacagccaggatctgggagcagtaccttcacgacagcacaagttacgaggagcaggagctgctgcgcctcatctactacgggggcatccagcctgagatccgcaaggccgtgtggcccttcctcctgggccactaccagttcgggatgacggaaacagaaaggaaagaggtggacgagcagattcatgcctgctatgcacagaccatggctgagtggctgggctgcgaggcgatcgtgcggcagagggagcgggagtcccatgcggccgccctggccaaatgctcatccggggccagcttggacagccacctgcaccggatgttgcacagggactcaaccatcagcaatgag

SEQ ID NO: 1695 - protein, 531 aa, Homo sapiens
MFQGGVVIIFSQWSGKVSWMAQRLSFHLKSMEASKYYEKEALLMDPVDGPILASLLVGPCALEYTKMKTADHFWTDPSADELVQRHRIHSSHVRQDSPTKRPALCIQKRHSSGSMDDRPSLSARDYVESLHQNSRATLLYGKNNVLVQPRDDMEAVPGYLSLHQTADVMTLKWTPNQLMNGSVGDLDYEKSVYWDYAMTIRLEEIVYLHCHQQVDSGGTVVLVSQDGIQRPPFRFPKGGHLLQFLSCLENGLLPHGQLDPPLWSQRGKGKVFPKLRKRSPQGSAESTSSDKDDDEATDYVFRIIYPGMQSEFVPQDLMDVSVSNLPSLWQPSPRKSSCSSCSQSGSADGSSTNGCNHERAPLKLLCDNMKYQILSRAFYGWLAYCRHLSTVRTHLSALVNHMIVSPDLPCDAGQGLTARIWEQYLHDSTSYEEQELLRLIYYGGIQPEIRKAVWPFLLGHYQFGMTETERKEVDEQIHACYAQTMAEWLGCEAIVRQRERESHAAAKCSSGASLDSHLHRMLHRDSTISNE

SEQ ID NO: 1696 - DNA, 37180 bp, Mus musculus
  misc_feature (1)...(37180): n = A, C, G or T/U
tgtcttctgagcactggaattaaagacatgtgacaccttgcctgttacatctatctatctatctatctatctatctatctatctatctatctattatgagtacactgtagctgttttcagacacaccagaagagagagggcatctgatcttgttatggatcgttgtgagccatcatgtggttgctgggatttgaactcaggaccttcagaagagcagtcagtgctcttaatggctgagctatctcttcagcccaaagcaaacactcttttattttgggtttggttttttgagacagaatttctctgtatagctctggctgtcctggaactcagaaatccgcctgtctctgcctcccaagtgctgggattaaaggcgtgcaccgttactgcccagctttatttatttatatgacagggtctcatgtagcccagcctggcctggaactcgttattctaaccctcctgtttgcttctcccaagggatttcagacatgtgccaccacacccagatcccccccccccaaaacacacacacacacacgagttagaatagttaaacagagtcttactctgaagcctcaagtttatagcaattctggttcctccacctaccacatgctggaattgcaggcccatgccaccacgtccagatctttctttttttgcacatgcataggtagaaatacaccatgcaaaaaagagggtcctcctcgaagccccgtgatattgggagtctgcccatctatcctaatgaggctaagcagtgagcaggttgtaagggacagaggatgggcagagaacagggaggccctcgcctccaaatcttaacgtccctactactaagcaccttggtacaagggggcctcaggaggtgcagactggagagaagctgctaaatgagtgtgtgccctgtgccagctccctcctgctggagtctttcttgagcaccaggaaatcttgtgtcgccacgaaatcagtttgggaagaatcatttgcatttcactgaagaggggaaaccggctcagggaggctgatgacacttgcccaagcttcccagatggcaagctgcagagctgggatttgagattgaaaccagcacagtgtgacttcctggatgcttaccaagggcaggagtcctctctctaacaactagaagggcaggaggtggttcgatggagaaacaagcatagccaacgtgtcctacctggaacttgaccaccaccaggcacttccgggacaggtagctgcagccagatgccacctggctcctcttctgttgtgtcaactgtaaattccgtggctgacttgctcggggcaatcctagtccggtgtactctatggaaggtggatggacgaggcatggatacactcctagctttatccttccaggtcatctggctcctgcgtttgtctggatggtgtcacagagtgcctgcatcctagctgagtctctagcgtcctgcacccctttggtcctattgccaaagttgttctctctggaaagtgcacccttgcttgactttggggtgaggggggggcgaccggccgatcctgggcatggagggatcctctgggcgtgataaggggctccgccagtctccttgggggaggttagccagccccttccctcgtgctcacattcagtgccgcagcgcccccttggccaccagaggcgcccggaagcgggactccccgagcgctgggcggggcgaggggcggggcgcggcggcacctgggccgcgggagagccgggggtgggctctcgggggacaaccagctgcccccccagatctgcagcgccggccgccgggagctcgaggctccgggcgcagaggctgcgctgtcacatgggcggcggcgacggggccgcatttaagcggccaggggacggcgcccgcctgcagcgcgtcctcgggcttggctcccgccgggcgccccgctctctgccctccgggggccccgcaccacccccgccgggccatgcgagcgcgggccccgccgcgatgagctcgcacattgccaagagcgagtccaagacgtcgctgctcaaggcggcggcggcgagcgggggcagccgggctccccgccacagctctgcgnnnnnnnnnnnnnnnnnnnnnnnnnnnnnnnnnnnnnnnnnnnnnnnnnnnnnnnnnnnnnnnnnnnnnnnnnnnnnnnnnnnnnnnnnnnnnnnnnnnnnnnnnnnnnnnnnnnnnnnnnnnnnnnnnnnnnnnnnnnnnnnnnnnnnnnnnnnnnnnnnnnnnnnnnnnnnnnnnnnnnnnnnnnnnnnnnnnnnnnagacgctaccgccggcccgcgggcgcgatggggaggaacgggggctggcgccagcgctcggtctacggggctccctgcgatcgcggggtcgcggggacccggctcctgctggcacccccgaggcggacccgttcctccaccggctgcgccccatgctcagctccgccttcggccaggtaagggccgcgcccctcgcccgcgctccgggcaccggcgctcgggaccctacggcggcggcgcgtccccggttctgctcgctctgcccagtcggggcgcaccttggctcatcctgtcctcccgcggccctggcgctccgccacccccgtgtctgattcagcaccctgtgcgctgtccacacttcgggcctcttcctgggcgccgctcagctgagcctgcctcgcacctgcaagagcgacctccgcaatcctccgggagattttccagggtcgtgagcagcgcttggagcaggcggcgccaaccttctcctctctctggcctctggcgacccagaggagcgaagggcttggagtctgagcggcaaagggggagggcctgggagtacagcgagttgcttgcggatgatttatactagccgtgacttagagtgtcctcaaaggtctgggaaagttaggggattggaaaaatggggaggagaagagatgtctggacaggcatgaagggtctgtccagagctacggctccatctagaacttgagagtgttttcaaggaagatggtattccagggatgctatctgaatggcagttaggcaattgtgggataagacccagaaaatccaagcctgggttggtgtgccttttagggttaggaaggccactaagaggtcattggtgactcatttttgtccctcgcacgcctttgcccgcaaggattccagtcagcggggcatttacaaacagctcaaggctacattgtggtattgtgtcgcaggagagacaggaacccgtgaacttctgagcaaagccaagatttcctctagttgggagactgtaattgaatcaaactcagggagtcagttctgcagaggcgcaatcaaaaggctggcatagtttcagacacaggggtctaagtgtttctttggtaggatctatcgcaaagataaccacctcaagctcccgctggctgtgcggggatcaggaggccgcgtgtgttttttgcttcagaactgctcgcttcttttcaaaatactactctgcagtggttaatgcaggcggggctctgtcatgaaggcagccgcacgtggattcgggttgcaccgggaccgctgtgatggtgtgacggggccagcaggcacacggctttgttcctgcagggagccctgttagcggtgctcaggagtagaggtttggacgcagggccctgcgagagagagggagagggcgagagcctggctacgtgccaagggagatgctcactgcagtggtttgtgtgctccaaggagcctaagcgtgttaggagtgatttgtgggtctggactgggttgtcattcaaatgctgtgttgtgagtggggagctgcaattcactcagttactaagcatttcttgaacacctactttcccggggcattggtggtacactaggaagcgagtggtgggaagagttaggatttggggctgttttggagctctcgacccagccgtttggaaggtgcccagtcatcaggctgattagtcagtttgccagtgatctggcaaaaggaccattgctccctacatttgcaacatttgctggcagaggcctttgtccaagccccagaacctttcaacgacctcttccatgtctcagccattaagtggagacgattctccagcccccgggttctgaaatgtcacggggtcacttgagtcacaaggagctggaaggtgccatgaaatatttactacctctctctggaagcgcttgcctctcagagcagcagactctctccccttccaccccctccccccagcacattcagtttgagtttcctggtgacgactcctctaagggatttgtggggacaggaccacaaacccatctaagaggtttgtgtcagagcctcctgtctcctttgactaggaagaagtagtttctctttgctatctctctcctgcattgaacattctgtccttaaagatagggtggagactaagagaaggcaaaatggagccctgaaaacagaaagttctaggtggatccacttagggcaaagtgtattttgttcacgccgttaacttatttatcaaaaattttaactttttttttttaaacctcaggtgaattaggtgaattgcttttatctcatcagggcttttatttattgagagagagagagagagagagagagagagagagaaaagatcaattatagtgaattggggaagttaaatggtttctgcaggcctaggtatagagagcttggtccactgggtatcaccaagccagggtggcatctatgttgctgttgctgatgctgattaactataaggctgcacttcttctgcttgtaatagcagcagagagagccaggattgggcacactagaggtatccagatagactctccacacttggggaaatgggaagtaagaccccccacctccacacacaccccccagtgacaaccgggagtgtctctgctgcctgtagggaggagacactgtggcttcaaggttgatgtgtgggatggtggctgggaaaggtaccagatccctagcttccaactttgtcactttgtatctctgtgaccttggcatcatttttctctctgtggcagtggtttcttcttccagaattgagagtggggaaaagctgccttgcagggttgtgatgaggctcgcctgagatgaaggatatcaggggcctggttcatagtgagcgctggctaaagagcagcctgcattcctgtgactgccttcattaatagtcattaaaagagtgccgcagtctgagtaagcgcagggtaagggatgctgcctccatgctgggctagaaaggcttttaaaagaatgggctcagagcgcaatgtcagcgacctgtccctagctctaccagctaaggacacccaggtgcccaggcagactgtggggcgtgagacacgaccttgaataagcacgatatggatatgagatcttgggccttggaagactatgatatgaacacacctgcttttgttttaaagcttgagaagagactaatgcaagtaacgcccccagctctggtaccatcctagagaaacatctctcttgatgtggagggaccagcccagtgtccatgcaatacgcaaaaagcatcacagtattcatgagtgactcctgggtttcctcgttcctgtggtacagacggaggagatgggccagggccatgatggctcgggccctgcgggttcaaccgcatcagcctgtgtgaagttgaagatcaggactgtgaatatccattcctgtgctacttgctcttttccgttgcctttcctttgaggcccgggatgaggaaggagaaggtcagcctgtggttggcatcaatcatgatgttaggagaggctgagtcagtggacgagagcatcatctgggatgtctggatgtctgcgtttggctccggctgttcccggtgatcggcagggctactcaaaaaccctcagtctggaatccaaaattgccagagtctgtccttggagggttggcttcatcaccatccccaccccaccccccattttcgaaatgagaacacaggctctggagagggcagtgcctgtcagaggtcacatagtaaataaatgggtaacacctgtcatctgagtggcactgggctggccaggaatggaagttatcagaggtgttcacagggtacctcacatgctgtgtaccccagccctctccctgagtgtcccggcactgggttgtcacccaagttcatatgctgttggttgatctggtggagacctaagaccggccaccctcctaagcggggataaccagcaatgggctcagccttctcaccctctgatcctattattccgttcagaatccaaagcagggctccagaggcccagggacttgcagagaataagaagagtgtatgtcacaaagtgttcttcacttcttagaggaaactcccaagcgtcagccttgctgtgtttttaagggaaggtcaaacctcccgccccctgcccagtttagtttaaggagactttaaaacccccatatctggtccttctgggtccctagctgaccttaagcctcaacaatgtccaccacattcttaccccaaagcagaaaaagaccttgaatttttgtacatttatttatttaaaatgtgtgtttgccaagtgtggtggtgcacacctttaatccaagctcttggtgggcagaggcaggcatacgtgtgtgtgcatgtatatgtgtgtatatgggtgtgcatgtatatgcaaatgtgtgtgcatgcacatgtacatgggtatgggtatatgtgtgtgtacatgtgcacaagtgtgtatgtgtgtatgtatgctcaagggtgtgtgtgtgtgtgtgtgtgtgtgtgtgtgtgtaggccagaagatagctttcagaagttgactctctccttgtaccatctggatcccaggaatcctgatcaggtagtgaggctcagcaggaagtactttgaccaactgcacaatcttgctgagttgcaggatgggctttctttaagcatttgattggttttgctgtcttctgtctccagtttccaaggacagaggcatacaaagccaaggtcgacaaggacctgctatacctgagactggcctgcagggggcaggagtcaccagggctgaataactggatgagtggatgctgcgtttagccctttcagttcgaggcagaggaatgggacaggtttttggtgccagacactgggcggcaccttttgttatattgttttgttagccacccataagagcccaaaggaggtgttgttagtatctaagggacaacctccagaagtccaaagtgaatcagatcatcgcaattcgtctgactcggcattctatccctggtacgtcgtctttcatatttttaaaaagacttatttttattttatgtgtatgagtgtgttttccccctgtttgtatgtgtaccacatgtgtgcctgatgccttcagagctcagaagtggtacattagatcctctggaactggagttacaaaaggttgtgagcatccccgtgggtgctgggaaccgaccccggggcctctgcaaaaacagcaagcacacacaaccactgaagcattttcccagccactctcagtgggtcttaatgccagctacaggttagagctccccagagagtccacagactctgcacttggccgccctatgcccgctgcaccagggatttcagggcagggtccagctgtttctgtgtttctctttcttttctctctctctctctccctcatttttttttttgttttgtgtgtgtgtgtgtgtgtgtgtgtgtgtgtgtgttttcaagacagggtttctctgtgtagccctggctgtcctagaacacactttgtagaccaggctggcctcgaactcagaagtctgcctgcctctgcctcccaagtgctgggattaaaggcatgcgccaccactgcccgcctgtatttctctttcttagcgttattctggactatagttaaataattgtactcctcactctctcttgcccacctgcgaggatgtaaactcccgttgttgttgttcctcttcattgtttccagagccaagcacagcacccagctcataaatgccgggcaaacgatacttccttcttccacttgaataattacttatcagcgcctattatgtaccacaggctttcctgtatgcgccgtattagccagacagggaaagtcccattttctaacggaggaaactgaagctcaggaatagaaggtgatcacaggcagagctggggctcaaccttagaccccagatccttccccattcatcagaggccattgacccagacccctggaccagcggagtgcttcctctgagttgctttgcatttccgttagcggtctgcccctccccagctctctggcatctttaccctctttcctgccctttagctgttcccacccagtctcctccttttgtgttcggggagtggcttcttccttttcccctcctccaggagtatgggccaagcaaggcatcaagaaactgcctaggcaacaccgttccctggtctgcagcgacacacagcaccagagacatagtgaactagccagcgacctcctttttagcctcctaggaggaagcctgtgccacccactgggcaaggaacccagccatcttctctaatgaaattcctgaccagacatcccaatggacaaaagtccctgggagaggaagcagtctgggcttggtgtctgcgattgcatcaggggccagggagtaggtcaacctcctggtctatctctggcgccccctgctggggaaaagctggatacacggataagaggaatgcttctctgagtacccgcctaccactgccgcgctcagacccggacatctgaggcatgagaattcccttgccaaagcaagaatttggagggacaaggaacaccgagtcatctgtaaagttccgactgtgggaactcggaggaccatttttaaaaggcaaacctccctgttctgcactccagcgaagccagtgaaaaagacctttaggtcagaattgggaagaggatgggaaggaccagagagaccttggccacgtcctctgtgccagcgctgccttcattctcctctcctcaaggccatcgcttggcttcccgagggtcagagagcctttccacggcagagggagcataaggaagaagcagatgacagctgtggcttcagctgtgccgccagccctggagcctcattccatgtcagcgatgaggcaagtgtgaaaaatggagcgtaatagagacgtcacaagatctcccaggccctcaactgagaaccaccttgctgctcagtcagctggaattgccagtggctgatgaggcatgctcacccggctcagtgctctccagacccggcttacatctccctggggtcctgcgtgtgcatgcatgtgtgtggttagtgtgtgtgtgtgtgtgtgtgtgtgtgtgtgtgtgtgtgtgcctgtgtgttcaaccacgcgtgcgtgtgcgcaggctgtgaggcaccctggctttgggggcccaaactagccagctttccccttctggatctgctggcctaattcccagttgcagctgccaccttgggtccccctccccaaggcaatctccctgcatatttggtagcataggaaggaggggctgaggcaaggggatagacagagaatggactgagcctaatgctgtaatctgttgttgatgatcctaaaggcttcccagcgccagtgccctctgtgatctactctccaggggatttttttcccccggtgctatgcactttttccttctgccttcgactccttaagaaactgactagaaagttaaacctagacacacaaacgcacatacaaaccaccaggaaaaaaaaaaatcagcaggagcagacaggcaggcaggcaggcaggcagacagacgagcacgcgcgctccggctcagctctgtcctggaggaagagcgactggagcagagagagtcgctggggttggcagtgacccagactgaggtcttctgcgccccccccggccccagaagcctccttcatggacccagagaccgccaaaggggctgtgtcagcgtaggatgggcaactgcgtcaagtcgccactaagaaacctctcaagaaaggtatgttttgggagcccccgagtcttggtactggggttgcggacatcttgttgcctaccccagaggggatgaagtgggtgggcatctgatgttcattaggcttcccagggtgtctgtccaaaactgtgtccctattctgacttcaagacaccctccatcagcagattcttatgttctagggaggctctgagctaaagttagggcttaaaggtgcctggggttaggggtgggaggtcatggggtcccggaaggtcatatctgggattcatgaaagaggtaagcaagaaaccatgtgactttggggcttcatggctataagatgaaacgtgtggattcttaggatggcagtgtacatatagctacgttagagtctaaagcatcggagacccttcaggagcagaccccagggctgagccgttctgtgctcctcactggtaatctctaagccagtggttctcaaacttcctaaggcggcagccctttaatgtggctcctcgtgctgtggtgacccccaactattacattatttttgttggctctccttaacagtaatgttgctactgttatgatttgtgacgtttgccaaaggggtcatgacctacaggttgagaaccaattatctaagtttcgaaggaaccgtattaagcaaggaaatgtccccctttgattatatttacaataactcttgagtcaggggtgggagtcaggaccatatggtcttaggacccaggatggcttcttttgagaaacacggtgcctgagagatatgtgggtcaggattgtacatgtcacttttcagggtggatttactgcttgtacgctaggactttttttgcaagaattccttggagaaagcgagtgttccctccctcgggcgtctccaggaaggtctgggttatgtttagtgtgtgttctgcttgggctctgcgtatattgcaggctggctggagtcaggtcgtagactgataaagatttttgcctccagtgttttcatttgccaaataagaaatgggattgccaatcgagggggcggggattggagggtcaggtgactcaccgaaggtcttggattggctaatggagccttcactcaggtcccatcttccccattctgcttctgacctctcaatttaggacacttggggctttttcgccctgtcgccttcctcgtgtggctaagccgttgacatcaaattccatttaatcttcggccgttccttgggcggctcgggggggggggggggcgtctgacgtttccattgtgcctcagagtctgccattctcttaggggaggcttctgcctgggaggatctggggaagcggaagctgatctaaattagaggatcccaggcaaatgccaacgcagagggatatgaattgaagaacgaggcctgtcctctgcctcctaccctcttctcatgagtgcttgagcctcttctttctggccattcgattttggacaaattacttaacgtcctgagacttagttcctttgcccatcagctgggaatgctaatgcctatgtacattgtgatctatggggatcaagctcagagctacacaccgcccaggcctgatgtgtagctttgtctgtttgtttgttctgttctgcttactagaaacaagggcttactctgaaacctgggcttccttcagcatcggggttatatgtatgagccagtgcagctggctggtttggtttgttgttgttgttttgttatgttttgctttgcgttgagacaacgttttaccgtatagccgtgactggcctggaattcacaatgcagaccagactggcctcaaactcatagttttcctgcttctgcctccaaagtcctgggatgaaaggtgtatcaccacacccaagtatttaactcttaaaatgatcgtgtgctgtgcacagcgccagatgtaaacagtaccagacacgcgttaggatgctcactatcatccgaggtaaaggatggagtataaaagcggaagagagtggtgatcgttaccgctgcttctgtggtgaggtttctgtttgtagcccaggctggcctggaaatcaagattctcttgccttagctgctgcatattagaaatatagtatagacttgagccaccatacccaggaagactttattacccagagcctcatgtgtgctgaaccctgtgcctctctctaccaccaagccacagtacagcaggcgaggttcttagtcccctggcggaagtgatcataattcgtaggaatcatttcttcttttggattatttacagcatatttgccatcacactccctcttttcttctgaacacttcccctggctaggtttgcagagaaagaaagctgggcccagagataaggatttctgaggtcatctggtcgctagcaagcagagcctgggatttggagcctgcactgtgtaaactcggggctggctggcattctacgcacgcttttctttctcccactgccagaaatgttattcataaattccaaaatacgacctttgagattgtcgagttcaactccctaccctgtagagcagctcgccccctcctatctcccttcacgttctccttgagcctgagtagatcgggagttttgacccgtgtgccctcaggcagtttgtttggttagagagccggaggtcactacattctctaatattctggcttctcctggttccaggccaggcattcctggtccctggctctgctccttaagtagaagctgggaaaatggacagggtgataggtaccctgcttccagccctgagccaggcaggaccagcctgtcaggtgccatcctcgctggctggggaggaacggctgtctcctggggcaacttggtgccaggcagagttatactcaagagatgcagtggaaattcccagccaccactggctcgttctttgtgggtgcaaattcctctccatccttctcatttctttgctgattggcagatgttcccccacttcccctggagccagaagtaaaaatgccttctggctcccaacatctcttcacttgctctaccaacatcattgtctgcattgttgccttaacgacggcaagttcatttgtttggctcttaatgtgtttgaaacactatgcaaaacgatctataggccgtagctttcttcgttggctcacaagagccttgtggatacagatgattaacacccaagagtaagggaggatgctggggcacataggggatgaagggagctgtacaaggtcacacagagagcaagtggcagattcagagcttctcccaagatggggtccagagccagcacactaaacactctgaggattctgtgctccctgctgcctcccctcctcggcctgtgcttctcccgagccaactcgtgtgagattcggccagaaacggaaagtctgcttttcccacaaacatctccagtaaggttacttcctggagctagtcttgcatccagtcccgggctcctttctcacagacccgttcttagagggaagggctctctggtctttgccatttccagcacaggttcagaggtgtaagtggagcagagtttcaaactagaatgatccttggtctgtggccatcccttgtgttcagagatttcttacaagtgaccctccagccttggtctgagtcactgtgtctcctttgaggaacccatatgctgttcttcctctaggtctggaaggggtttagggtgttggaagaggttggaatcgagtctccatcaacagaaatcccacccccatcccctcaggcttggaagaggagcatgagaggacagggcgagggaggctccaagagaacaggcttctcctgtctatacctgtgtgtgtgcttagctagaggcagccagttgggacgtcgagtatatagttctgtgtgtctcagacagacagctctctcgggagtccagctctcctgccgtccttgggaaagttctgctacaggctcccaccctgaagagaggctgtcccttgcagggcatggtgctggacctggagaggcgctgggaattctgtgaggcctgggtccggccggccacatgttgtgtctggaatagtgctactgtcctaaggggggaaggcctgtgggggcaaggctgactttttataactctgtgggaatcttcaggctggccggggcctgagagcacagctatatttggtcagatggcaaggcccctgcctcagcctctggagttcaaggaggccagcctgggcatggagccagggaaagagggcgggtaggaaaggaaaactgctggaagactgcccaagtaggccatcatgaacaggtggagcctgggcacaggtggggcttgtctgacccactgatgctttttaaaccagatttggcatcggttggcaggtgtgtactgagtagtgcggcccatttagagcgagcacactgcgtccattttgtcccctcccccctcccaccactcacctgccttattggtcagcaatgacaccagtgtatgagctccagttaggggacttgcggaagctgtttgttctctgtgtcgccccaactctgcaccgctcttccggtgggggagggggaggggtgtatccagctagggcagggcctgagtctatcagaaggctgggagacaggatgtaggtaccagggttgagttggaacactgtggggtgggggtgggggacatttagggaaaggatatggttccgtgtgacactcctgaattaggatgcctctccctctgcgtcatgctcaggagtgtgtgattctttgtgcatacgtgtgtgtgtgtgtgtgtgtgtgtgtgtgtgtgtgtgtgtttgcgcgtgcgcacagcctatctcaagaatcacatctagctctccacgggacacttcagtcaaggattggcatctccatccgttggatgaattacatattcaaccctgtccgtgtcaaagcgctcagaacgtcatcacgtgactctcaaggatcttctagaatcaacagccaggctggggctgggagggcccaggtggacagggaggtgacacctcacctctctcttatttgcttggtgccggctgaagatgcgccaggaggagaagaccagctacatggcggtgcagacaagcgaggacgggctggcggatggcggcgagctccatggaccactcatgatgctggcccagaactgtgcggtcatgcacaacctgctgggtcccgcctgcatttttctccgaaagggttttgctgagaacagacaacctgtacgtaagttgacgcggtgcagccggccgaacctggcttcacgtggcgtggcatggcgtggcgtggcgtggcgtgaggaggtgctgggaagaaagggggttttgtaacctagcaaccccaactctcaacccccccccccacacacacacacaacttgtgaatctgattcttgaagtttcttgtggctccaaagtgagtctgtatcagctagcaggaaatgattaaagcaggggactggagagatggtttaatggttaagggcactggctgttcctgtaaaggacctgggtttgcctcctagcacacacttagtggctaacaaccatctgtgactccagtctgggcagggagccgatgccctcttttgacctctatgggtaccaggcgggggtgggggtggggtgggggagggtgatccgatgtctcttttgacctccttggcgatcaggcatgcatgccatacacatatattcatgcagacaaaacattcatacacatacaaaataaaataaatcttttttaaaaaagtttttaaaatgaaataataaaatcagaggctggagagatagtatttgataaagggtctgagtttagcttccaacgcccactaaaaagctgaagatggcgacgggtgcttattattccagcgctgaggagtcagagacaggaaaatccctgagactcactgaatatatatataaattgttttttgagacagggtttctctgtgtagccctggctgtcctggaactcactctgtagaccaggctggccttgaacttagaaatccacctgcctctacctcccaagtgctggcatcataggtgtgcgccacagctgagacaccttgtcttaaaacataggtggatggggcaagggatgggctggccaggtggctcagtggtactgcactttcggggtcgggggaggacctgggttcagttcccaatacccctatcagatagctcacgtttgactctgagtccagcactatgtatggagatttactgccatcttctggccccaaggggtccttcacttatgagcttatatacgcacaacccataattaaaaaaaaaaaaaaaaggtgaaggcccctaaggaacatctaaggctgacccccatcctccacacacgcacgcccctgcacgcgcacctgcgcatgcgtagatcaacaagcatctgcgatttggtgagagccttacaatgtgctcacggtaggctgagaaaacatgcgcgtacccaaggaagtcaacactatgtgaagtgttttggtggattgtctctcagaagtcccgattcctcccagaggcaggggctttggtcgtcctccattccctggtggggagactaagtctgatgcagtaacacatttgaggtcatgctagcaagtgtcagaagcagacagcctcattctgcggtctctgagcaactctgtgttctcagacagtctcctggtcctcctgcgctgtgatagccagtgcaggggcacctatcacatgtgacctctagggatgtgactaatgaatggagttatttattttacttcattttgattgcaagctgttttggctgagggttgagcttggaatggggtcttgaatatgctaagcatgggatccatcctgaactatgtaccccacccagccctccaattcaaatataagtagctgcgggtggttagtggcttctgtactgaacagcctctaacaggtgtctcgaattgtcccagagaagcaagtattgaggctgttatggctacagatatttgtagatcacattgacttaatttcacatgctgaatgcatgttttgagggatgcacgcaaagtcccttcgaggtgcatactggcatgcaaccacgtttcaacttcagaagcaggaatgactgtcagctaggaggtagcagctacaagctttaaacctgggtctgtctgactctaggttctcagggcttctcctaactgcacaaactggggagaaaacatacacgtacccaaggctgcctgcccccaccccaggggatggtacatataccagtgtataaccctaactactccagaacacaaccctgaccactgacctgcatggggatagctaggggtcagagggtgaccctgggaacagccaccagggctgctgtcgcaggctcactgtgacgtcgtacgttgctttgtctctcctcggaatctgggaacaggggtggacgggtttgtggggagggtctgcagtgtgcgcatccttcccagacctgcagaactcagccctggaggggcggcaagctgctcagggtctgggggcgggaaaggactaactctcgttatatccgtagctgagcccactgagtatactttgtgcacttgtgtacacaggcatacagtctgctccccttttccttgtgttcccacctttgaggattcacgaaacagtggatcaaaaagactggcatctgaatctggtgaggtggcttggcaggtaaaggtgcttgctgccacgtctgacgacctaagttcaatccctaggactcacgtggtggaaggggagaactgactcctgcaagttatcctctgatctacacacacacacacacacacacacacaccaccgcacaataaattttttcaaactttgcatctggggctggaaagagagcccagatgttaagagtgcttgctgttcttgcagatgacagtgagttcaggccccaggggacctgatgtcctcttttggcttcttaaagcaccacgtatgtgcaggtggtgcgcatacatacacgtgagcaggaagaacactcatacacatcaaataaaaatgtctttaaaaacatttaagtgaaaaaaaaaatcaaaccctgcatctgccctgaaaacgcacaattattattatttttgtcctcatttcccaaataatacaatgtaccaactatctgcatagtatttgcattgcatacatagaacaagccatctcgaggtgatttgaagtatactggaggaggtatgtaaattatatgcaaatcagcatgccattttatgtaaaagacttgagcatttctggatgctggcgtgcctggggtttctggaatcaatccctcgctgataatgagggatgactgtacaattattatcacatactggtgatataatatatggaaatataccttttttggccacccaggcatgtccgggaacctgtatttctgtctgggagcaggagtgaccctcgttctgtgtacagtgggccagcctttgaaggggaaaatctctgcagccatgtcacatcacagagagcaactcttgctcctcaactggaactgccccctgggaagagctgagctatctgtagcctgctccttacaaactcgcatccattctgaacatcaacatcaacctcccctttggacatgatcttcagactgggtgcctgtgtccgggtgcctttgtctccagtctccctggcctccacccttcttggctccacactgactgaaatgacctttgtgcacagctgagatagcccacactcactatggcattcccagtatgcctgcctgtgttaatgatatgggagccaatgcctgctgggagcctccttagggtagccagacctaccccatactctctccaccctaaggcagagagcaggaacaatggcacccatacctatgctgaactgggagttcctgggcaggcctggggtgatggtcgccattatcaaaggcctagcaggcaggcctgggtgatggccgtcatcaccaggagcctaccctacgcttcctcttaatttgttttattttttggaaacttctctggcagcaggtttaatgcctgagtgcagggtttctttggctccgtgtggagatatgtgccttgctggcagctgcaggcatgcagcttctggacactggcagcccccaggtcctatgctgagtcttataatgggcctggtacaggcatgggggtcacatcagggaaggtgagggcagtgcccaggaagatggacacagctccagctcttccttgcataccctgagccccttttcttcccttggggttgcctgaatggcccctgcctgctctcctcctctagcaacccccatctcccatggcatgcaggtctctggtgtcactgggtggtctcttccctctgtggtcactaggtgacttccccaggccctattttatttacaggtttctgtctctggaccggctctgttcccaactcattcttgtgtctggagaaggcagaagctccttggtggcccagtctttgcagggactatcgggtgtgggacatctctgccaatgccactcttgttctaagacttggggacttcatatttttccctcaaggtccagacagacctctgctcccctcctatcacctcccccctactgtctgctgccacttggatgcccccattagatgggcatattgcaagttttaggtcccttgctgctgctaatgtgacatgttctcttgtttcaggacagatcgttacgaccagaggagattgaaggtaaagtcaggcttagagaaaaagggctgctcaactctctttgtgtggggtgtggtttttggtttggtttggtttggtttggtttggtttggttgtttgttttgttttcctagacagggtttctcttcatagccttggctatcctggagctcacactgtagaccaggctggcctcaaacttagagatccacctgcctctgcctcccaggtgctggggctaatggcatatgcaccaccacacccagctgtttttgtttgtttgtttgtttgttttgttttgttggtgttttcgagacagggtttctctgtgtagccctggctgtcctggaactcattctgtagaccaggctggcctcgaactcagaaatccacctgcctctgcctcccaggtgctgggattaagggcatttgccaccactgcctggctgtggtgtggtttttttgagacaggatttcgctacctactccttatagaatagtccagctttgaacttaaaaagatccacctgcctctaggtgttggcggggagagaggcaggttcacttggaacagtccctagcacaaaacagggatcattttgtagagagccttgggcaatgccagaggcctaggggactccggggtctctacctctcagagctggccctgggctgcctttgctttaacagttctttgggtcccatctccgaccacatctgcccctgctcccttcccccagagctccgagaggccttccgagaatttgacaaagacaaggatggttacatcaactgccgggacctggggaactgcatgcgcaccatgggctacatgcccaccgagatggagctcattgagctgtctcagcagatcaacatgaaccgtgagtcgccgccgccccctcccaattggtcacacgggcctggggtcagctcttgtatctcgtgttctgtgtttcccgacacaaacccgcttgtcttttctgagcctcagtttcttcccgtgtgaatcagggttgtaaggagtgtaaggagacggtaggagtaagttagggcgtgaggtgagcagcagcaccctaaaacggggctcacagtaagaagtaaagaggatgctgttggtatcacgaggtcctgtgtctttatctgggttctacagaaatgaggatctgagtttgaggcgtttgtcacataacggaaggaaagtgcaggggggaacagggaaatgggaaagaaagggaagggaaggggaaggggaaggggaagggaagggaaaggaagggaagggannnnnnnnnnnnnnnnnnnnggaagggaaaggaagggaagggaagggaagggtcccacacaggatagagtcacattaactgctgcacccctgcagcccctgcagggggcactggagtgtaagccaactcatggaattggtatggagatgggataaagcttggttggtagagcgctggcctaacatattcaaagccccaggtttggtcctaagagatgcataaaccaggcttggtggtacatgcctacagctcactgatttggtaagaggagtttggtcagcaagctccagggaccctcctgtctccaccacacacacacaccccaacccccgtgctgagagcacacctgggagatggaggggcagacattctagattggggctggcaagttggtccccaggtaagggcactggctgttcttccagaggaggacatgggtctgattctcacagcacccacatggagacttctatctccaggatggtgtgagcccttcttctggctttgtgggcaccaggcatgcatgtgggacacagacaaacatgtaggttaaaaaaaacccatgcacataaaatcaagttcaaggtcatcctcagatacatagcaagtttgaggccagcctgggctacagaaggctctgtctcaaggaagatgatggtggtggtgatggtgatggtggtggtgatagcgggggcgtgagggtggggtgctaggaggaagccaagcgcgacagtatgtatctgtgattccagcactgggtaatggagaaaggaagggcttgctgacctactactgtagctgagagagtgaacttccggttaatgagagaccctgcctcaaacaataaggtggagagcagtggagggtcgtggtgcctgacattgacctctggcctctatagatgcacatatgcctgcatacacataggcgcatgcacacatacacaaatgaacactatgctggggtctccccacccccacccctccagaccccctgctggatttcctcctgctgcagtcagtcctcattgaaagttgtagccaggggctggtgagatggctcagtgggtaagagcactgactgctcttccagaggtcctgagttcaaatcccagcaaccgcatggtggttcacaatgagatctgatgccctctgctgggttgtctggccagctacagtctagttatgtataataataaataaatctttaaaaaaagaaagaaaagaaagttgtagccagcagacaggtgggtgcgctacttccttccacctgctgttagttgcttggaagttgagtttgtattagcacagctcgagtaagtaaggcttggagcgtgtggcgcaggtccacggaacttctgtcctttcttcctccgagagcatcttggcttcttcatctttgacattcctcaccggagtctgttgcccgatgcttttttctcctgtgcttcctcctgcccactttgtgactctccccttttctggctccctgaccacccctcgagtcgtttcctgaccagccccttgtctgaggtctgacctcattgacctcggtcacacccggacctggaggtagaggagatggaggaggctgcttagtgagaggtgggcagctcttgggttgagagtggctcaatcccttcttcttttggctccagtgggtggccacgtggattttgatgactttgtggaactgatgggccctaaactcctggcggagacggcagatatgattggtgtaaaggagctgagagacgcctttcgggaggtgagtgatgggtggtgacaagcaggagtagacgggctcagtcccaacctcgggatgactataaaggattctaaatcctggatcctagtcctagaacgtgggagggggtcttggatagggaaggagccctgacataggggggaaccctgctccgtgttggggtccgccgctcatccatgcaacattctctccctgtaacactcttcagtttgataccaacggtgacggggagataagtacgagcgagcttcgagaggccatgaggaagctcctgggtcatcaggtgggacaccgggacatagaggaaattatccgagacgtggacctcaatggagatggacgagtggactttgaaggtaggtggggcttgaaaaccggtgcgaagggagccagccacggagccctctaagcgtaggcgcactaggaaatcaccaatcccacctaagtttctgtgccttgctccccaccccgccttgcatttcttccatcgtatctgtgtatatgccaatccatgcccatcacagtccgtgtatccatctacctgtctatcattcatacttttcacccgttcatttcttcatccgtccaggtgtctgttcagtttgttaccatctctaaaagccatcggtacagcattgatccgtgcattgatcggtttattctgcacccattctcatttgactatacatccagccatgcatacgtctcggtacctgggctcccacccacatctctcctcctatgcgtctctggtttgttcctcgcagccattgatctgtctgtcccgtcatttccccttcctgtttgtatccagccattcatatattcgtccacccttgtggtcagtctgcctcaactgtctctgttcacccttcatgctgttctctgagcatcacagctcctcagcctgaccataggcctctgacatctgaccacaggtcactgttccagccatctatctattgttccttcactctgaactgcccaagacaaatgaccctgtgagacctttccggaaatatgctgtcctttgtgcctggtgccctttttgcatttgggttgaatcatttaaactgcattttatctatctatctatctatctatctatctatctatctatctatccatccatccagtgtgtgtgcttccacacacattccaaggcatgagtgtgaaggacaacctgcaagaggtggctcctggggatcaaacttaggccttcgatctttgcagcaatcacctttacctcctgagccatctcacccacccttaagtgaaattctacttattcttctaggacccagtagtagaccccccttctgcagactgagccccctcttttctgacctccgtacaggtccatccctgtaccccatgctgccctgatagactttgaaatttgagaggagagtaactttgtgttctttatctcaacatttcttacacaataaacacctcacacctcacatatagataagattcactagacatcttccttcttttttttttttttttttttttttnnnnnnnnnnnnnnnnnnnnnnnnnnnnnnnnnnnnnnnnnnnnnnnnnnnnnnnnnnnnnnnnnnnnnnnnnnnnnnnnnnnnnnnnnnnnnnnnnnnnnnnnnnnnnnnnnnnnnnnnnnnnnnnnnnnnnnnnnnnnnnnnnnnnnnnnnnnnnnnnnnnnnnnnnnnnnnnnnnnnnnnnnnnnnnnnnnnnnnnnnnnnnnnnnnnnnnnnnnnnnnnnnnnnnnnnnnnnnnnnnnnnnnnnnnnnnnnnntttttttttttttttctgagacagggtttctctgtgtagcccaggctgtcctggaactcactctgtagaccaggctggcctcaaactcagaaaccctcctgcttctgcctcccaagtgctggcatcaaaggtgtgcgccaccactgcccggctcttccttccttccttccttccttccttccttccttccttccttccttccttccttccttccttctttctttctttctttctttctttctttctttctttctttctttctttctttcgagacagggtttcactctgtagccccaaatggcctggaactcccagcctggggttggaacgatcctttcaaagaggttgaacatcaggaaccctgcaggtcagatatttacgttctgattcatcgcagtagcaaaattacaattatgaagtagcaacaaaaaatagttttagggtctgggatcatcagaacacaaggaaccattttaaagggctgcggtgttaggaagtttgagaatcactggcatagaccaggctggcctcagaatcggagatctacctgcctctgcctcccaagtgctgggattaaatatgtgagccgatacacctgcctaatcatacaggcatttttttttttaaggaatccataaaactggcaatcttttatcctatgtgtaccgagcgcttgtcataggtagcttaatgtgtatacctctctgttctcacaatgctatggcctgtacttccaccacttcatattaaacagtgagaacaccgaggcttgcttagtaataaagctcaaaatcgtataaaagccaggcgcggtggcacacggatcccttttgatcccgacaccggggaggcggaaagatgtggctctctgtgagctccaggccaacttgatctacacagagggttccaggacaccggggtggggtaggtacatggagagaccctgtctcacgacagacacagttgcctagctgttggaaagcagagttgggatgcagacagaggttggagtcagctgcgcacgcgcagccccattcttggcactgtggaagacagaacggaaaagtagcattcatcttatactctaggaacttacttctgggtggagagccaggatggatgcatgctggctcgtgcccagaacacaggggtcagggggtcaagggaaagagagagtgacactgggtggagaggagcctctatggtccgatctagaaactctgctaagcgctggggaaatgctctgggatttaacagcacctgatgccctggaagagggttcaggttgcacccacattccaggcccctcaggtgcctgcaactccaactctagggcacctcgtggcctcctttgccttcacaacacacacacacacacacacacacacacacacacaccaccaccaccaccaccacacacgcatgcacactcacaattaaaaataaagataagggctggagggatagcttgtcggttaagagcactgtctgagtcggccagtggtggcacgcgcctttaattccagcactcaggaggcagaggcaggcggatttctgagttagaggccagcctggtctacaaagtgagttccagaacagccagggctagacagagaaaccctgtcttgaaaaacaaaacaaaaacaaaaacaaaacaatttgttttttttgttgttgttgttgttgttaaaaaagcactggctgctcttccagaggtcctgagttcaattcccagcaaccacatggtggctcacaaccatctgtaatgggatctgatgccctcttctgctgtgtctgaagagatcaacagtgtactcacatacattaaataaataaagtctccttaaaaataaaaataaaggaggggatatttattcccagtgagttgaaggtatatgtcagtgtagaagcctgaatatagatattcgtggctgctttattaacagttgccaaaacctggacacagccaagatgttcctctgtaagtgaatggattaacaaaacaaaacacacacacacacataaacaaaaactcaaccaaataaacaaaaactccataaaactgtgatatacccaggggactgtgctggaaatatcaggctgtgaggccacccactagggaggagctgcggggggtgtctgcataggtcagacttgcagaccagaagcccccagagcttccttacagagatggagtgtggaggtggggacagcgcagcctcgaagcaagggtgatgaggaggggcccagccccaatgtcctatgctggctctgactgccactctctacacccgtttctgtcccctcccagagtttgtccggatgatgtctcgctgaggcccccgaggggctcctccaggtctgccaactcccacaggcggggagaagagctgagctcgcctcacccccgcagtagctgccgaaagcccaggatgtactggcggatggggcctgcctgcaccctggggaggtgcccaccccggacccccccacccctccgcactgtgaaagactcacaactcttgcaactggaaaaagggggcgcccgccggcgaggaggccacagtgccaagccggtagaggacatgcaaggcgccaagtgccatgtgcccagccgctgctggctggctgggtgggccagggagccggccagcagaccccacacagcatgtgtgccccagggcagagcctctcagcgccttcctgatgcccgtcccagctcgcctagccctttgatctcagaaccaataaaaaaaaaaccgagaatgacagagagggtggtccttgctttgtgcccgatattcaccttttcccagaatctcctgcactcccagaactgggtgggttttcttacatgccacatacattgactgagtgctctttatccagagacttccgctctagtatattacataggctggaaatgtggcatctttgtgggtatgggtgggtgggttttcgagataagggttctctgcattgccctggctgtcctggattttgctctgcagaccaggctgatttcaaactcagagatccacctgcctttgcctcctgggtgctgtgatcaaaggcccaccaccctggaaacgtggcctcttctaagaagactgctgtggcaattaagctgggcggctcttccagtaagatccagttctttgtttcttggctaagtctctagctggcctctcaccaacccatgaataacgaataacttcactattattatgattattattattgctactattattatttatgaggacaggcattttgcctgtgtgtatgactctgcactgtgtacattcctggtgctcatgggaccagaagaggccctgggtcccatgttactggagttaccagataatttataagctgccatgtgggtgctaggaattgaacctacgtcctctggaagagcagccagtgctcttagcctatgagccatctctccagctttgaccttaatcctctgattcttcacacacaggcccctatctcaggagggctggtgttacacgagtgcaaaatggcacctggttatgcggtggagtggatcaagcaagcgttctgccatagatcgcccttatttccttctaacagagggcaggaaagacaaggtggtctgaggaggaggtgtgtactggggaaggaagcacctagcaggggccatatctcctcctgagtgccaggagactccaggctggtcagggagacagacatgctggaaacacattcagagctgattacagagcgtgaccctgcatggagggaagcagaccggaagcagaccggaagcagaccctgcacagacaggaagcagggcatgaagaggcctagccagccccagagaggtgagaggaagtggtgtcaagggctttgccctggaggaaacctcactgtgtgtgatgatccaagacaggcagccgctctgttggcagttaggccttgggtttgtttactgtgtgactctgggtagtcgtgtgccagtgtgtgccctcttggaacctgtttcctgtgtttaatgaggcgagtctacaatgggggaccattggcttctgtcatttgcagagtgccctgacttttgcgacctggcaaaagagagccactgtaatcagtgggtttagtgtccacaactgatgggttgaaggatcttagagatgtttgggagttgtttgggatcttggacaggcttggagcatacttgggtggacaggggattagttagagtcctgcaagtctttatttccctcctacagcatgttaaagactcacggcaagggtttttttagttacatgtgtttatttatctcgtgtgcatgtctgtgggtgtgtgcaggaaggccagaggatggcgtttgagagtcagctctcttactaccatgtggttcctggccctcaggttgttaggattggcagcaagagccttcacccaatgagccagctcaccagcctacctgaggactcactcagtcacccatttggaatccacccctgattctgatgccatcctaggggttaggactgtcattttccgtccttaaccaaatctcagaagattccaatgctaaccgtgggccacgaactccacggtaagttccagccaggtagatacaggtgtgcttccaggcacctgaggcaggagggagggctaaaggagagagtggggagagggagggagagggcactctgtgccccaggtgtcacagttgagggaggacacttagacctggcaggaaacgtggcaaggccagtgggcccccagccaaacacgcctgggtaatctccacgtcccagaggccagcagggctggaagctccaaattctaataatccaattctgacactaagcccttggctctgtgcctcactcgggcctacagttctcctgtactggcttaactctgcccagggactccagatcagtgcatttcagaaatgtaatggctttgtgaggcgatttgaagagaaagggcctctgtagacagctccctgagcaggcagggggagccctccagaaaccggccaaggagagagcagagcacacagtgagctaggacagctccatgcctagtgtgtggcctcttaaaatcataaacacagcagctgtgacaaagggactagagaaaacagtccggtcctgctgaaaggacttttgagtacttaggcaagaagccagggagtaggtctcttctctgaagcctggggcccctcccttgcatcttagctatgcccttgccacttagctccacttttacatcttagctctgtcctttcactttagccctgcccttgcatcttagctccgcctttgcaatgtagcttctccttggatcttctctcctcctttgcattttggctcctcccttgcgttttagctccgcccttgtactttagcccctcccttgcactttaagcccttcccttgcatcttagctccgcccttgcattttggctcctcccacccacctggatattttaaggatcagaattccatgacttctagaaccaagatgcattttcctaggcaagggctccttttgctacccagggcactcctctaataccccttctgggacagctccaagtgtcaccttagagctgggcctagtggcacacgcttataattccagcactcaggaaatggagaagggagggagggttgtgaattggagggcagcctaaactacataatcacacacacacacacaccaccaccaccaccaccaccaccaccaccaccaccaccaccaccacaggttaaaaatataactaaaacaaagatgtaggagctggagagatggcttgcttagtaattaagagtcggtactgtccttctaaaagacctgagttcaaattccaaaaacggctcgcaactgcctgtaactgcagctccgcgagatctggtgccccctgctggcctccacagacactgaattcatgagcacaaaccaacacggagacacatacacaaagctgaagaagaaaaaaacaaacaaacaaacaaacaacaaaactgaaaactcttaggaaaagtccgtaggttatgtgggcaactgttgtcgttttctgcggggatcttgaggtttcatgaattctgtgatgggagcggcaagttctgaagcttatcccgtgggtactgggggaagatgtatacaggacgcccttgggattgtgcctgtaagtacacccggtggcccctgtcacagtgttcactattaatgctgtacctcctgttatgtttgccttctccggagagtcttcttgcctcagtgtgatttcctgttgcaggaaaaaggatgggaaagggctagagagatggctcagtggttaagagcatcgactgctcttccagaggtcctgagttaaatccccagcaaccacatggtggctcacaaccatctgtaatgggatcttatgctctcttctggtgtgtctaaagagagcaatagtgtactcatataaataaaataaataacctttttttaaaaaaaggatggaaagacagtcatgaaattcactttgaaaggtttcttcttcttcttcttcttcttcttcttcttcttcttcttcttcttcttcttcttcttctccttctccttctcctcctcctcctcctcctcctcctcctcctcctcctcctcctcctcctcctccttcttcaagatnnnnnnnnnnnnnnnnnnnncacgttggatcccattacagatgattgtgagtcaccatgtggttgctgggaattgaactcgggacctttggaagatcagtcagtgctcttaaccgccaagtcacctctccagcccccaagatttattatccttttaaaaagattttatttgggctggagagatggctcagtgtttaagagtgccgactgcttttctgaaggttgtgagttcaaatcccagcaaccacatgatggctcatccataatgagatctgatgctctcttctggggtatctgaagacagctacagtgtacttacatataataaataaataagggctggtgagatggctcagtgggtaagagcacccgactgctcttccgaaggtcaggagttcaaatcccagcaaccacatggtggctcacaaccatccataacaagatctggctccctcttctggagtgtctgaagacagctacagtgtacttacatataataaataaatgaatctttaaaaaaaataaatatttttttaaaaagattttattttatgcgtatgaatctttgcctgcccgtgtgcatatatgagtagcacgtgcatgcttggcactgtcagaggccagaagatggtgttggatcccctgggactgaaaatagagggttgtggatgctgggaagcaaacccaaagaccttgcaagagtaggtcttaaccaccctctgcagccccgacttttaaattttaaaaattatagccgggcagttgtggcgcacgcctttaatcccagcacttgggaggtagaggcaggtgaatttctgagttcgaggccagcctggtctacagagtgatttccaggacagccagggctatacagagaaaccctgtctcgaaacaccccctccccccaaaaattatatgtatgtgtgtacatgcacgcatgcgtgggggtgtgggtgggtgtctgggcatgttgtgagtgctgtgcccacaggggccagaagagggcatcagatcccctggagctggagttaaacagtgggttgggagttgtctgggagttgtctgtcctgggtgctgaggaccaaaactccctgcaagagcctcgagaacttttcaccactgacccatctctccagccccagtgggattaacacccgcacaggaacctcccgttggcagtgacgaactcatcttcactcaaatctgggctctggctcaaatgtctggaaatagttcagacctcagggtcctgcaaggtacctggcaggttcagattgcacacgcgcgctgtccccgcactccttgcggaggtgtctgtcacctgatcctgcttccggcccactatcgcttgtagaatgaggaccgggttctgagtttgggttggaatagaaaatgctccccacaggatatacaacacttggtcctgcctgctggcagcccttcttctggaagtgatgggaattgggggcggggcaatagaaagtagttcagggcggggggcggggcgggggggcgcatagtccattctgtattctttttccctgcttcctgcttccaccacagggtgaggaagcttgtcaacacaccacgttccctagactatgatggtgtcccaaaatttgtggggctaagcaaccatggctaacccccatcaccacgagccagactatattataccttttctacttggcgttactccatctggcattttggtcacagctatgccaggagaactaataggccttcctttagcctcattcgtgattattagccatacccagtttatgggtgggcagttacaaggaactagctcctttaggggctggacagatgactccacagttaagagcacttactgctcttgtacaggccctgggtacagggccagggcttgggttatctggcacccacataagggctcataaccgtctgtaaccccggttgcaggggatccaacaccctcttctgacttctgaaggcaccaggcaaacatgatgtacctacagttatgcatacagatagaaggaaggaaggaaggaaggaaggaaggaaggaaggaagggccattagggaggcagaggcaggcagatctctgtgagttcaaagccagccaaggctttatagtgataccctcaaaaagaaaaaaaaaaagaaaagaaaagaaaagaaaagaaaagaaaagaaagagcgagcccgtgcatggtgcttagagagtgtggctcaaaacctttacacatacagttctctctgcctgagattttctttgagctaggcttaaaggtctccctcttgtcttagaaggactgaagcccacaccacagctttaagctctcctaacgggagtgtcctgtggtacagggacaggtgacagcaaactcctctgatctcagcatataggaggctgtgagacaggaggtcacaggttccaggccagcctgggctacaggcaagaccctgcccccaagtacaaaaaaaaaaaaaaaaaaagcaagcaagcttgccctctgtgctgggtgcacagacccagctaggtaggttgaggtgttttcttcacactcacaaagccctgggttctatccccagcactctggaaactgacagtggtggagtgtgtctgcagttccagcactccagaggtgaaaggcaggagttcaaagtcaccctcaactgcagaacaagttgagctcagcctgggatacatgggaccctttctttttttctttctttctttctttctttctttctttcttttttttttttttttttttttttttttttttgttgttgttgttgtttttcgagacagggtttctctgtgtagtcctggctgtcctggaactcactctgtaaaccaggctggcctcgaactcagaaattcatctgcctctgcctcccaagtgctggaattaggatcctttctttaaaaaaaaaaaaaaaaaaaaaaatccaatgcattcttatcagttaacacagttaaaatcggttatcagaagtctgtggtgagcttagagataattaacttctcagaagaggaaaaccaggcatggtgggaagccacttgcccaagttcccatccctagtcacactggcctatcagcctcttctgtgagttctatcctctgcagggcagcagaggccggccagcccagcctcctttctgctgctgctgaagacccaggtagtttcccactgactggaagctgaggtgccatgggcaggtcctcagcctctctgggtggctctgatccctctggctcgaagagaacctaggtgaagaaacttggctttgggagcggagcagaccacccacctctgcatcagagggctccaggcaggaggcaaagccgcccccccccccaaccttctgtgttttccttcttgagcttttattgtgagccattccttattccttcggcgggaaattatgccactaacttaaaatagactgtgcttaattaatagcatgctttgttcttgggattcttatctcgaccggaagacacgcctcttttcgggtttgtgggtcaaggtgaagttgcctctggggactcaggaacagctgctttctgcttttccacttttgaactcaggttcctgttggcttttccctccctggggtagaagggtttttccctaactcgttagcctggggtgttcactactattagattgccagcatgacatgttataattacttcttcttgtatgattaatagctactgtgtactaaacaccatctatgagccaggccctctgctaagggattctgagagtcctacatgtgggtattctaattacatctatcagatgaggaagctgtgggctccgaggggagaaagggctccccaagttccacatagctctaaaaagtagaatcagcctttgaatccaagtctcggtgaccccccaaacacttaagacttacttattgacatttagtcatgtgctccgcagtcccagaatgctcttgggctggcacggtagcccagcaggcacagggactgactgccgtcctcagctacagacttcctgagttcatctggcctggcttcatctaaaactaaaacaaaaagaagaggcagtaagacagcctagggtgtacaagcgcttgctgctgagcctgacgacccaaggtgatgatgaaactcattaactagtgttgtcctctgacctctacagccaagctgtggcgtgtacctatgtgcctcccccctaccttctgcttacaaagaaatgacttttccaaaagctttttttaaaaattctcttcccttaaaatttatctcttttatgtcacacagtcttaggacatatgtacaaatattttgtatcagagagggggaaactgaggcacagagaggtgaattcctttacccgggtaacataagagacaccgttcatttgcatcaaatatggcctcactcacaggtagccagcctcacagcatacgtgggctggaagctgaatactgttgtgtggttctatacaggttacttcaccatcttcaactttttaagtttctcatccataaaacggggggaacatttcctgttttttagctttctgaggtggatatgagattcaagtgtgtgggaacggatggctgtggagaacctgctgtcagggccctgtcttggctacagtcctaagcttggcttttggatggcttcttcttctttttttttttccaagttctcttccgtgttacctgcatttttccataacaagcatattgttttcgctgggcaaggtagcaccagcctgctgttttagctactcggaaagctgaggcaggaggatcacaaatttgaggccagtctggacaacttagcaagagacagagtcaaagtctgggaatgcacctccagggtaggaaggaaccgtgctcagctcaaccctggtttcccagaggagagaggtgcagggctagggagagaattttctgagtagatggatggtgtttgggtcagcaaaggctcaaagctctaatggatgatagaactgggaagccactgagaggggaacggagcccatctcgggctcagccccagactgtagctcctgtcactctatgaaggtcacctgtcctgagagagttttgcggatttagagaaaactttgacctggatcttggcagtcccaagcaggggctttaatacctgtatgtctacgtgtcacggacacacaatgaaggtcagaaaaccgcgaccccttcttttttttttagtttttctctgtatagccctggctgttctggaactcactttgtagaccaggctggcctcgaactcagaaatccgcctgcctctgcctcccaagtgctgggattaaaggcatgtgccacgacctcctggcctttgggcccccacatccttagcagccttaaggggactgggggtaaaaaacccatgttctctgccaaagcagctagcgctctagacaccgagccatctttccagcctcctatttactgttatagagacaggatcgcactcttggagctcaagctggccttttaaaactcccggtaatcatcctgctttaacctctgagaatacaggcacgcgtcacctggcgtcagcgcgcccagagttgttttatgttcctttttctgaacctcaaaaatcaaattcaaccgggctttccatgttttgtccgcattatctgtatggacaggataagtacttatggaacaaatgattccacttcccccgcttggctgggtcggaaaaatgggagttgaggcagatacccaagggcatggacaataacgcagaagagcgctgtgtgaaatgccaaagcagggagctcgggtcgtgccagtggtccccagcaggaggaggaggag

SEQ ID NO: 1697 - DNA, 926 bp, Mus musculus
ccccccggccccagaagcctccttcatggacccagagaccgccaaaggggctgtgtcagcgtaggatgggcaactgcgtcaagtcgccactaagaaacctctcaagaaagatgcgccaggaggagaagaccagctacatggcggtgcagacaagcgaggacgggctggcggatggcggcgagctccatggaccactcatgatgctggcccagaactgtgcggtcatgcacaacctgctgggtcccgcctgcatttttctccgaaagggttttgctgagaacagacaacctgacagatcgttacgaccagaggagattgaagagctccgagaggccttccgagaatttgacaaagacaaggatggttacatcaactgccgggacctggggaactgcatgcgcaccatgggctacatgcccaccgagatggagctcattgagctgtctcagcagatcaacatgaacctgggtggccacgtggattttgatgactttgtggaactgatgggccctaaactcctggcggagacggcagatatgattggtgtaaaggagctgagagacgcctttcgggagtttgataccaacggtgacggggagataagtacgagcgagcttcgagaggccatgaggaagctcctgggtcatcaggtgggacaccgggacatagaggaaattatccgagacgtggacctcaatggagatggacgagtggactttgaagagtttgtccggatgatgtctcgctgaggcccccgaggggctcctccaggtctgccaactcccacaggcggggagaagagctgagctcgcctcacccccgcagtagctgccgaaagcccaggatgtactggcggatggggcctgcctgcaccctggggaggtgcccaccccggacccccccacccctccgcactgtgaaagact

SEQ ID NO: 1698 - protein, 248 aa, Mus musculus
PRPQKPPSWTQRPPKGLCQRRMGNCVKSPLRNLSRKMRQEEKTSYMAVQTSEDGLADGGELHGPLMMLAQNCAVMHNLLGPACIFLRKGFAENRQPDRSLRPEEIEELREAFREFDKDKDGYINCRDLGNCMRTMGYMPTEMELIELSQQINMNLGGHVDFDDFVELMGPKLLAETADMIGVKELRDAFREFDTNGDGEISTSELREAMRKLLGHQVGHRDIEEIIRDVDLNGDGRVDFEEFVRMMSR

SEQ ID NO: 1699 - DNA, 46863 bp, Homo sapiens
catccctcaggcaccgctggcttcttgccctcggctctcattccaagattaattggaaatgctgaaagcagataaaaagagaacagaaagtgaagttgaaagggcagagaatttgctggatttttttctaaaagccctcctccgttaaaggccgagcatctttggagatttttagcttcagaatggtgactccctccttcagcctggtccctgtgtacatctttgttgctgggttacacacagcatagggacagggctggctgtgtcagagctgggagagtagagatctgcttgataaggtctctgaatttctccaacagcgagtcacatatcttcagaaatgattgttccccagatagggcagttacctggagtccaccttcaggtcggtgatgtcacttacgaagggaaaattatctcagaactctgtaaggtgaggagcctcctggcaaggaggccctgtcagccagaaccacaatgctgagatgtcctagtaaaggtactgcctatacatcttgtttaaaaatctggaagtggcagcatccaaaggaaaggagtggtgggcagagttctaatatttaggactggaaagtggctgatgtgctctggtattgcttttcaattgttaaaatattgaaatacttccatactactgggtaaagagttggatctttgaattccccatgctcccgtccctctgctaatacttaaagtctgttgagagggtcttattttattcaatttcatgaggagctctacctgtccatgcagcaatgggagcttcctttgctgaacccagtttgctttcaccgtgcagtaccagtaggtcttcttggtgcagggccaggcaccactcccagtgccacagatgtaaccgcactgctcacggactgcactgttggctgactgcttttggatggaacctccaggcaattaaaacatagaaccctcctgcatgtggcaaaaacatgcctggtccttaaaggtcacatacacctttatgcttgctgtcactcaggatccaggttgtatttgcacgcagcagaaatgagctgtctgaaggagaaccagagcccctgcagcatcttcttttatggccaccctccccccatgcactaggtccaggcatagaggactcatttctataaaagcaataatgggcaggtgtggtggctcacacctgtaatcccagcactttgggaggcctaggtgggtggatcacctgaggtcaggagttcgagaccagcctggtcaacatggcaaaaccccgtctctactataaatataaaaattagccagctgtggtggtgcacgcctgtgatcccagctacttgggaggctgaggcaggagaattgcttgaacctgggaggcagaggttgcagtcagccgagattgtaccactgcactccagcctgggtgacagagcaagactccatcacaaaacaaacaaacaaacaaaaagcaataatggttttctttttaaaaatttgttattcattcactaaataatatcatgtgagcacctatcatgctattatgttttggtcactgtgctaagtgcaggatgtgtataaatcgagcttgtctctgcgttcatggaacatatagtttaatgggatgtgggaagacagaccataaaggaggccacggtggctggaatgtggtggggtcacctgaacatgggttgcatttcgcctcatggaaactgcatagatgtcatgggtggcttctggtgtgtggtcaacttatcgaatgtatctaccctgttagagcactggggtgcatggcaccagtattaaaggtgcaaagcatagggggtgaccacttcctgcatccattgaggatctccgagaggttgggaactgctctggattaggcaaagataggggggaatattctgaatgaggaatgatggagatgataggttctaacatttggaggtcaggcgtgctatttatttatgtatttatgtatttatttatttatttatgacagagtcacgctctatcgccgaggctggaatgccgtgacaggatatcagctcactgcaacctctgcctcccgggttcaagcggttcttgtgcctcagcctcccgagtagctgggattagaggctcctgccaccacgtgtggcaaatttttgtatttttagtagacataggtttcaccatgttggtcaggctggtctcaaactcctgacctcaagtgatccacccaccttggcctcccaaagtgctgggattacaggcatgagccactgtgcctggccaagtgtgctgctggagtgcaatggcgtgatcttggctcttagcaacctccacctcctgggttcaaacaattctcctccctcagcttcctgagtagctgggattacaggcatgcgccaccatgcccggctaattttgtatttttagcagagatggggtttctccatgttggtcaggctggtcccgaactcccgatctcaggtgatccgcccgcctcagcatcccaaagtgctgggattacaggcgtgagcctccatgcccggccccaagtgtactgtttttaaaagacggtaacttctgacccatcagtcatctgtaagggacaggatttccttcatcaatgcttattccctcctttgcctcagtaaccaagtgagttcagtcaccaaaatcataattcatgcccctaagaaggtccagtcgaccattgtacttgtcagtattaattatttttgctctatctgtcccgatggtttgatttttctttttattgagttattatttatatgcagtgagatgtacagtcttgagtgtatagttcagttttgacccatacatgtattcttgcaacccatacaccttttcatttttatgttaaaaatggaggccgggtacagtagctcatgactgtaatccctgcactttgggaggccgaggtaggaggatcttttaagctaaggaatttgagaccagcctgggcaactgagcgagacctcatctctaccacaaataaaaaaaaaaattaggccaggcgcggtggctcatgcctgtaatcccagcactttgggaggccaagacaggcagataatgaggtcaagagatccagaccatcctggccaacatggtgaaaccctgtctctactaaaaatacaaaaattagttgggcatggtggcatgtgcctgtagtcccagctacttgggaggctgaggcaggagaatcgcttgaacccaggaggcagaggttgcagtgagccgagatcgagccaccacactccagcctggcaacagagtgagactctgtctcaaaaaaaaaaaaaaaaaaaaaaattaggtccagtcaaccgttgtacttgtcagtattaattatttttgctctatctgtcctgatggtttgatttttctttttattgaattattatttatacacagtaagatgtacagtcttaagtgtacagttcagttttgatccaggctttttttttttttttttgagactgagtcttgctgtgtcacccagactggagtgcaatgacacaatctccactcactgcaacctctgcctcctgggttcaagtgattctcctgactcagcctcccaagtagctgggactataggcatgtgccaccacacccagctaatttttgtatttttagtagagccaggatttcaccatgttggccaggctggtctcgaactcctgactcaagtgatccacccgccttggcctcccaaagtgctgggattacaggcatgggctgctgcgcctagtcccaggcataaattcttgtaacccataaaaacccttttcatttttattttaaaaatcttggaggctggacgtggtggctcacacctgttatcccagcactttgggaggctgaggtgggaggactgcttgagctgaggagtttgagaccaacctgggcaactgagtgagacttcatctctactacaaataaaaaaattaggtgggcatgctggcatgtacctatagtcccagctgcttgggaggctgaggtgggaggaatgcttgagcctgggaggtcaagtctccagtgagctatgatggcaccactgaactccagcctgggcaactgagtgagactttgtcttgaaaaataaaaatcttgacatcctctcaagtgatgaacatttgggtccaagggcagattactggaaaagaatcctctatgtagtccactgacccattacccccaccctctaaaatctcatccaatcctttcctgagtttcccaatcacacagaggacttaaaactctaagaacattttgtaatcccagctttctgaaacataacagagatattgtcatctgaaaacaaggggagattaagtgcaaaatttgattctgacaatagcagaaaggaacaagttagacaaagaacgtcacagagaatgaattcaagcaccaccgtgtaaatgctccacaacctttttcaagactctaaacatgacatacagtcttggtgaggaaacaacaatgtttaaaggagtttgctacagggacatggcatcatcaaactgcgatctgttaaatgagagatccaggtacactttaggagttttgctcttactctttctggatggattctcttagaaatgaggcataaagacagctaaacacactgttctctctgcactgatgcagtcctcccaaacccaccttttctgtttcactgcccttgtatgctgagatgcctttccagtgctgcaaaacagctctttttctgcctagttttcaccaatgattatacagtcaaataatataacaacaggtaattatttaataattacaatttgtgtaacacctaaaggcaaatgagaggctttatgtgaaagagcttttttttttttttttttgagctggagtttcacactgtcgccctggctggagtgcaatggcacgattttggctcactgcaacctccgcctcccaggttcaagcgattttcctgcctcagcctccggagtagctgggattacaggcacccgccaccacacccggctaatttttgtagttttagtagagacaggatttcaccatgtttgccaggctggtcccgaactcctgacctcaggtgatcctcccgccttggcatcctaaagtgctgggattacaggctcgagccaccgtgcctggccgtgaaagtgcttttaaagctgtaaaggtatatacaatccaaaaagattcttttaaaatcgtttttacatggcaggatactttgaagcaactggatttccgctgtatctcacaatcagtgaggcaagccattctcattttccacattcaggattttccatgtcttagtgatggcatttctggaatattcctggatctgacccagcctctgaaattagtcctcatgttctccccaccagacttaaagtccatgaagaaaggtataatattcacttgttaactattctattcctgaggcctagtccttggtgggcattcagtaatgtctgttaagcgaatgaacctcattggtcttgccttcagtctccttccagcccacctgacaatgtattttttgcattgcatttttgaagcatcatttcaaaaacacagttctgggccgggcgcggtggctcacgcctgtcatcccagcactttgggaggccaaggtgggtggatcacttgaggtcaggagttttgagaccagcctggccaacctggtgaaaaactgtctctactaaaaatacaaaagaaaaattagctgggcatggtggcgggcacctataatcccagctactcgggaggctgaggcaggagaattgcttgaacctgggaggcggaggttggaccacttcactccagcctaggtgacagagtgagactccatctcaaaaacaaaaagcaaaaaccaaaaaaaaccacagttctgcttgcattttgcattgcattttgaagcatcatttcaaaaacacagttctgcttgcatcctacacaagctcacaaaaccttcaagcattctccattgccaataaaataaagtacaaactgctgaatgtcacactcaagatctttcatggtctagttccaaaccacccttctaggcccatttcccagccctcattttccctcccccttcaatcgccaaatgattcccaagcacgccatgcaggttcacactcccaaccctgacttaatctatgtcccctgcctggcatgaccttcctttggccctccttattcatctgatggaatttcacttattcttcaaaaagcagctcaaatgtgacatcctctaatgctttctctagctccccttagggttctcccatataacttagctcataatccccttattacacgtttcccattatagtttagttggttttctcccctgaccctctgcctttttttttttttgagacagggtttggctcttttgcccaggctggagtgcagtggtgggatcttagctcactgcagtctctggctccagggcccaagccatcttcccacctgagactcccaagtagctgggactacaggttcatgccagcaagcccggctaatttttgtatatatttctttggtagagatgaggttgcaccatgttgcctaggctagtcttgaactcttaacatcaggcgattcctcctgccttggcctcccaaagtgctggggttacaggcatgagccattgtacctggccccagtggtgctttaataatgtcaactatcatatgccacccactgctgcaaacccaccagtggcttcccttcacacttagaggaaacccaaagccttgacatttttggcccctgctttcctgctttcctctccagtttctgtttttttttttttttttttttttgagacggagtttcgctctgtcacccaggctgctggagtgcagtggcgcgatctcggctcactgcaagctccgccccctgggttcacgccattctcctgcctcagcctcccgagtatctgggactacaggtgcccgccacaacgcccggctaatttttttttttttttgtatatttagtggagacggggtttcaccgtgttagccgggatggtctcgatctcctgacctcgtgatccacccgcctaggcctcccaaagtgctgggattacaggcttgagccaccatgcccggcctcctctccagtttcatctctcctactttccccctcgctcactccagcctcctttatctctgcttctcctggaacatgccaagctattccctcctcagggcttttgaacagcctccctctgccagggaagctcttctcccagatatatacatgacttcctcctttacttcatttgagtttctactcagatattccctctgcagagaggccttccctaatcgctctctaaaagagcaccctcagtcgggcacagtggttcatgcctgtaatcccagcattttaggaggccgaggtgggaagattgcttgatgtcaggagtttaagaccaacctggccaacatagcaagaccctgtctctatgtaaaaatattaaataaataaataaaatagcaccgcccgttaaaccctagtctcttacctgctttatttctccccatggcagaaacaccaccagtttgtcaccattacttttccatgcgtttatgtatttgtttatttgttgctgaggatagagaccattttgtttgctatcatatccctggtacctagaacactgcctggcagataacaggcactcaattatttgttgaatgaatggatcaatctttgtatccaagatgactactgcagtgcctggttggatacatatttgtcaaataagtgaccaaattaatacattttacaaatgaaatggaatcctggcatacatccaggattatctgggatatgagtgaaggtgtttcatccatttgcttcatggacataatttttatttatttactctagtaatcataggtaacataatcagattcttcagtttttcaaaaactagttggtgaccgaggtcttgcccaaaaatatttagggcatttcagaaaggttaccaacagtggcacagcagggatttagaatacccagcagtcctctgcctctcattggctcctgagggtttctgataaggttctttatctcctgtgatttatattgaatgtgcctttgtttttaatcctgccaaacactgattattctgagggctggagcaggtaagacattgactgacctcgaactcaaagggtggactcattacaccctgcatatcccagaggaccctgcaatgagccttcagggctgcaacgccccaggctgcttcaggatttgggctttaggaacctgagtggctttgatatggcaattcagtcccttaagggtagctgatctggggaacaatttgccacactttcctagtttactttagcctctgggcagttgctttcccagcccatccattttccttaattccttgcctatggataagtaaaagaggcacacagggcccagcgcggtggctcacgcctgtaatcccagcattttgggaggccaaggcgggcagatcatgaggtcaggagatcgagaccatcctggctaacatggtgagaccccatctctactaaaaatacaaaaaattagctgggtgtggtggcgggtgcctgtagtcccagctactcgggaggctgaggcaggagaatcgcttgaacctggggggcagaggttgcagtgagccgagatcgtgccactgcactccagcctggtgacagagcaagactctgtaaagaagcagacagtgcagagaaggatgaactcttggcatgagtgaagtgtaatatcggcaatctgtttgtgtacccttcttttttttttttttttttttttttttttgagacagggtctcactctgttgcccaggctggagtgtagtgacccaatctcggctcactgcaactttcacttcccgggttcaagttattctcatgcctacaagtggctgggattacaggcgcccaccaccacgcctggctaatttttgtatttttagtagagacagggtttcaccatgttggccaggctggtctcgaactcctgacctcaagtgatccgccggtcttggcctcccaaagtgctgggattacaggtgcgagccactgtgcccggcctcgtgtatccttttaatgaggccgagcggtgaccagactgtggatggcattggggccagggaccagaacagggagagcctgggaggaacccctccagccccccgcaaagctcaagcaccggatactaaagaagaatggtagatggggcctcatgatgtgcagggggaagggaactggcttaactggatggtcccctgtccgagcactgggctaggccttttgtgtgcatagtatcgtctgctgttaccaagaaattagttatgcttatcatctgcattttacagaagaggagaacaaggctcagagaggttgatgacacctgcccaagttacccagatggtaggtggcagagctgggatttgagattcagatcaggcctgggacgctccctggctgcccaccgagagcaggaatttctgtagcatctagaaaggcaggaaggtgaaagaggggacaagagctggagggggagcaaatgggtcctacctgagacttaccatcatcaggtgctgccagacctggcttctcttctattctgagaactgatatcctgtggctgacttaccagggtcgtcctagtccccccgcacggtattgggagtggaggcagccccacacggaggcgctgggagactttcctcccagcagtgtcctgtcactgcattccggcccctgcgtttgtaggcagtgatgtcacagagtgccttcatgctcctcgggtctccggttctccccggacctctgtagtcctcattgccaaagttgtaccccctggggagtgcaccctgcctgcatttctggaggttcgggcggttccggggctctgcaggagcctccaggcgtgataaagagcgctgccggcactcccggggtctcggcctctttggggcccattgccaagccccttccctcctcgtgctcccgctccgcgttgcagcgtccccttcgccgccaggggccgcccggaagcggggctcccccagggcggggcggggcaaggggcggggcgcggcggtacctgggccgccagggagccgggggtgggctctccggggacagccggcagcgcccccagatctgcaccgccagccgccgggagctccgggctccgggcgtagaggctgcgctgtcacatgggcggcggcgacggggccgcatttaagcggccgggggacggcgcccgcctccagcgcgtcctcgggcttggctcccgccgggagccccgttctctgcccgccgggggccccgcgccgcgccgcaccgcgccgcccccgccgggccatgcgagcgcgggccccgccgcgatgagctcgcacatcgccaaaagcgagtccaagacgtcgctgctgaaggcggcggcggcggcggcgagcgggggcagccgggctccccgccacggccctgcccgggacccggggctgcctagccgccggctacccggctcctgcccggcgacgccgcagtcgtccggggaccccagttcgcggaggcccctgtgccggccggcgccgcgagaggagggcgcgcgggggagccagcgtgtgctcccccaggcgcactgcaggccccgggaggcgctgccggccgcggcgtcccgaccttcgccgtcgtcgccgctgccgccggcccgcgggcgggatggggaggaacggggactgtccccggcgctcggcctccggggctctctgcgagcccggggccgcggggactccgttccagccgccgcgtccgaggcggacccgttcctccaccggctgcgccccatgctcagctccgcctttggccaggtaagggccgcgcctcccgtcagcgctcccgggaaaggcgctcgggaccctgccggccgcggttgcgcgtccacagcctcctcccgcggcccgtggtcccccacggatcacgcctcggctcacctcgtcctccccgggccggcgcccttgccggcactcctcctccccgtgcctgattcagcaccccgtgcgctgtccacgctccgggcctcttggggcaaggccctccccgctagcctccctcatacccgccagaacccgccagtcctggaagagagcgacctctacgaccgtcctggagatttgcgggggtcaaggaggggcgctccgagcaggtggcgccaaacccactcctctggcctctggccagtaccgccagggagggactcaggagagcaagcggtttggagtctgggggtcaagagaggggacctcagagaacacagaattacttgagggcgagggacactggccactgcctatcatgtccctgaaggcctgagaaaagttaggagatccaaaaatatgaggaaagagaagaggtgtctgggtaggcatggaggggcatgcagagctgtggctcaaactggaactttggggtggtttaaggaggctgtcactctagggatgccattggaagggtgagaaaggccacaaagaggtcatcagtggttccctcaggcctttccctcaagagtcccaggcacctgggagcctgccctttaaaagcagctccgtagtcacaatataggtctacagtttgaggctgtgctgctggggaaacaggctcagtagaaggaaacctctgaactcctgagcaaaaaagccagggtttcccctagttcggagtctgtaatcaagtcaaactcattggcacagctttgagacagttctgtggcagcctccgagaggtgtcatgcagaggtctgattagagcgtttgcgtggtttgtagggaaacagggggggctgtgcctttctgtgctgagatctagcataaagaagctgtttcaagctcctggcttgccacgccggatcagaattccaaggaggccctgtgtgttttgcttcagatctgcacatttcttttcaaaatactactcggcagtggctgatgctggtggaggtctgacatgaaggcagccgcacatggatttgggttgcgtggtgctgctgtggtggggccatagggcagtggtgtgtggctttgttcctgcagggagccctcgttagccgagttagctggaaacagttctctggagtagagatgtggatgcagagccgtgagagttagtgaggcgatgtgtcaggggagttcactgcagtgctttgtgttaatgaggaggtgtaggctgccagggcacgagtggtctttggattggggctgggttgcagcaggaatgctgggttgttgaatgggtgataccaattcattcatttatcaattatttcttgagcatttattaaggaaaccttcaggggtttccttagttcctgtggtttgtttgttcagacatttgctagacaccaggaagacaacagtgaaccagatagccagggccctggctgtacctagcagtttggaagggtaggtcattggcctagaatcatacactttctggttactcagtttgcagctgatctgactcagctcctgaaaaaaaaaaaaaaaaaaaaaaaaagagtcctttctttcctgtcttgcagaatttgcctacatgagccctttctgagctccgagcattgtagcgacgtgcttttgtttctccttctaatttctcagtcattaagtgaattctccggcccaatgttctgaaatgtcaccagggtcacctgagtcaggaggagctggaagttcccatcaaatatttactacctccctgtggaagctcttgcctctcagagctgcgggcttttactttaaagcccagcacattcagtttgggcttccatctgacacctcgaagtcatctacgtgagcaacaacagcaaacccaggctgggactttcgtgtcagagcctccagtctcctgtgacagagaggaattaatcttttcttcccttttctccgtattgagatttctgtccttagaggcagggtcagaaccaagagaaggcagatggggttctgaatacagaaacttttagttaagatctgcttagggaaaaatacagccctggggaagtatatttttcatgactccccaagtttcatttgtttttaacttaagtgaattgcttaacctcattaagtctatttcttttttaaaaaatatattttataatagagacagggtctcactatgttgcccgggcagtctggaaatcctgggctcaagtgatccacctgtttcagcctcccaaagtgctgggatgacaggcatgagccaccgtgcttggccaagtctatttctttacctgcaatgtagggatcatcagggtgcttgggagattaaatgagatacggagagatagagagagcttggcccaggcctggcacggagcccttgctaactctatcagtgttagttattcttcttctttgttgttattgttgattaactaccaaggccttcttccttttcatttgtaatagtctcagagagccagtgttcagaatcacactgaaggcacaaagatgaattcctaccttaaaggaaacagggatgaaaactctcccagtgacctcatagagcatccttattgcatatgcatggagacagcgtggttttgaggctaaggtgtggaatggtggcttgggagacagcagagatgcaagttctaatcctggctctgtcactttcgatctctgtgtccttgggcatgttattttctctctctggtcttggtttcttcatccaggaatgagattgacaaaaactgctttgcagttattaggaggcttacacaagattaaggatatcaaatgcctggctcatagtgagtgctggataaagggcagccttcattaatgttattgctattattaatagggtaattgaatgagggcctgggtaaggtactttgaaagctgattctgagccaggtgaggatggctattaagggaaggagctgaatgtcaaaggatcttccgtactccctctttgtggccagctaaggacatgccacccagctgtctagagaagatgtgatgtcagaaattaactcggcagaggcatgatgacatggggctttaggtcttggaagactattttaagaaacaggctttctgctccttaccctgagcttgagaagaaacatgccttgtggaggaggcaaatgtggataaaacccacagctctgtcccatccttcccatttttccagctgtagaaacatgtctcctaatacagataggctatccctgttcccatactgctttgcacatagcaggatcacagtatttaatgaatgaatgaatgagtgaatgaatggtatcaccagcctccggacttcagaggcttccttagctcctgtggtttgtttgtttattttgagacacagtgtcactctgtcacccagactagagtgcagtggtatgatcttggctcactgcaacctctgcctccaagattcaagccattcacgtgcttcagcctcctgaatagctggaattacaggtgcctgccaccgcacctggctaatttttgtattgttagtagagatggagtttcaccacgttggccaggctggtctcgaactcctgacctcaagtgatccatccgcctcaacctcccaaagtgctgggattacaggagtgagctaccacgcccggccagttcctgtggttgagatggggagagaggccatggtggtttgggtcatggatttaattgcactaagcctaggttcctaagatagggctgtgtctattcctcactcctactccagtcatgtgtctccctccttctctctgagagggcttggagcccctataggctttctctggggcctggggagagggaaagtgagggtcagcttgtggttaacatcagccacaggtgataggagtggcttggagtcagttcagtgagagcctccaggaggtcagcctttacctccagctgtttttgagaggcaacaatagcacttgaggcctcagtctagagcccactgcacagtggacaaagtgtcttcttatcttcacagctacctgtgaaggttagcatcatcaactccccccaaccccaccacaacaattttagaaatgaggaaggcttggccaggcacagtggctcacacatgtaatcccagcactttgggaagccaaggtgggtggatcacttgaggtcaggagtttgagaccagccaggccaacacagtgagacccatctctactaaaaatacaaaaattagctgggtgtggtggtgggcgcctgtaaccccagctactcgggaggctgaggcatgagaattgcttgaacccaggaggtggaggttgcagtgagctgagattgtgcctctgcactccagcctgggtgacggaggaagactctgtctggaaaaaaaagaaatgaggaaggctcaagagagaggaaatgacttgtccaaaggtcatatagtaagtacatggcagggccaggtgtagtggttcacatctgtaattgcagcactttgggaggccaagtcaggaggattgcttgagcccaagagtttgaggctgcagtgaactatgattgcaccactgtactctagccacagtgacagagtgagaccctgtctctaaaaataagtaaataagtaggtggcaggactgtgctgagaattgtggtctgcctgcctccgaaaatacctgcctgttctgtgtgtgccatgctgctttggtgggaggtcacataagtgtgttccctgttcgtcagaagcatctgcaaagcacctctcacgttacagtccagctttccctgagtgtcttagtaccgggctgtcatccaagttcaaaggctggtgatagttcaaatgctggtgatagaactgaccagcgccaaaggccagcctcccttctaatcaggaataatcagcaatgagtttatccttctcatccctctgatcctatcattccattccagcactcaaagtagggcttccggaggcccaagggctgctgccacagtggatagagatgggaggtgagggcatacgacatgcttcactccttacaggaagcccccaccgttcagccttttttgttttttgttttgttttgaagagacaaggtcttgctctgtcacccaggctggagtgcagggtacaatcatagctcactgcagcctcaaactcctgggctcaagtgatcctcctgccctagcctcctgagtatctatgaccaggggcacagctgccatgcctggctaattttaaaatttttaatagagatggggtcttgctatgttgcccaggctggtcttgaactcctggcctcaactgatcctcccacctcagcctcttgaagtgctgggattacaggcataagccgccatacccagctgttcagcccttttaaaatttcctactgaaggctgagccatctgtccctcctgcctatctgcccggctcaagttagcttaagtaagctttaaagcacgtcgaaatccctggatcccttgctatcctcaaacctcaaggtagtatcagctcctgcacctgcccccaaagcaggatgggatttcttcaaagtgtgtgatttttccatagggaccaggttttgccggctcctgtctcctgtttccaacgacagaggcatatcccaaggtcgacaagtgggtgctatgcccggactggcctgcagggggcaggaaccaccagatttgactgagttgatgccctgctgaataaatggatgccacgcttggccctttaataccaatgctgggcaggggaagacggcgctttctagatgcttggcacagtgccaagccctttgcatgtattatctcattagctcctcacaagagccctgtgggaggtgctattagaatccctattttataaatgaagaaactgaagccgagaaagatcaacatgtcctctaggccacatggttactgagcagcagacaagatttttttttttttttaaatagagatgaggtctcactatgttgtccaggctggtctcgaactcctgggctcaatgatcctcctgccttggcctccaaggattacaggtgtgagccaccatgcccggcccaggatatgatttgaatccaagtcagcgtgactcctcagtccaagcctttttttttttttttttttgagatgaagtctcactctgtcgctcaggctggagtgcaatgacgcgatctcgactcactgcaatctccgcctcccgggttcaagggattctcttgcctcagcctctcgagtagcggcgactgcaggcacctgccaccacgcccagctaacttttgtatttttttttttttttttagtagagacagcgtttcaccacgttggccaggctggcctcgaactcctgacctcaggtgatccacctgcctatgcctcccaaagtgctgggattacaggtgtgagccaccacgccccgccccaagctcttagcctctacatcagtgcttcccaacactggctgcaggttagaattacctgggagtactaagcaacaccaatgcccagtgcccattggagacagaattaagttagaatttctggggaagctccccagttatgccagtctacagccagcattgagaatctctgctttatgctgtgctgttttggcctttacgtatatccacccattcatacctggaccttaacctgagcttccctctggggtccctagtgagcactattgtttcaaaggaacctacatatggtctattttctagattttgcctgcaagtctttcctgatcccctagactcagacagattcccctcactcacattcccagagtttttgtgttttcccttcatagcatttatctgaaatgtaatcagataactgtgtcccagctctaatatctcctgcccacctgctagaatgtaagcgtcctgaaatcaggaactgtgtttctcttatcccccaacaacgttcccagagccaagcacggtgcctgacatttctccactggacaagtgatacttctttcttccatttaaataattactgatccagtagctattcggtgtcttacactttctcatgtatgctatataagcaagctaggaaaagccccatttttccagtggcggaaactgaagttcaggaatgggaggcagccacccagtcagaagctggcagcgctgggcatggtgtctcatgtctgtaatcccagcacttcgggaggccaaggcaggtggatcacctgaggtcaggagttcaagagtagcctgttcaacatggtgaaaccccatctctactaaaaatacaaaaattagccaggcatgaagttgtgcgtctgtaatcctagctactcgggaggctgagccaggagaatcgcttcaacccaggaggcagaggttgcagtgagctgagattgcggcactgcactccagcctgggcaacagagcaagacactgtctaaaaaaaaaaaaaaaagaagctggcagagctagactcaaccccagacctccccgtccttcccattcattggagtccactgacccctgcctgggcctgcttccttcatgctgtttccaggagacacgcatcatcaccctcttttctgttctttagtcatcaatacccgccccccaggctcctcctcctccatctccccctccagaggtttggcccaaacaaggctgctgagtaactcccctgattaaaccattgcgtggttgtcagcagcagcaccggggaggtccaggagttatccagggacctccttcccagctccctaggagtgagcaccctctgggcagcgcccccacccatcttcctaacaggagttctgagcagcccccccacacgggagaaaagttcctgggaaaggaggctctccgggctgaaaactgagctagcgtgcaagaatgggcttgggaggagttctgcttccagtctatctctggtgccccctgctggaaaaagctgggtgcaggaaacagggacacttgcacgcggggaatctggctggggctgtaggtctcaaaccggacatctgaggcgtgagatgaattcatatcaaagccgaccctggagggacgaggaagagccagtcatctaaaaagctccagctgtgggacctcgaagagcgcttcgtaaagggcttcttctctgcccggcaccccaaggaagctggggagaggtctttgctgtggatgaggcagggggcgaggaggaggaggttcagagaccttttgctcatgccctctctgcctgcgctgcctccgtcatgctcccctcggggccatctcctggtttccttcgggtcagagaaattgcacacagagcagaaggatctgatctgactgttggctcatctgcactgccggcccccgagcctcgtcccatttcagtgacaaggcaagtgtgaaaaatggagcatgatggaggcgtcaccagacctcccaggctctcgactggagccgcagctctcaatgcagctggaattgccaggggcagtgagtgcttgtccagctcactgctctttggaaggggcattcatctccctgagcgcttgtgtgtgcatgcatgtgtgtgtgtgtttgtgcgcgcgtgtgtgtgtgcatgcacgtttgtgtgtgtgtgtgtgtgcgcgcgcgcacacacacaaggctgggagctgtgcggcaggcaccctggcttcgggaacccaaactagccagcttccctttctgggcctgctggcctaattcccagccgcagctgccattctgggcccccctccctgaggccatctccctgcagatttggcagcggggaaaggaggggccgagagaaggggagagaaccagagacaggactgagcgctaatctgatgtagatgatccggcagccttctccagcttggttcccctctgccatcagctctccaggtgactttccctgtgccctgcactctccccttctgctttcatctccttaagaaagtgcccagaaagttaaacccacacacaaacacacacacaatccacccaaaaaaaaaaaaatcggagagcaggagcaggcagacgagtaagagagcacgcgcgcaagagagggctcacatccgtcctggaggaagaacggcacagacggagggaggctggggttggcagagactgggacggaagtccctcagtcccccaggagcctccttcatggacccggggatcccaagaggggctgcctcaacttaggatgggcaactgtgtcaagtatccactgagaaatctctcaaggaaggtatgtttttggagtttccaagatctggggctggggattgggggtatctcaccatctgtctcagaggttgggcacagaaagggtggctggagcttgctatccttcccaggggttctgtccagggctgcctccctgcttctaccccaaacaccctcctattgccgttttctgtgtcccaggctttgggcatggcggtcggggtgaaactgtgtttgggaatttgcacaaggcttaggaaagaaactgtgtagctttggggtttctgggatgtaaaatgaaaagggtggatccttaagatgtcagtgaacttgactggcacctcagtcattcaagggactggccaagtcccttaaaaccggcagaatctgaagacccttcccagcagcaagggcagggactccttcatatcctttgagggtctgtgagcctctctgatggcctctaagccttcagaattgtggattttgaagtagatcccattgctactgaaaggaaccaaacaataattcttccccaataattcttgagttaagtcagagtatctcaaataggacccgagtggttttagggcccaggagtttttccattaagaagtaggctgcccgggtgatgtgttgagcaggggttgcatgtaagtcactttctgtggtggctttatcgccatacacttggatttgtttttgtttttgcaaaaattccttttagaaagaacatgatcatctctaaagcatctttcatgcaaggctgggtttgcacctatagggttttgggttaggtgggctctgcgtatttttctagccctctgttgccaggccatagaagagactcaggtattatttaaaggaagagggaatgatggcgttgttttcctccaattcttccattttccagacaaggaacttgattgacattcagagggaggggttaagtgacttacctatggcctcgggtgagctattggcgtctgtatccccaaccccatcctatcttggtcagtttaccagcctctcaatttaggacactttgggcttttctgcctgtcgtcttcctcatttggctaagctgctcacatcaaattccttctaatctttgctgttccttagatccttccaagggcttgttgtttcttccatgcacgcctcccccataatctggtatcttcttaggggagtcttctgcatcggaagtgccctccgcgctgtcccagagaagcagaaagtgatctgaattagcccttgtaataggttccacccagagcttgaggaagtgaacttaagaacaaggattatccttctgtcccacccatcttcccttacacaacagcatgcttaagagtcagattacacaggcctcctctttctggccatgtgaccttagacagattacttaacctctctgttcctcgattcccttgtccatccatcaattgggcatactaatatccacctcttaaggtgattctgggaatgaaataaagtgctgtgcacagtgcctggcctatagtagtcaataaatgttagtattcttgtcatcataaccataattgttccactctgggttttagagaagcgggatggaggagaaacaggaaataggagagattttcagtccacagagtaaaagataaaaaaacttactgcagtcaatttcgtgtttctatcatagtattaataattgctttttttttttctaaatatctgcaacatacctaatgtctgttatctcattttctcttttccgctacatagttcttttggctgttttatagagaaagaagctggactcagagatagagccttcctaaggttacacagtcgataggaagcagagctgggatttaaaccctggtctgtgtaaaatcagagctggcattttatttttattttttcctctacgagaggctgcctctctctttcccctgctgtcagaaatgttattcatagatttctggatctgaccttagaagtcgtctagtccaaattcccgctcagcgcatcagtcccctcccagctcaccaggcactccctcattcggcttctccttgaagacattcattcggcaagagggagctttgatgtgcatactcttggccagcttgtattattagaaagctgttaggtcatgaggcacacttgcccctcctgttgccatgccacacttaggagacgttgccttggtgccaggagaaattgtcggtccatgggttgctgcccacttggcttcctgagcggtatctggggaactggaaatggtgagaggcagcctgcaccaggctcagagctgggcaggaccaggctgtcaggtgccatcattggccagaaaagaattgcagcctctggggcaacttggtgttaggcagtattatgatcaagagatgcagtggaaattccccagctaccactctccattcttcatgggagcaaattcctctccatccttctcatttctttcctgattggcagatgctcccccacttcctctgcagccagaagtaaatgccttctggcacccagcatctcttaaattacatcactgccaccaccatcatcatcgccatcattgccatcactatggcaactctatttattcacctcctcttgccatgccctagccaccatgcagagcactttatgtgtataactcattacttgtcgcaggaatcctgtgactagtcatgagcatctcccacagtatggagaaggaagctggagcacagagaggtgaaatgacctgcccaaggtcacacagcaagcaagtggcagagccagaatttgtccctaagactgtttgagcccaaagccagcaggctaaactgccttttaaagttttgttttgttttgttttgttttttgtttttttgtggttttgagatggagtctcgctctgttacccaagctggagtgcagtggcgcatctcggctcactgaagcctctgcctcctgggttcagtgattttcctgcctcagcttcccaagtagctgggattatgggtgcccgccaccacacgcggctaatttttgtatttttagtacagacggggtttcgccatgttggcaggctggtcttgaactcccaacttcaggtcatccacccgcctcggcctcccaaagtgctgggatgacaggcatgagccaccacgcccggcccgcctcttggagttctgtgccacctgctacctccctgccttcctgggttatgctatctctgagccaagtgcagaagattcagccagaaacaaaaatgctgactctctgcagacatctcctgagactggttcctggggttcggccagtcactgttatctcaggcatgctttgatccactctcccagatgggaaggtctctcttgttctgcctcgctctagtcttgcctcgctctagtctaggtcccagaagtctgagtgagtgaagccgaggctctgaatcacaactctttgggatatcaaaccaggaggggctcttggcctgtctgacatccctcaagttttgggatcacctaaaacagacatttattgcactcatcaaacttgaccctgggactgagttccttcacctccagcctgagtagctgcttcctctttgaggaaccggaatactgcaccaccctctctaggcctggaaggggcttaggaagttggaagggagtctcggtctgtagtcccacagggctttggggagaggaagcaggagaggacacggtgggcagggggttgttctgagtctcaacctggaaggacaggctgcccctgggtcttgggatgttctcctaagcagggccttctttgccctggaggaatctgactgcaagtagaatgcagtaggatggaaggatagggtgcgcagacctgcacttctcagacaaagagccctcagggtttcagctcctgtcgctccttgggaaggtcctactctagctaaatccccccacattgaaggaaggtatgtaagctccaggccgaaggcagagtgcaggccgaaggcagagtgcaggccgaaggcagagtgcaggagctggattctgtagaggcactgggcatcccgggaggccggggagaactgaatgttgtgtctggaagctgctgttgtcctaaggggaaggtctgtgggcagtgcggactttttatagccgcatgggaaccttcagggcggaggatcggctggtcagggcctgggagcacagctatattaggtaagcagagaagggccctgccttagcctctagaggtccggcactctgggccaggcagggagccagggaaggcgggagggaggaaaaggagaactggtggatggcagagagtgtctagtcttgaaatcacaaactgggtggaatcctacctacagatgtgccttgtgtggcccacccggtgctttaaatcagatctggttacactgggctggagttaagtagtgctacctcttcagaggggtcaccatctcaggctaggtgcggtggctcacgcctgtaatcccagcactttgggaggctgaggcaggaggatcacctgagatcaggagttcgagaccaccctggccaacatggtgaaaccccatctctgctgaaaatacggaaaaaaaaattagccagtgtggtggtgggtgcctgtaaaccaagctactcaggaggctgaggcaggagaatcacttgaatccgggagtcagaggttgcagtgagccaagatcacgccactgcactccagcctgggcgacagagtgcactagccacacacaaaaaaggagggggcatgtttccactttgccccagtccccacctctcacaccctgcctgcttcgtttatgtcagcaatggcacctgcatgtgcaacctctggtctggcagaccagccaagcctggtctccatgctgccagctccgattgccctcactgccttccagcggggatctggctggggtaggacaagtctgtttgggagctgggaggaatgacttagccctggagattgactgaattgggaggttgggagcattttgggaaaggatgttgtctcattaggctctgagtgaacacttcccattggtgagaatagaagccccccgctgcccctgtctcttcatgcacttgggtgtgtgattctgtgcatatgtatgtgccagtgcgtgcgtgtgtgtgtgtgtgtgtgcgcatgtgccacacagagggcatcacattcagctctccccggaaccaccatttccgtcaaggattggagactctgtctgttggaccaatttgatgcctgtgcacgctcagggctctctgaaccccgctccttgactctcagggtcccctcttgcggaaagcccctcccgggaccaggagccaggctgggcagggaggtgacaccctgcctctcttttgcatttgcttggtgctggctgaagatgtgccaggaggaacagaccagctacatggtggtgcagacgagcgaggaggggctggcggctgacgccgagctcccgggaccgctcctgatgctggcccagaactgcgcagtcatgcacaacctgctgggccctgcctgcattttcctgcgcaagggcttcgctgagaacaggcagcctgtacgtaagttggcccagtggagcccgctgaactcggcttcacagggcgtgaggaggtgctgggatgaagaaggggtctatacagagctcacacccccaacttatgaatctgatccccaaagttttccactcatggctacaaagtgctggtgagtccatatccaccagcaaaataatgatgatgatgataataataataataatatcagatacattgttttgagcacttactaggtgagcactgtgcctagtgtgttggcggattgcctcatttaagcctcagagcagctctaagaggtaggtgcttttatcatccccattttacagatgagaaaactgacttgggctgggcgcagcggctcacgcctgtaatcccagcactttgggaggccgaggtaggtggatcacttgaggtcaggagtttgagaccaccctggccaacatggtgaaaccccatctctactaaaatacaaaaattagctgggcatggtggcgggtgcctgtaatcccagctactcaagaggctgaggcaggagaatcgcttgaacccaggaggcagaggttgcagtgagccaaggtcgcgccatgacactccagcctgggtgacagagtaagactccaactcaaaaaagaaagaaagaaagaaaactggagtgcagaggtcacatgctcgaggtaacagcttgttggtggtagaggtaggattcacacttggatagcctgactcaagagcctcttgtgctcctaatgacaactctgtatacgtggcactgtccggtagaactttctacagtgatggaaatattctaaattccgtgctgtccgatacagtagccactagccacatgtggctattgaccacttgaaatgtggctagtgcaactaaggaactgaattatggattttatgttattcttactcaaatttacatagccacatgtggctagcggctagtgaattggccagctttctacaagtagctaaatagttcaaagagaggagaggactaatgaggatgttatagaggtaaacatttgtaggttgcatttattgaatgccacatgctaaacactttaatatcttgtctcactgaatgcacgctaaggccctgtgaggtgggtactggtattaacccattttacagatgaggagactgtggctcaaacagcagagtgacctgcctgaggaagtagatctgagcttcatactcaggtctgtctgcctctagagtccaagtgcgtctccccagccacatgtattggggagaaaggcgtgttcctgcaccccattccacctgaccctgagttgctgcacgtgatcttcctggcacattagtgggcatccctggctctactccagggcagagaacacacatagctactgctgtgcatggggtgtgtgatccaaggaccagccatcagtgctcagcagaccagctctggtggcgggcacactccgtgaaggggcacctggctttgctgcccccggggcttcgggtgtacaggaggaacggaaggggctgccatggggtcagcaatgcctgttcctcccgagtcctgcagaactgggccttggagaagtgggaggctgcttaaggcctgatgcgtgggaaaggatttattgggtctcagtagctggtcctagggcgtgtgctctgcatgtatgtgtacacacgtgtgcttactcactcgctttcacagactgctggtatgacccattgcacaaaacatcctttttggtcacccaaaaacatctacgaacatatgggtttgtgttggaatggctgtgacctacccttaagccaggcaccatcaccagctttttttttttttttttttttgagacagagtctcactctcttgtccaggtggaagtgcagtggtgcaatcttggatcactgcaatctctgcctcccaggctcaagtgattctcctgcctcagcctcccgagtagctgggactacaggcgtgaaccaccatgcttggctaactaaaacaaggttttttggtagagacgaggtctcactatatcgcccaggctggtctcgaactcctggcttcaagtgatcccctcgccttggcctcgtaaagtgctaggattacaggcgtggaccaccgtgcctggcccatagcgagctttttaggtgaacgtccatgcagtcatctcagagacacgcctccctatgggtgactcctacccccagcctggcggagctgggagcttgcagcctgctccctccaagctcacacacactctcaacgctgtcctgccacacagagctacctctgagctcttggtcctatgcacctggttgtcccatgagatgtgactcagcagcccttccctttctagatgatctgcagattttctggtgttgtcgtcttttgtcctggggccagtttggagtggctgtctctactcatcctggccccgttggctggaacggcctgcatgcacagtggaggtgccacacgctcactgtggcatgcctgcgtgtctgtgttcgtgggaggtatggccatacctgtgtgagcctcttcaggacgggcacacctgcctggtgtcctccctgcccaaaggcaaagagctgcaacatgcgggaggctggacgctgaaggccacttttggagtctactaaccaggtccagctgggcacctgtatccatttcatgccagtctatctccctcctgggcaggcccagggcaactggcagctcaccaacctgagcttcctccaggcctgctccttggagatgtctctgccatctgttctgacgcctagattcagggttgccttgattgcccaggagacctgggcactgcttgaggctggagacatgtgctttttggaccctggctccagccagaagcactggtggcccccggggtcctatgtggtgtcctgtgatcccatgacaggggaacgtacagggatgggggtcaaattggagaaggtggggcagtgcccgcgaagcagtcacagccccattctgttgccacgtctcctcctgactcctccctgtcctcctaccctcgcttcaggatggccctgccttccctcccctcctgcgcctcttctgttgtcttgcagcctctgtcgccctgctcttcctgtttcattgggtggtgctctcttttccctgttgtgacctccctggactctgttttatttgcaggtttttgccaccaggcaagctctgttctctgactcattctttttttgttttttttttttgagacagggtctcactctgttgtccagggtgacagagtgcaatggcaccatcatagctcactacagcctcaaactcctgctgacccattcttgtatctggaacaaggggctggaggcacagaggttctgtgcccaggctggtggggctggtggcttcttgggcatctcctgttaggggcccaggagcttctatgtctaagggagatgtggggctttcttctcccctcaaggacctgatccaggcacacctgtgctgcatcctcgtcacctcctacccagtgcctgctgccacgtggatggcccccaggttagatattttgtgacttccaggtcccttgtcgcggctaataggacatgttcttttgtttcaggatagatcactgcgaccagaggaaattgaaggtaaaacttggccccttgggggaaaggactgcctagccctctaggaaggtgtgggaagggaggttgatgggaagagaggcccctggaaatggggcctggtgcaacgcggggtatcttctgtgaaaccagctgctgaaggtgtgcacaggaggcaagagaaatgccccagcatcctgggaagctcctgggcctctctttccatgccggtgggcctttgggctgcctttgcccacagaggctctgcgggtcctacccctgaccacatccacctttgctcacttccccagagctccgagaggccttcagagaattcgacaaggacaaggatggctacatcaactgccgggatctgggcaactgcatgcgcaccatgggctacatgcccaccgagatggagctcatcgaactgtcccagcagatcaacatgaaccgtgagtccctctaccaggcatctgcgtcccttcggtcctcacccttgccgtcctctgcagtcagacaggactggcttcaaattctgcatccacctcttaccagctctgtgatctggggccaaccacttaccctctctgagcctcagtttcctcacctgtaaaatgagggccgaattggaggagtggagcccagaaagtagattagggaatatctgtaaaacagcccaataactggctcacaggaagaactgaacagagggctcttgttattattaagtttgtctctatctgatgagcaggtcaaggaggggttgtccattctgtcagttgtctagttggagacagggaatgggtatgtcggggatgacctagccctttcctccttttccagtgggtggccatgtagattttgatgacttcgtggagctaatggggcctaaactcctggcagagacagcagatatgattggtgtaaaggaactgcgagatgctttccgagaggtaacggacagaggcaggcaggcatggggcggctattggaatcctatctgcagtataaatacttcaaaagaagcctgagcctcaagtcccagatcaggggagggagcttggacagagaaaggtctctggtaaaggggggcaatgacactggagaaggagctcaactttgggatctgctgctgccaatcgccatgctggggcgacctctccttccttcctgccttctctagtttgacaccaatggtgatggggaaataagcaccagtgagctgcgagaggctatgaggaagctcctgggtcatcaggtgggacaccgagacatagaggaaattatccgagatgtggacctcaatggggatggacgagtggactttgaaggtaggtggggcttgaaagtgggagagaagcaagccagcagtggccatccatggagccctccaattgtgtatccatcatgcaaccatcaatccgccctaattttccaacccccagccctttcatcctcttatccctccgtccatgcccccgtctaatccatctcccatcccttccccatgcatctattcatgcatctgtccatccatctatccatcctctacctttccattcatctgtccatttatccatccattcatctacctatctatccatctgtccaccatccatccatccatccatttatctacccatctatccatccatccatcctctacctatccatccatctgtccatttatccattcatccattcatctacctatctatctatctgtccatcatccatccatccatttatccatccatccatccgtccatccattcgtctacatatctatccatccatccatccatccatccacctatccatccatctgtccatccattcatctacctattcatctatctgtccatctttccatatctatctctccatttttcatctgtttatctccttatctgtccagatgcctatttatccattcctccatctctaagcaatcattcctatagcaatttatccatgcatttatctgtccattcgtgcatctattcattcttctctacattcacccatgaatctatctatgtattcatctactcatatagatctctctatgtgttcacacttctatacttccattcacacattcatgtctcttcgtctgcatatacttctacccatacttgcattgatctatccatctatctgttcagtcatttcctcatctatatccatctactcatccattcacccatccctgtgtccatctgcacccatccttctctatccatttatctgtctacccacgcatgcatccatccacggtaggtgttttctgaacattacattcctcaactggacactcaggctccctaagatctgaccacagctcacctccccagccacaactcaacagtccttcattcacactccaccaaaatacttgtgatcagtgaagctgctagggtccctcttgaatacactgatctttttgccaggagggcttttttgttgttgtttgtttgtttgtttgtttgagacagagtctcactctgttgcccaggctggagtgtggtggcaggatcttggctcactgcaaactgcgcctcccagattcaagtgattctcctgcctcagcttcccaagtagctgggattacaggcgcccaccaccatgcccggctaatttttgtattttcagttgagacggggtttcaccatgttgaccaggctagtcttgaactcctgacctcaagtgatccacccgcctcggcctcccaaagtgctgggattacaggcgtgagccactgtgcctggccaccaggagggcttttatcctgttcttttttttttttttttgagacaaagtctcgctcttgtactccaggctggagtgcaatggcacgatctcagctcactgcaacctctgcctcctggattcaagcgattctcctgcctcagcctcccgaatagctgggattacaggcgcctaccaccacgtccagctagtttttgtattttcagtagagatggggtttcactatgttggccaggctggtctggaactcctgaactcaggtgatccacccgccttggcctcccaaagtgctgggattataggtgtgagccactgcatctggcctatcctgttttttacttgggctaagttctgttagcccaagggacattcttcatgactcgacagtgggactccttcttctagcacccttccctggttcctcaaactgaacttcctcttttctgggttttcacagcacgtcaggctcacctgttcttcacactgtcccctaactgctggttagagttgtcttcccagttgactctgaactttgaaagaagaaccctattttcttaatcactgcatttcttgcataacacagctagtgctcagtgaaaggttatttatttatttatttatttatttattttaagacagggtcttgctctgtcgcccaggctggagtgcagtggcgtaatctcggctcactgcaacctccgcctcccgggttcaagtgattcttgtggctcagcctcccgagtagctgggactataggggtgcaccaccatgcctggctaattttttgtatttttagtagagacagggtttcaccatgttggccaggctggtctcgaactcctggcctcaagtgatccacccgccttagcctcccaaagtgctgggattacagtcgtgagccaccgcgcccagcctcaaagactttctttttaaagaatcaatagtaatcataatagttataatttactgtacacttatgtgcagtcattgtactaagtagctttacacatattcttacatttaattctcagaatgactctatggattgcattattataacctcatgttacagatgaggaaactgaggctcagagaagtaatataactagctcaagattgcctgcctactaagaggcagagctggggcacagccccaggcctgaaatcacagcagaatgcagtcttgtgcatgacgccatgtgaggcactacgggatacagggaaagggtaaaatgttgactctgcacaccaggaacttgcattctgagcagaaagacaagataagcatgtgccagagaccgtgagtgtccagaacacaaaggctgggaggttttctctcaggagcagttggccttcaaggccagggagcgtggatagttggagagaaggctttgttatcaccagatctggaaatctcaggtctccctgtatccaggtagcgcccaccacagatgacagccttgctcttgaaagcctggcatcccccattcatcctacgaggatgcattgtacatctgctgtgtgctaagatctggtctctgcctcgaagagctcaaaaccagcaagaaaaccagagaaaacaatagcataatccatgtgtgctgggggaagcacagggggctgctatagagggggcgcctgtgccaagttgcagggagggattagggaagacttcctggaggaggttataaataattagagccccccaaaatgggaagagccaccaggtgagagggaagggcaggtatttacccaaatgagttgaaaacctatgtccacacaaatctgtacatagatgcttatagcagctttattcataattgtccaaacttggaaacaaccaaggtgtcctttcagtaagtgatggataaataaacgggggcacatccagacaatgggatattgctcagtgctaaaaagagatgagctaggccaggcgctgtggctcatgcctgtaatcccagcactatggtaggccgaggtgggcagatcacttgatgtcaggagtttgagaccagcctgatcaacatggtgaaaccctgtctctattaaaaatacaaaaaaaattagctgggtgtggtggcgcacacctgtaatcccagcacttgggaggctgagacacagaatcgcttgaacccgggaggcggaggttgtagtgagctgagatggtactgctgcactccagcctgggcaacagagcaagactctgtctcaaaaagaaaaaaaaaaaagagagagagagagatgagctatctagtcatgaaaagacatggtgaagaggggacacacatgcatattactaagtgaaaagccaatctgaaaacactgcataccctatgatttcatctatatgacattctggaaaaggcaaaactatggagacagtaaaaagatcagtgggtgcaaggggttggggggagggagggatgaataggcagagaagagaagatttttagggcagtgaaactattctgtatgaggccaggtacagtggcacatgcctgtaatcctagtattttgggaggctgaggcaggaggatcacttgaggtcaggagttcgagaccagcctgggcaacatggtgaaaccccgtctctactaaaaatacaaaaaaaattagccaggcttggtggcgcatgcctgtagtcccagctacctggagagctgaggtgggaggatcgcttgagcccgggaggtcaaggctgcagtgagccgagattgtgccactgtactccagcctgggtgacaaagtgagaccctgtctcaaaaataaataaataaataaaaataaacgattctgtatgatacaacagcagaggatgcatgtcattatacatttgtctgaacccatagaatgtacatcgccaacaatgaaccctgatgtaaactgtggtctccaggtgataacgatgtgtcggtgtcggtttctcacttacaacaaatgcaccactctgtgtgggatgtggttggtgtgggaggctatgcgtatgcggggacaggggttgcagaaaaaaatctccgtactttctaatccgttttgccataaacctaaaattgcccttaaaaaaagagagagagaggcccggcgcggtggctcacgcctgtaatcccagcactttgggaagccgaggtgggcggatcacgaggtcaggagatcgagaccatcctggctaacatggtgaaaccccatctctataaaaatacaaaaaattagctggacgtcgtggcgggctcctggtcccagctacttgggaggctgaggcaggagaatggcgtgaacccgggaggcagagcttgcagtgagccaagatcacgccactgcactccagcctaggtgacagagcgagactctgtctcaaaaaaaaaaaaaagaaaagagagagagagaaggggctgggcacggtggccacacctgtaatcccagcactttgggaggccaaggcaggaggattgctagagcccaggagtttgaccttacagtgagctataatcatgccactgcacttcagcgtgggcgacagagggagactctgtctctacattaaaaaaaaaaaaaaaaaaggaagaagaagaagggagggggtacaggttgctttcagaaaagctgagaggagaccagcctggccaacatggtgaaaccccatctctactaaaagtacaaaaattagccaagcgtggtagtgcacacctgtaatcccagctactagggaggctgaggcaggagaatcgcttgaacccaggaggtggaggcttcagtgagctgagatcgcatcaccgcactccagcctgggtgacagagcaagactccatctcaaaaaaaaaaaaaaaaaaaaaatgctgagaggtgagagagagagtgcgccagctgcacttgaggggctgaaaagatctgtgtagttggagcacagaggttgggagttagcctgagagatatggctggagatgtcagctggcgccagatcagggagggccatgaggctgtgtcaggatattggagatttttccagtggagagctgtgggaggtttacgcagcggtcagatccgcagattagaacactctcgctggctgctgtgtccatggattggagagggcggaatggatgggggaccagcacagagttggggcagtggcaacagggtggggtctgaaggcagcaacctggggaggcctctggctgctgcttgctccccagctgctcctctacccttctagagtttgtccggatgatgtcccgctgaggccgcgagggcccctccaggactgccaagctcccaaaggcggggctaagaggagctagagcttgcctcacccgctgtagccgccgagagcccaggatgtactggcggatggggcctgcctgcaccccggggaggcgcccaccccggacccccacccctccgcactgtgaaagactaactcctgcaactggaaagcgggggcgcccgccgacgaggaggccaccgtgccaagccggcagaggtcatgccaggcgccaagggccatgtgcccagctgctgctggctgggtgggccagggagcccgccagcagaccccacacagcatgtccgccccagggcaaagcctcccaccttcgctctgcgcccgtcccagctcgcctcagccctgttatctcagaaccaataaaaatatttccaagagcaagacagccgtgatggtctttcctccttgggcctggttagatgaccctcacatttcctgagtaccaactgcatgcccagaacctgctgatcatttttgcattcagcattttttgtttgtttatttatttatttcgagaagaagtcaaatgagggttcttttgaccttcctgtgttttctgttttgagacagggtctagctccgtcacccaggctggagtgcagtggcgtgatctcagctcactgtaacctctgcttcccaggttcaagcgattctcctgcctcagcctcccgagtagctgggattacaggcgcccgccaccacgcctggctaatttttgtatttttagtagagatggggtttcacatgttgggcaggctggtctcaaactcctgatctcaagggatctgcctgccttggcctcccaaagggctgggattccaggcgtgagtctccatgcctggccaacatgcatttattgagtacctattatgtactcagtgacttccattctcatccgtgggccagaacctgggactgctaagggagactgaagaatgtagttagttatttagctgggtactcagcttccccaaacaaaatcaggttctataagaagagaagcatccagcagagtctgtatcacttctgactttctggaacttttatactggttggagagacaggcatgagagaaacacatcatataggattacaaattgtgatactgctattgaggaaaaatatagggaccttcggcaggatatactaaggaggcctggcctcctgtagggaggtcagaaaaggcttgcccagtgaagtgatgtcaagggttttgctctggaggaagtcccagtgtgtgcggacagacagatatagacacagctgccactggctgcgcgccgtggctcatgcctgtaatcccagcactctggggaggctgaggcgggaggatcacctgagttcaggagttcaagactaacctgaccaacgtggcctgtctctacaaaaatagaaaaattagccgggcgtggtggcatgcacctagagtcccagcttcaggagaatcgcttgaacccaggaggtggaggctgcagtgggccgagatcatgccactgggtgacggagcgagactccgtctaaaaaaagaaagaaatagctgccatcctctctgctgagtgggaggaagatgtgtagccaataggcccagggtttgcttgctgtgtgacttagggccagtcgcgtcccctttctgaagctcagtttcttcctgtgtaatgtggggatgataaaggatggggtcagtgcatagcaagtgccctcagggcattgcaccacacggcacaccccagggactgctattcagactgcagtggaatcatgcaattgaaaagacccattgtaattcgtttctataagtgaagtcttaaagcagcccaaaggagaaatctgtgggtagaagttgtcgagtcttagacaggcttggagcgtacttgggcaggtgtgtggggtggccggtgtacctcaagccattggttcccaaatcttagcatacagcagaattgcctggagcatttgtgaagcccagatctgggccacccccgcagtgattctgatcccatgtctggggcgcagtccatgaatttgcatctcttacaagttcccagaggatgctgatgctgccagtccatggacaacaacctgaatagcactgctgtaaaccccagacacaagggaggctggtgtgcctccaggcagccaggggaggctgcggggttgatggctgggggtgggaggtgggcagagcatccgctgcccgctgtgctgccgcagagggaggatccttattctcagacctggcagggaatgtgcaggatcgtgggccccagccagaggcccgggtaatcctcacgttcccgaggtcagtggggctgggagctccaaattcactctaataatccaattctgagactaagcccttggctctgtgccctgctaggcaagcctgcagccctgcctgcctctgtactagcttggctccgcccagagactccagagtttcactgtttcagaaacacagtggccttggagggcaacctgcgggaagagggcttctgtagacatctctatcggctggcagggtgagcccccaggaacaccactcaggatagacttagggataaactaggacttctttgtccccagtgtgtggctgcctaaaatcaaagaagtggcaagcctggccaacatggtgaaaccccgtctgtactaaaaatacaaaaattagccaggcgtagtggggcatgactgtaatctcagctattagggagtctgaggcaagagaattgcttgaacacgagaggcggaggttgcagtgagccgagatcacgccacttcaccccagcctgggtgacacagtgagactctgtctgaaaaaaaaaaaaagaatcatagatatgccagttgtgataaaggaaatggagaatgtagtcaggctactgttcagaggccccttaatgctcagggtaaggggaggcccagggcagtcctcctgcctcctcccctgctgaagctaggactcctccccagtaatttgtctttttgttggtttgttcattttaaaattatttttatttgcttttgttttttgttttggctcccgccaggaaacgtttttttttctttctttctttgttttagagacagggtctcactctggcacccaggctggagtgcagtggtgggatcatagctcactgcagtcttgaactcttgggctcaagcgatcctcctgcctcagcctcctgcataactaggactacagatgcacaccagctgatttttaaattttttttgtagagacagggtctcaatctgttgtccaggctgtcttgaactcctggcctcaagggatccttccacctcagcttcccaaagtgctgggattacaggcgtgagccacagtgcccagcaacttgtcttatattttggggttcctagtatgactgtttgaagaaaggggtctgagacttttcaaggactgagatgcactttcctagccaagagttctttctgcaacctgcaccactaccttccctgctggggagctctgggtgtgtcatcttagaaaagctctttgtctaaggccgagcgaggtggctcatacctgtaatcccagcactttgggaggccgagatgggtggatcgcttgaggtcaggagtctgagaccagcctgaccaacatggtgaaactccgtctctactaaaaatacaaaaattagccagatgtggcagttcatgcctgtaatcccagctatacgggaggctgaaggacgagaatcacttgaacccgggaggcagaggttgcagtgagcggagattgcaccgctgcactcagcctgggtgacagagtgagacttttgtctcgaaaaccaaaaagaaaagctctttgtctgaaagctcttttattgcacctggatttgcctcctgctgactcataaaggccaatttgtctgctcattcatgcacacatgcacttgatgtttattgagctcctactatgtgccaggccccatgcaagacttcctgtcctcaaggagttcagactctagcagggcaaacagatcagaaaccagagaaatgtaatctagtggcctaagtgctacatattagtagtacccactaggttagcctagagccctggaggtacataaaaggcacccgattcaatctggtgggtgggtgtggggaggaatggacagatctactaggacctcaaggatcagcagtgcttagttaggagaggtgggcatggtggctcatgcctgcaatcccagcacttcgggaggccaaggctggcggatcacttgaggtcaggagttcgagaccagcctggccaaatggtgaaacaccgtctctactaaaaatacaaaaattagccaggcatggtggtgcgcgcctgcaatcccagctactcgggaggctgagcaggagaatcacttgggaggcagaggctgcagtgagccgagattgcgccactgcactccagcctgggcaacagagcaagaaatagcaaccactatttctggtctgggaatagcatatgcaaaggccccgaggtaagggagagtgtggcccttttgggaaactaagtggaattttgtctaactgatgtactgggctggagagaggagcagagagaggtgacgctcaacagggaggcaggaccccatccctccgcagaccttggagtgtggagaggctcagatgggaactctgaggggctgccttctggcattagccaggcccacggccacagaaacgctggtgctatgaagggctcacctttggggacaaatctgtccagaagatagaagaaaacccaggcagctgagggtagccaggaggcgtccccatagcagtgtggttaaaagcatgagttctgatcaaaaagcagagagctaggctgggtgcagtggattgcacctgtaatcccagtgctttgggaggctgaggtgggaggatcacttgaagccaggggttcaagaccaggttgggcaacatagtgagacctcatctccacaaaaaattttaaaaattagccagatgtggttgcatgtacctgtagtcccagctacttgggatgctgaggtgggagaattgcttgagcccaggagttcgagtctgcagtgagctatgatcacgccattgtattccagcctggacaaccgagcgagaccccatctcaaagacagacaaacaaaaataccagaaagccagacattagataccactgatgagagaacacaacaccagcccctggggttgctgaagggatcaaatctgaatctgatcatgccttgagatccagccagcaatttgcaaaaaatccaggggcagagaaacatgttgagctgtaccatgaggaggacatcagtttttgacatccacaaactccaaactgggaaaaacaatacaggtcaaatggctcatattcttcaaagcaaattacaagaaaaagaaagagatgggccgggcatggtggctcacgcctgtaatcctagcactttgggaggccgaagtgggcggatcacctgaggtcgggagttcgggaccagcctgaccaacatggagaaaccctgtctctactaaaaatacaaaattagccaggcgtggtagcacaggcctgtaatcccagctacttggaaggctgaggcaggagaattgcttgaacccaggaggcggaggctgcagtgagtcaagatagcgccattgcactccaaaaaaaaaaaaaaaaaagtgaacttatagatcaaaagagactaaaaagtatcgtgttttaaaaagtgggcctgactaaatgatagtatgtagggatgtgcacttgggtgaaaaaaaaaaaaaaaaccacaaagaaacccaagggaggctgggcgcagtggctcacgtctgtcatcccagtactttgggaggctgaggtgggtggatcacttgaggtcatgagttcaagaccagcctggccaacatggcgaaaacccgtctctactaaaaacacaaaaactagccaggcatggtggtgtgcgcctgcaatctcagctactcaggaggctgaggaacgagaatagcttgaacctcggaggcagaagttacagtgatccgagatcgtgccactgcactccagcctgggcgatacagcaagattccattgcaaaaaagaaaaaaagaaaaagatttttaaaaagaaacccaagggaattattactataaaagtcaggaaagtggttgcttttagagagaaggagggaaaaagctatgattgcaaaggggcacagagaggagcttctggggtgtctgacaaagttctatttcttaacaagtaaggtgattacaagagtgcttgcttcatgataattcaccaagttgtacaattgttctgtgtggttttctgtgtcttattttacaataaaaaaaatatctaaaaaggcctggcgtggtggctcacacctgtaatcccagcgctttgggaggctgaggtgggaagatcacgaggtcaggagatcgagaccatcctggctaacatggtgaaaccccgtctctactaaaaatacaaaaaattagccgggcatggtggcaggcacctgcagtcctagctacgtgggaggctgaggcaggagaatcgcttgaacccgggaggcggagtttacagtgagccgagatcgtgccactcactgcactccagcctgggtgacagggcgagactccatctcaaaaaaaagaaaaaaaagtctaaaaaaaaccaagtgcaggttcaggagccagctatctggtttccaatctgagctctactacttatcagccgcgtcatcttgggtaggttataagactcttgaggtctcagcttcctcatctgtaaaatggagatgatgttatagggaggcaggaattctactactaaaccaccagtgcttcctgaccagggggatgatgtgatagggttgttctgaagatgaaacaaattattctatgtgaagcctttggaatagtgcctggcacgcagtaagcatcgtaaatgtttttgctgcctggtgtggtggctcatgcctgtaattccagcactttggaaggccaaagtgagaggatcgtttgagcccaggagtttgagaccagcctgggcaacacagcaagaccccatctctattttaaaaaattaaaaattagccagggatggtggtgggaatctgtggtcccagctactcaggaggctgaggcacagggatcacttgagcccaagaagttgaggctgcagtgaaccatgttcgtgccactgcactccaacctggatgatggaacgaggccatatctcaaaacaaaaaattaaatagaagtattcactatcattcttgtcggttgttattctccagttgcctaccactctctcccatgtgtcatcacgcctcagcgattccttctcaagaaaaggagaagagaaagttgggcatggcattcttgaatggctatggcagaacctcttattgacagtgacaagataatcacagcttaaatctgggatctggccctagaccagggaggggctgtctgcaaggcagccctgatcctgctgtgcctgtagcaggaactgcagggctggagtatcctttcatctccctggaggtgcctgctgcttgcttctgcactccagctaatggttgtctttcctacagaggggacaggggtctgagtatcatgattgagggatgagctctggtgttaacaagcacatgttttttggcagggcggggtagccatgcctgtaatctcagcactttgggaggccaaggcgggtggatcacctgaggtcaggagttcagaccagcctggccaacatggtgaaaccccgtctctactaaaaatacaacaaaaattagctgggcatggtggtgcgcacctgcagtcccagctactggggaggctgaggcaggagaatcgcttgaacccgggaggcagaggttgcagtgagccaagatcccgccactgtgctccagcctggacaacagagagagactctctctgccaacacccacctccgccaaaaaaaaaaaacaccaaaaataccaagcatctggtttctgaccccagctctgccacttaagggagttaagggatgtacatgtataggatgtatgtgtgaagggagtccctcactgtttatttttatttttagtttttttaaacattagttttttgttttttgaggcaaaatctcactctgtcactcctgctggagtgcagtggtgtgatctcggctcactgcagcctctgcttcctgggttcaagtgattctcccacctcagcctcccaagtagctgggattacaggtgtgcaccgccacgcccagctaaattctgtatttttagtagagatgaggttttaccctattagccaggctggactcaaactcctgacctcaattgatccacccgcctcgacctcccaaagtggtgggattacaggcgtatgccactgcccccggccattatctgttattaatgataataaattatctaccctgtggggtggatgtgaagaaattaacccttgcataatgcttagtggagggcctggctcagggccctcacacatgctgttccctctgcctggagtgcttttccttgtactctttgaatagctagatccttctcatttctggagttgaacttaaatgtctttttcttgacttatcttttgaaggaaggacagaagtcaccaccacagctcatttgtattcttcagagcacacatgaaatctctggcctgacatatttattgtacgacaatatgtttgtatctgcttattgtttgaggctccctccccctcactagaatgtaagctccatgttggtagagaccatttctaccttgtccagcatagtgtcttcagtgtctagtaggcacttagcaatgatttattgtatcaggcaggcacagtggctcacacctgtaatcccggcactttgggagaccaaggcaggctgatcacctgaggtcaggagttcgagaccagcctggccaaaatgacgaaaccccatctctactaaaaatacaaaatttagctgggcgtggtggtgggcacctgtaattccagctacttgggaggctgaggcaggggaatcgcttgaacctgggaggtggaggttgcagtgaactgagatcgaaccactgcactccagcctgcatgatgagagggagactccatctcaaaaaataaaaaacagccttgattcctagtctcatggagataatagtctagactctgctgtccaatatggtagccactagccatatgtgactatttaaatgaattaaaattaaacaaagaattagttccccagacataccagtcacatatcacctgttcaataggcacatgtggtgtggatagactaccttcccatcatggcagaatgctcttgtctggaggggcagctgacaagtaacctggccatttataatccaacgtgcaggtgtggctataggactcgttacctccccaatgtgtctggatctaggaaagaaactgaaaagaataaaacagctgctttctttcttcttcttctttttttttttgagacagagttttgctcttgttgcccaggctggagcatgatgatgtgatctcggctcatcacaacctccgcctcccgggttgaagcgattctcttgcctcagcctcctgagtagctgggattacaggcatgcgccaccacacccggctaattttgtatttttagtaaagatggggtctctccatgttggtcaggctggccttgaactcccgacttcaggtgatccgcctgcctcagcctcccaaagtgttgggattacaggcatcagccaccgcacccggtcagctttatttatttctgagtatgtgtactttagtcctttttattcaccatctcactctgtctttacacctcatttccaggtgaggaaacttaggttcagagaaggaatgtgacttgccaagcttacactgacagtggatagtaaagaccctcctggcattcctgactcaacaattgtgtccttaacacaatgtaaaaagtctgggagatgatgatataggcagctaacaagccgagtgcagtggtacacgtctgtaatcctagctacttgggatcagttaaggccaggagtttgagtgcagcctgggcaacatagtgagactctgtaagtctgtaaggcattctcttgaagtttgtggttttttttttttttttttcctgagatagagtctcactctgttgcccaggctggagtgcagtggcatgatctcagctcactgcaacctccgcctcccgggctcaagcgactctcctgcctcagcctcccaagtagctgggaccacaggcgcctgccaccatgcctggctaattttcgtatttttggtagagacaaagtttcaccatgttgaccaggctggtcttgaactcctgacctca

SEQ ID NO: 1700 - DNA, 1485 bp, Homo sapiens
agctgtgcggcaggcaccctggcttcgggaacccaaactagccagcttccctttctgggcctgctggcctaattcccagccgcagctgccattctgggcccccctccctgaggccatctccctgcagatttggcagcggggaaaggaggggccgagagaaggggagagaaccagagacaggactgagcgctaatctgatgtagatgatccggcagccttctccagcttggttcccctctgccatcagctctccaggtgactttccctgtgccctgcactctccccttctgctttcatctccttaagaaagtgcccagaaagttaaacccacacacaaacacacacacaatccacccaaaaaaaaaaaaatcggagagcaggagcaggcagacgagtaagagagcacgcgcgcaagagagggctcacatccgtcctggaggaagaacggcacagacggagggaggctggggttggcagagactgggacggaagtccctcagtcccccaggagcctccttcatggacccggggatcccaagaggggctgcctcaacttaggatgggcaactgtgtcaagtatccactgagaaatctctcaaggaaggatagatcactgcgaccagaggaaattgaagagctccgagaggccttcagagaattcgacaaggacaaggatggctacatcaactgccgggatctgggcaactgcatgcgcaccatgggctacatgcccaccgagatggagctcatcgaactgtcccagcagatcaacatgaacctgggtggccatgtagattttgatgacttcgtggagctaatggggcctaaactcctggcagagacagcagatatgattggtgtaaaggaactgcgagatgctttccgagagtttgacaccaatggtgatggggaaataagcaccagtgagctgcgagaggctatgaggaagctcctgggtcatcaggtgggacaccgagacatagaggaaattatccgagatgtggacctcaatggggatggacgagtggactttgaagagtttgtccggatgatgtcccgctgaggccgcgagggcccctccaggactgccaagctcccaaaggcggggctaagaggagctagagcttgcctcacccgctgtagccgccgagagcccaggatgtactggcggatggggcctgcctgcaccccggggaggcgcccaccccggacccccacccctccgcactgtgaaagactaactcctgcaactggaaagcgggggcgcccgccgacgaggaggccaccgtgccaagccggcagaggtcatgccaggcgccaagggccatgtgcccagctgctgctggctgggtgggccagggagcccgccagcagaccccacacagcatgtccgccccagggcaaagcctcccaccttcgctctgcgcccgtcccagctcgcctcagccctgttatctcagaaccaataaaaatatttccaagagc

SEQ ID NO: 1701 - protein, 167 aa, Homo sapiens
MGNCVKYPLRNLSRKDRSLRPEEIEELREAFREFDKDKDGYINCRDLGNCMRTMGYMPTEMELIELSQQINMNLGGHVDFDDFVELMGPKLLAETADMIGVKELRDAFREFDTNGDGEISTSELREAMRKLLGHQVGHRDIEEIIRDVDLNGDGRVDFEEFVRMMSR

SEQ ID NO: 1702 - DNA, 1787 bp, Homo sapiens
ctttggggcccattgccaagccccttccctcctcgtgctcccgctccgcgttgcagcgtccccttcgccgccaggggccgcccggaagcggggctcccccagggcggggcggggcaaggggcggggcgcggcggtacctgggccgccagggagccgggggtgggctctccggggacagccggcagcgcccccagatctgcaccgccagccgccgggagctccgggctccgggcgtagaggctgcgctgtcacatgggcggcggcgacggggccgcatttaagcggccgggggacggcgcccgcctccagcgcgtcctcgggcttggctcccgccgggagccccgttctctgcccgccgggggccccgcgccgcgccgcaccgcgccgcccccgccgggccatgcgagcgcgggccccgccgcgatgagctcgcacatcgccaaaagcgagtccaagacgtcgctgctgaaggcggcggcggcggcggcgagcgggggcagccgggctccccgccacggccctgcccgggacccggggctgcctagccgccggctacccggctcctgcccggcgacgccgcagtcgtccggggaccccagttcgcggaggcccctgtgccggccggcgccgcgagaggagggcgcgcgggggagccagcgtgtgctcccccaggcgcactgcaggccccgggaggcgctgccggccgcggcgtcccgaccttcgccgtcgtcgccgctgccgccggcccgcgggcgggatggggaggaacggggactgtccccggcgctcggcctccggggctctctgcgagcccggggccgcggggactccgttccagccgccgcgtccgaggcggacccgttcctccaccggctgcgccccatgctcagctccgcctttggccaggatagatcactgcgaccagaggaaattgaagagctccgagaggccttcagagaattcgacaaggacaaggatggctacatcaactgccgggatctgggcaactgcatgcgcaccatgggctacatgcccaccgagatggagctcatcgaactgtcccagcagatcaacatgaacctgggtggccatgtagattttgatgacttcgtggagctaatggggcctaaactcctggcagagacagcagatatgattggtgtaaaggaactgcgagatgctttccgagagtttgacaccaatggtgatggggaaataagcaccagtgagctgcgagaggctatgaggaagctcctgggtcatcaggtgggacaccgagacatagaggaaattatccgagatgtggacctcaatggggatggacgagtggactttgaagagtttgtccggatgatgtcccgctgaggccgcgagggcccctccaggactgccaagctcccaaaggcggggctaagaggagctagagcttgcctcacccgctgtagccgccgagagcccaggatgtactggcggatggggcctgcctgcaccccggggaggcgcccaccccggacccccacccctccgcactgtgaaagactaactcctgcaactggaaagcgggggcgcccgccgacgaggaggccaccgtgccaagccggcagaggtcatgccaggcgccaagggccatgtgcccagctgctgctggctgggtgggccagggagcccgccagcagaccccacacagcatgtccgccccagggcaaagcctcccaccttcgctctgcgcccgtcccagctcgcctcagccctgttatctcagaaccaataaaaatatttccaagagc

SEQ ID NO: 1703 - protein, 364 aa, Homo sapiens
MGGGDGAAFKRPGDGARLQRVLGLGSRREPRSLPAGGPAPRRTAPPPPGHASAGPAAMSSHIAKSESKTSLLKAAAAAASGGSRAPRHGPARDPGLPSRRLPGSCPATPQSSGDPSSRRPLCRPAPREEGRSQRVLPQAHCRPREALPAAASRPSPSSPLPPRRDGEERGLSPALGLRGSLRRRGDSVPAAASEADPFLHRLRPMLSSAFGQDRSLRPEEIEELREAFREFDKDKDGYINCRDLGNCMRTMGYMPTEMELIELSQQINMNLGGHVDFDDFVELMGPKLLAETADMIGVKELRDAFREFDTNGDGEISTSELREAMRKLLGHQVGHRDIEEIIRDVDLNGDGRVDFEEFVRMMSR

SEQ ID NO: 1704 - DNA, 2569 bp, Homo sapiens
ctttggggcccattgccaagccccttccctcctcgtgctcccgctccgcgttgcagcgtccccttcgccgccaggggccgcccggaagcggggctcccccagggcggggcggggcaaggggcggggcgcggcggtacctgggccgccagggagccgggggtgggctctccggggacagccggcagcgcccccagatctgcaccgccagccgccgggagctccgggctccgggcgtagaggctgcgctgtcacatgggcggcggcgacggggccgcatttaagcggccgggggacggcgcccgcctccagcgcgtcctcgggcttggctcccgccgggagccccgttctctgcccgccgggggccccgcgccgcgccgcaccgcgccgcccccgccgggccatgcgagcgcgggccccgccgcgatgagctcgcacatcgccaaaagcgagtccaagacgtcgctgctgaaggcggcggcggcggcggcgagcgggggcagccgggctccccgccacggccctgcccgggacccggggctgcctagccgccggctacccggctcctgcccggcgacgccgcagtcgtccggggaccccagttcgcggaggcccctgtgccggccggcgccgcgagaggagggcgcgcgggggagccagcgtgtgctcccccaggcgcactgcaggccccgggaggcgctgccggccgcggcgtcccgaccttcgccgtcgtcgccgctgccgccggcccgcgggcgggatggggaggaacggggactgtccccggcgctcggcctccggggctctctgcgagcccggggccgcggggactccgttccagccgccgcgtccgaggcggacccgttcctccaccggctgcgccccatgctcagctccgcctttggccagctgtgcggcaggcaccctggcttcgggaacccaaactagccagcttccctttctgggcctgctggcctaattcccagccgcagctgccattctgggcccccctccctgaggccatctccctgcagatttggcagcggggaaaggaggggccgagagaaggggagagaaccagagacaggactgagcgctaatctgatgtagatgatccggcagccttctccagcttggttcccctctgccatcagctctccaggtgactttccctgtgccctgcactctccccttctgctttcatctccttaagaaagtgcccagaaagttaaacccacacacaaacacacacacaatccacccaaaaaaaaaaaaatcggagagcaggagcaggcagacgagtaagagagcacgcgcgcaagagagggctcacatccgtcctggaggaagaacggcacagacggagggaggctggggttggcagagactgggacggaagtccctcagtcccccaggagcctccttcatggacccggggatcccaagaggggctgcctcaacttaggatgggcaactgtgtcaagtatccactgagaaatctctcaaggaagatgtgccaggaggaacagaccagctacatggtggtgcagacgagcgaggaggggctggcggctgacgccgagctcccgggaccgctcctgatgctggcccagaactgcgcagtcatgcacaacctgctgggccctgcctgcattttcctgcgcaagggcttcgctgagaacaggcagcctgatagatcactgcgaccagaggaaattgaagagctccgagaggccttcagagaattcgacaaggacaaggatggctacatcaactgccgggatctgggcaactgcatgcgcaccatgggctacatgcccaccgagatggagctcatcgaactgtcccagcagatcaacatgaacctgggtggccatgtagattttgatgacttcgtggagctaatggggcctaaactcctggcagagacagcagatatgattggtgtaaaggaactgcgagatgctttccgagagtttgacaccaatggtgatggggaaataagcaccagtgagctgcgagaggctatgaggaagctcctgggtcatcaggtgggacaccgagacatagaggaaattatccgagatgtggacctcaatggggatggacgagtggactttgaagagtttgtccggatgatgtcccgctgaggccgcgagggcccctccaggactgccaagctcccaaaggcggggctaagaggagctagagcttgcctcacccgctgtagccgccgagagcccaggatgtactggcggatggggcctgcctgcaccccggggaggcgcccaccccggacccccacccctccgcactgtgaaagactaactcctgcaactggaaagcgggggcgcccgccgacgaggaggccaccgtgccaagccggcagaggtcatgccaggcgccaagggccatgtgcccagctgctgctggctgggtgggccagggagcccgccagcagaccccacacagcatgtccgccccagggcaaagcctcccaccttcgctctgcgcccgtcccagctcgcctcagccctgttatctcagaaccaataaaaatatttccaagagc

SEQ ID NO: 1705 - protein, 227 aa, Homo sapiens
MGNCVKYPLRNLSRKMCQEEQTSYMVVQTSEEGLAADAELPGPLLMLAQNCAVMHNLLGPACIFLRKGFAENRQPDRSLRPEEIEELREAFREFDKDKDGYINCRDLGNCMRTMGYMPTEMELIELSQQINMNLGGHVDFDDFVELMGPKLLAETADMIGVKELRDAFREFDTNGDGEISTSELREAMRKLLGHQVGHRDIEEIIRDVDLNGDGRVDFEEFVRMMSR

SEQ ID NO: 1706 - DNA, 1663 bp, Homo sapiens
ctgtgcggcaggcaccctggcttcgggaacccaaactagccagcttccctttctgggcctgctggcctaattcccagccgcagctgccattctgggcccccctccctgaggccatctccctgcagatttggcagcggggaaaggaggggccgagagaaggggagagaaccagagacaggactgagcgctaatctgatgtagatgatccggcagccttctccagcttggttcccctctgccatcagctctccaggtgactttccctgtgccctgcactctccccttctgctttcatctccttaagaaagtgcccagaaagttaaacccacacacaaacacacacacaatccacccaaaaaaaaaaaaatcggagagcaggagcaggcagacgagtaagagagcacgcgcgcaagagagggctcacatccgtcctggaggaagaacggcacagacggagggaggctggggttggcagagactgggacggaagtccctcagtcccccaggagcctccttcatggacccggggatcccaagaggggctgcctcaacttaggatgggcaactgtgtcaagtatccactgagaaatctctcaaggaagatgtgccaggaggaacagaccagctacatggtggtgcagacgagcgaggaggggctggcggctgacgccgagctcccgggaccgctcctgatgctggcccagaactgcgcagtcatgcacaacctgctgggccctgcctgcattttcctgcgcaagggcttcgctgagaacaggcagcctgatagatcactgcgaccagaggaaattgaagagctccgagaggccttcagagaattcgacaaggacaaggatggctacatcaactgccgggatctgggcaactgcatgcgcaccatgggctacatgcccaccgagatggagctcatcgaactgtcccagcagatcaacatgaacctgggtggccatgtagattttgatgacttcgtggagctaatggggcctaaactcctggcagagacagcagatatgattggtgtaaaggaactgcgagatgctttccgagagtttgacaccaatggtgatggggaaataagcaccagtgagctgcgagaggctatgaggaagctcctgggtcatcaggtgggacaccgagacatagaggaaattatccgagatgtggacctcaatggggatggacgagtggactttgaagagtttgtccggatgatgtcccgctgaggccgcgagggcccctccaggactgccaagctcccaaaggcggggctaagaggagctagagcttgcctcacccgctgtagccgccgagagcccaggatgtactggcggatggggcctgcctgcaccccggggaggcgcccaccccggacccccacccctccgcactgtgaaagactaactcctgcaactggaaagcgggggcgcccgccgacgaggaggccaccgtgccaagccggcagaggtcatgccaggcgccaagggccatgtgcccagctgctgctggctgggtgggccagggagcccgccagcagaccccacacagcatgtccgccccagggcaaagcctcccaccttcgctctgcgcccgtcccagctcgcctcagccctgttatctcagaaccaataaaaatatttccaagagc

SEQ ID NO: 1707 - protein, 227 aa, Homo sapiens; identical to SEQ ID NO: 1705

SEQ ID NO: 1708 - DNA, 104693 bp, Mus musculus
  misc_feature (1)...(104693): n = A, C, G or T/U
ggaagaaggactctgggaaaatggcctttcctatgaatgtaggacgctgctcttcaaagcaatccacaatctgttagaaaggtaagaaaggggcgcccagagtccccgtgggctttagacacggggtcatctgcaatgtgagagctatgcttttatatttccttttgttttatatttccagagaagcttaggcagcccagagacccctgcatcccctcctggagaagcttaggcagcacagagaaccctgcatcccctcccagtctgaacatgcttcttattcagtctttagtttcaatgtccattttttactctttgaaaatgaaggagccattcctaaggtcaagacgaccctctccagtaagcacaggaccacagaagtgacaaaacaatctcctgtaacccttgctgacattgagatgctgtgggtttgacagttatgtttctcgcaccgagttgaggagctaatccatgacagtgcatgataattcatcgtttagttacacagctcttcagatctgggagagtcctttctctgtaacgttcttgcagatgctgcccttgatgatgagtggggccttagcttggctcctcagtttgaggcagtctcttgtgattctattaagcttattctttttaataggaatggcacggaggtgaggctgtacctcttctgggagttacagcatctgacacaggtcagagcctgcagtcacttggttagagtagtgttctctgtcagctttcttccttctaaattagaaatttgccaattgagcgcctggtcggtcccattccttttgtaagttgtggcagacacagtgggattgtgggatctcccttcctctacagcccactcacgagcttttagcacctgctgactgtccttgttggaatcattatcaccattacctctgtaatattgatttgaaatgtcaccatgtcttctcttactacttggcagtctgtgatgcagtcgtccctcttcctcttctctgctccaccccggcagtatcctcctctcgcccctgccctgcagacctactcacatatataaacaacatttgttctttggtggcacacatctgcagctatttggctccagaagtagaagccaggagctcaaggccaacctgggatccttagggtttttagagagctgttcttaaaacagctgctcacattcatggggctgtgctttattcatgagttatagctcattgctgtcatttaggttggtaacacagtcttgcagagttgactgaagaatgctgccctgagtagttcccagcatcagtgtgggagtgcctgcctccttacctcctgcagcaggactctttccaggctctctgtggtgtttggggagacacagatgactaagaatggcccagttaaaagcctcagtgggaatcaatgttcccttcttctctggagtctgtagatgatgctccaaggtcattaaaaatggaaggaccttatagtactattaaattcatactccagctgctggctagggcgatagcaagaagtcactaagtaacagagtctgagttttctgagacagggtttctctgtgtagtcctggctgtcctggaactcactctgtaggccaggctggcctggaactcagaaatctgcgcctgtctctgcctcccaagtgctgggattaaaggcgtgcgccaccatgcacagcctgagtcccttaaaaaggccttttttctaaacagctctgctttcttcaaacgaggccctgacattactttgctcagcatttttctgtaaagatgtctaaagaagcattattgattgaagatcagataatcatcaatgaagtatttggcaattctttatacccctaccaagtaaacaagaacaaaagtctacccaaaaggcattcagggacaatgagctgtgtatacaattgtgtgtcttgtaaagggctcaccatgcatgctttttaagtagggttctaggggatgtgaacagagcatttatttactattgtaactcactgttcttagatggtcattaattcctcccaggagaacatgactttttcttagtcctgtgtgttagcatttctctttgttggtagaaaacgtgaagactagggaacttagtgaaaggatgtgcagctgagttccttattcaaggcagtgcatgcatcaggattcctgatgggaactgaagcatgcctcagcttgaacctgcagctgagttcctgattcagggtgcatgcatttagaatttatgatgggaactaaagcctaggtcaaattgaaccattattttttaagaaaattaattgtgatatacagtaaactttgggtctcagtttgtcagcactcagccttccatgaacagcctgctgctagtgggggatggggtgtaggccccttcagttagtgtgtgtaatgtagttcacatactcagtcaataattcttaatttcatatagatttcatcattttgttctattaaaatagtggcagaggggcccctctggaccccttgtgggagtgagttctgaggtggggagcgggacagccttcacctgagcaagcactcgatgatctgggtttccctctaccccaggtagagagtctggtaattcaaggtccccgtgagatacctggggctgtggttctataacctagtcactcattctccttccatcctggggtggctgcattctgtaagtgaaaactccctgccgcactggtggggggagctctctccgtcagtctgtttcctgccatttctgttgggtttttctgcttgtgtccacagaaggtcagcctgcctttccagcctgaattctgagttcctgtcctaaaaacaggacagctcagcagcagggcttgtgcgcttttttactgtttgtttagttggtacaacaacaaaccttgaataagtgatttatcctgcctttcttaaggtgcaaagacccttaattaaaaggcagttccattcactgccttgaaaggctcttacttaggtctgagaaggagctgtataaattgatctctgtgaaaggctaacagtgatgtcactgccgtgactcattaaggatgagtttactgccagagctaagcgatcctgccattttcacacagaagagcattgcattctggactgctattgattggtactgaagcaccactctattgatgttctgtagcgattctaaattgtgagctgtgtgacttcagacactcatttcttgtgtcacattcagtgtttgcctgcctgcggtatgcacttccagctggacgaatttgtccatttagaaacaaatgaacaacaagctactctgtgaatatttgcataacggtgttataactttgttttttccagagattcatttcttgaaatcttttccttatcacctgcagagacaggagtgctctgggtctcagtccatcacctaatgaactgtgatgtggtccttggcccagcacaccccctttctcattttgagagctctgtgtttggctgactgccctcacagcctagagaagagcagtcaggattgttatttttagagtggcttcgacattgatagttcccagctcactccaaggattctgggtctataacacctgccttctgtggttcctccttcctcgagacttcctgttatctgagcaggttctgacagtttgtttcatcttcagagagcacttagtgttagaatgaaatttgccctgagcagaggagagatgtcctctcctgttactcttaaggtgttattttaaaatatacttctgggtcatagtcagtcatcttttgaaatatagtagcgatttaaattttgtttttgttgttttggttttagatttatttattttattttattcatatgagtgttttactggtatggatgtgtgtatgtaccatgtgcatacctgattccttcagaagccagaggagggcatcagatctctttgaactggaattacagatggctgtgagctgctgtgcgtgctaagaactgaacccaagacctctggaagtccagcaggcgctcttactgtgagccatctcttttgcctcatatggtctctgtgctgctccttgaatgttgtagttgcttgtctgacaatcagatgcatgtgcccgctccatgttcatagttcttaggaaagttcccccctcccctctcctcccccccccccccnnnnnnnnnnnnnnnnnnnnnnnnnnnnnncccccccccccccccagtctttttttccttttggtggccactggcctgatttaccagtcaagttaggctcagggatgctacactatggaggttatgctcccccttcctagcagaggctgactgtgtgcttgcagtgctctcgcctacctgccccaggcccaggcactgagcaggcagcctctgcctctccttgttggcttcctgacagagagcaaagagtgctggtaactcaggatctgaaagcctgtggtgcatctgctctgaagtaatgcataccacacatctactcatatttcgtcagtaagatactggccacaagacttaaacggacaaagtaggatctatatggcagaggtatggacgtcgaagtcacatgaccatgcttgatggtcagtgggataacagtttgtcttccagttagctgttctttatggcttgggagctgacaggtttctggggggtggggtgggggaaggaattttaagctctttgcttctttataggtttttgtctttgtgactcctagtacttgaaaaggggacagacagtgccacagttccttgtctcaggtctgtctgttttttatttcccatgtcctttgagaaagcatgcttccaagtttattttaaggccagttatcgttggctaaatgcccaggatgataaaataccattactttggtttttatttatctagactcccttgtgattgagcttagccctaccccttctcttacacatccctttcctctccccacgtgagcatagattgtccgaagtctccacctaagggactccacccatgctcaccctgccttggctacgctgggtgctacactgaggctgcttcctcctcctcatggaaacctttgtgaggctgctctttgggagcttgttctatgtgatttagcacttgagacatgttgactgtttcattcattgcagttgacatggattttcatgatgcatcaaactctattacctgtctatgagtatggagtaaaaattcttgaaaacaaaacaaaacaaaacaaaacaaaatcaaaccaaaccaaaaaccagagcatgtgtgcagttcagaaactcaagagtgttttatatactgaagcagcttgcctttgtgacatggtgacattgtgacaacccgaaacatctggtacactgccaggttggcattaggtttgttactctggctttagtttgtaagtgcctgaaggctttggaataaaataaacgtcttgattttcatgggggctcattgctatctccagaggtcaggtcagcactgctttgcacacagtggaaggcgactaaaacatttggctgtgtgctcggtcttgccattgtgcactcaggggaacctggcagtgtggatcggacatctggaaagatggtgtcctacctggcactgtactggttctgttgattgatggctgccaggcttccctctgccatccatagtgccttggaagtgagggagcgtaacatggggttggacctgcccccacaccagctggaggcccacacactctgggtgctggtgtcttatggtgggcgagagactgcagtatagctcttgcagtcatggagctgagtaacaggtgcagctgcagctgcagcggaagacatggttatctgatgtggagacatctggtgcccttgggaatcacatagtaagagtacaagaaacagttcagttcccaatttatggaaatgccacatctgagaacgagtctttagatttaggggatacagtctgtaatgggaggttttaagtctaaaaacctagacacatatctagttgtaaatggcctggaaaggaatctgtgtcttctaaaagcatcagtcaagctggctcttccttccttccttccttccttccttccttccttccttccttccttccttccatccatccatcatcatcatcacggggtgannnnnnnnnnnnnnnnnnnnnnnnnnnnnnnnnnnnnnnnnnnnnnnnnnnnnnnnnnnnnnnnnnnnnnnnnnnnnnnnnnnnnnnnnnnnnnnnnnnnnnnnnnnnnnnnnnnnnnnnnnnnnnnnnnnnnnnnnngacattggatgggccatgaagaaagttcaggcctttggaattgcatgaggcagagtgaacatttcagggtaggctagtcctggaaaagaacttaaggttatagtcattttagagaggatgtaaagtagacaggccttgtctggctacatcttgctgcaagaatcagcacccactagggcacaggagacacccacccactgagtgagagggtgtgggaccagctgggaaggggtccctcatcccctcagctgtatatgtggcagtaagcttgacagaaccatctcctaaatttgatgaatttggggtggggaaggtggcactgatggtgcttggcctgcaggtgggtgggatgtagtctgtgggcagcgagagggcagagagcactgtgtcaggagtgttagccaggtgcccttccttctgctcctcccagcggtcctacccacctaggaagtgacttgctgggttagctgggcgttgcccaggcacttgttaccctgcctcaggtgtgcccaggcttcgggagcaaaggtgggagctggcacattggacagttattcagggccatgtgggccaccacagagtgcacatcccagggacctcccgtgggtgcacatgtggcgcttgccttcatttccaacactgctgcattgctcctgacatggtgcccttgccggtgtgggcacttagagagaaccttttccgctgttgcttagcgttgtcagcctctgggctcctcggttgccttacagaacaatgccaccttcctaggaagctgattttgaaaatgttgctggtacccaggttgactataatacatgcctggtagggactgggaagtgttctgaagcaattctcggcagacagaattgtctacaaggttgagttaaatacacattttgaccctcatcttaccaaaaagagcaacgaatggtggaagtgtatattttacttctgatatttttataatttaaaactacctttaaaaaaacatttgcctaattatgttctttgaatataattcatgcagtctgtagtagtgttggttttcctgaacatgtctcagcagccacacagtcccatcagtgctgaggtgctgtggctttaggctgcatgggaactgacagacgggctttgaagaagcaagttcagtagatttccttcccggtcactgagtgcctcgtggtaagagcacacacaacacgcatggccataagaatgcttggattatgaacaggaagataattaattcttaacgtgtctaactctcctgtcagctattgattgagcattaggcagtgcagagcaggacccagaatatgccacagcacaggcagttgacttgtgttgaatagtcactgtcatcctgactgagaactgagaccctgatagaaacacaagagaaaccccagatggcatcagagataggggcggtcatcacagattaaaacaggagaggaggtgtagcacagtcaggggagtcctggctcgccagctgtggagctgtctcatgtgggaagcagctgggtcagagttgactatgtgccttgcttgctcttgctccactgctatgttctgtgctgctttactttgttgcagtattagaagagcttttatgtttccttttagtttcttttcagattgcatgtctgctccactgtagtctgttgcagaattaggactccccagatgctagtcagccacagaactgtctttgacagtataatcatgtcttttccatttcctcccaaggcttagagttgacagcatcctgttcacattcttatgttcagcctcacctcagaggagctgtgtatgaatctccaccccaagcccagcacaactttatccaatgcagttctttgagatgaagtttgctggtggctgtgaccccgagtcaccactgcttttattctgggtactgtggatttcaaggtagacactcagtgacagcttttaccaagtgaaaaaatgtgtgcatattagttcagctatgatgtggacctgggcttaacaaaagaagaaggagctggcaatggtagtgcatgcttttagtcccagcatttgggaatcagaggcagaggcaggcagatttctataagttcaaggccagcctggtctacagaccacattccaggcttgccagggctacacagagaaaccctgtttcgaaaaaccaaataaaagaaggaaagaggagttaagggaggtattgtggagctttcagtcatgtcctggcccgggcacagatggacctggcagctcccaccactcacgctgaccttgccaggagacattccctctgtgcctcagctgtgggtcttgacactcgtctccactcacactggtgctggtgactgctattgtgaggctagcagctcttggctcttactggactgcgttctgtgcagcagtctctgctcaggatggatggagtctggcaagggaagaacctgacgacggtttacagcttcagctcctgtgacctttgccataggtggctgctccagactttgcactcagagtttaatgtagtcagcgtctctgtcccttagaagtgtgaagtcaggttgagttactttggaaatgattttctatactgtgaacaagggagaccaccgttcactttccaaataaatccagtggtatttgatgtaaccctgttccaaattgagtctgcacagagcgagttatgctgtgaggagaggctgttgcctgacatttactaacttgtttaatctgtaacaaaatgggggaaggccttgaattgtttccataggctttgatggagtgggaacagcagagacaaaacaggacagatctgcctgaatattgagataagaatcgctgtctagttctcacaggcccttgtacaaaagaattccacaccgcatttggacaactttccttcaaaccgtgggttgtttcattgactgacattgagagaccgttgtgctccatctcattcagaaagtccattttcttttacattcgtattatttaagatcaagggtacttgttggtgctctgcggcctcacccacattgtacaggtgacggctgtggtggagtcgtcacctgcctgcacatgaatgaacttggttagttgtctgcactgttgctgttctctgtgatgggttcacttatgactaacctgtcctcaagagaatgcctgggacgtgacagcagagcacacagcccaaacgccatggagacagaagcgagtgcagcacacactccttactgggaagagtgctgtccagccttcattttcctggatggtggttttgtgccctcagaaagaaagcatcaaggcagatgatgaactctgccaaagttttgttattggcgttcttgctaaagaattgatcacttatcacaagaaaactccaagcccagcatgcaggaagaagagtccttaagtttcctgcattctgaccttgatgatagaggaacgcctgtaatacagacccgtgacttaattcccagagtttgggaaactctcccaactgtttctcttccttgcttaccccccacaccccgggggcattgggaatccatgcccagagttctgagttgtctcagtataaggaagcactctaacagtggatctggcactgcctgtgtgtcctccggtgcttctcatctgggttgttgacagagtgctaagctaactgttaccgcgtctgtgaaggtaactcctgatgtgcttattgtaggtgcctaatggataagaacttcgtgcggatcgggaagtggtttgtgcggccctatgacaaggatgaaaagccagtcaacaaaaggtcagtcttcagggtgcctggtgcctccctcctcagccgtggccgcagctgcctctgcacttgggtggcagggctggcgtatctgttatctgtggctgttggtctcgggccacggtgccatcgcgtactgcatgcttgtgcttgggtaatgtgatgagagagccctgcgctcagcagtgaggctgtgtctgaagtcctcttcactacatggtttggagttgagacactagtgtggcctttctgttattctccctcacttttcttccttacactgttattcggcataacttaaaattattaaattaaattaaatggtgaaaatgtgtatagcgccaccaggtgctcctttccatagatgagtgcatatagcttggtgactgtcaaaagcagaccgtgaactgtgtgaccatggacggttgctatggtccacatttgcagtggatatgaactttgctgctaaataggcatggacttctagatcaatgaaaccaaaacaaaatgactcaatttaacatttcttactgctgaccatagtctagttataatagattgataaagagtgtttaattttcacaaaacaacatgcacttcacctctaccccccctccaaattattctttttctttttttgtacactaggtatgaagcatagaacttattgcccattcccactgagctccatatgggggacacagcacctcggtcctgtttaattgtctaggtgccctagggcagggatttagctgctggctataggcaggagtcttagggtgacgctactgtcaaggctggcaaggcttcagtcatggtgttaaagagtccgtcagtagcttcccctagtgtatctcaatttagtaaagtggttgttggaaggtcccagactgggggtcagaagaacactggtggattgctggggtgtagccttcactcaagggttcttaagggcctggcaggactctgaggagacatcaggtcccagcaccagacagacagcatggtagggtctctcatccaccaccctggggtttgatgtcacttctcaaggccgtatctggagagaggccaggggtgacatcagcagtggtacctactgtcagatgatgaagaagaaactttagggacagagtgggcagtatgggagctgtagccacaacacaggtgacacccccatgcttggctagctttcacaacagtgagtccagccccttgggggaaatgtcggctggaaggtggaggcacagctgaagcatgcttcctgagggctggtgaccgctcagcgtgcagcttagtcacatctggatgctcacatgctgctctctgtttagatctccctagtacagtcgtttgtgctgaggtatgtgagcatttgaaacatcaaaagtagggctagagagacagctctgcgggtaagagcactgactgctcttccagaggtcctgagttcagttcccagcaaccacatggtagctcacaaccatctgtcatgggatccagggccctcttctggtgtgtctgaagtcagctacagtgcactcatatacaaaataaataaataaattttaaaataaaaattttaaggctgtttctactcctcacttctcagagcctcagtacacaggggcttcctacaggtcagacccggtgtgcctaaggaattgatggcttgtgttttaaatactgttctttcacttacacgtgtatttaatgggtgctttttataaaacaactccccagagtctctgtcaaaagagaaggaacattgctttcattttaaatagaaaattaggtaagtttaaattaattttctagcatagctaaaaaaagtgagagtaaaggttattatttatatttataatttttagttataggcaaccatgtgcctctataacctagattatgaattgtaaatggaataattttattatgacacattcaaagtaaatcagtttctagtaatcagttatctaacactcttgcttagaaaaaaattaagcttatatttggttttttatttgtacaattatagtaaaagtttaattaaaacctgtcttagtcagggtttctattcctgcacaaacatcatgaccaagaagcagttggggaggaaagggtttattcagcttacacttccacattgctgttcatcaccaaggaagtcaggactggaactcaaacaggtcagaaagcaggagctaatgcagaagccatggagggatgttccttactggcttgcttcccctggcttgctcagcctgctctcttatagaaccaagactgccaacccagagatggtcccacccacaaggggcctttcccccttgatcactaattgagaaaatgccttacagttggatctcatggaggcatttcctcaactgaagctcctttctctgtgataactccagctgtgtcaagtagacacaaaactagccagtacaattgaccccttgtcaacttgacacacaaacacatcactggtaagcctcaacccttagtttcttattcattcccaagatctaaataactttaaaagtcccacagtctttacaaattcttaaaatttcagtctctcttaaaatccaaagtctttacaattaaaagtctcttaactgtggggtccactaaaatattttcttccttcaagagggaaaaatatcagggtacagtcacaatcaaaagcaaaaattaaactcccactgtccagtatctgggatccactcacaatcttctgagctcctctaagggcttgggtcacttctccaactctgacctttgtagcacacacgttgtcttctatgctccagctgcctgtagtccattgctgctgctcttggtggttatctcatggtactggcatctccaaaacactgcatgaccccttcagtcctgggccgtcaattgcaactgaggctgcaccttcaccattggcttcccatggcctctcacagtgccgagcctcagctgctctgcgtgactccttcatgccttcaaaaccagtaccacctggctaactcttatacattactaagtccaaccacagcacaaggtacaaccttggctatctctggaacacagcctctgtgctctcagaaaacacttcccagaagatgtcacctcagtgatgctggtctcttcttaatcaccactaatttcttagctccagctaaccagcatcaatagtcccagtaatgcaaagtttttgctttagtagttctggtatcttgttaatcacagcttattcttcagccccagctaaccagaaccacagaatcttcacaatcaaaacagcaatggctctgaaaagagtctttaattttccctctgaaatttcacaagccaggcctccatcttctgcacggttctcaacattatctttcaagctcctacacaatatctcacagagttcttaacagcaaatggatcttctggcccaaagttccaaagtccttccacaatccttctcaaaatatgatcaggtggtcacaggaatgccccactatgctggtaccaatttgtcttagtcagagtttctcttcctgcgcaaacaccatgaccaagaagcagttggggaggaaagggtttattcagcttacacttccacattgctgttcatcaccaaggaagtcaggactggaactcaagcaggtcaggaagcaggagctgatgcagtggccatggagggatgttctttactgacttgctcagcctgctctcttatagaaccaagactaccagcccagagatggtcccaaccacaagggacctttcccccttgatcactaattgagaaaatgccccacagttgtatctcatggaggcatttcctcaactgaagctcttttctctgtgataactccagctgtgtcaagttgacacaaaactagccagtacaagacctttgcaacattggcatacaagaagtacaaaaaaaccttaggctttaaaagtgtgtgtatgctttgtgtgcggataaaatcatttaaactcctgttacttcccattaatctgttatgagcacccttccctttatgtccttaagcacagttaaaagttactgtgataatgctagttatgaagtacaatgaacacgcagtgtccgttggctggcctttctccttgcagagggctgcctttcttccttcattcccagtcactttgaattatgggaagtgtaaatggtgtaaacttttctgtcagggatggtcgtggcccctttccaatctcttttagtcttttctttctttgagtaaacaggcaattgactggactcatcgcttatgaaccctaggagttttcagccatgggttgagcattcgctgttggctgttgttggatgattaactgcgcctttggcttctccctgcatagcgccagtagcaccttcttccccagtcacaacaggcttggatcctgtgggtactgtcatggtctcccgggcagcagtgccctgattaagaagtggggcttggcccgtgcacagttgcagaggtcgcagaggctgggtgatgtttctgcttccttctttctaggattctctttcttatttcagcacatttgttctttctcatttcagccgcctggttctttaagcaatttgaaaagaatgacaccaaacctttgggagttttgttggtggtggctgcccacgcccaccctatgagctatttaataaggagtggaagggttcaggacagcaatgggacacatggccatccttcactctcctccctccagtagttgagctcttggcagatgcagatgttttcttcagattgttggtggtttggggacaggttactttggagggctgtccttgtcactgcttagaggagacacagcagcatggtggattgttcttcggtggcttatacccctctcagagcctggcctcaggctgagacaccctggtagaggagtgttttgcctgatgagagaagtgaatctattttctgagtaactcggacattcgtgcacatgtgggtttcccagcttactgttttgtgccctctcttttttggaaggtgtcagcttgtagtcagggaaggctgtatgtcagcttcctctgaggcacttggagattttgctgcaagtattcctaaccccccttccagtctttagagcatgctgtagagcttgctgcagagcctgagaaagcagttagttagaagagaggattgagaggattctggtgctggagactgacctgtgttcagagggcagggaggtggtgcccaggtggcctgtttggtgtgaggaactggctccgttccgtgtcctcagggtggcatttatgcagcaaggtggcagctgggaaggtaccacagcattgggtatcaggacagctctagaatgttcattcctggagcgactttctccctatactttccctccccagttgaacagtagctaaataaattgcagtgtcaaggaaaaggctatattatatgactaagtaacttaaaatgattgagcctaggtttgctgtgtttgtgaaaagtgaattgttttaggattgagtaagataacaaataagatttgtgacataggactgacgtggctgtgagtctgtcagtggtgcccagtgtggggtagaagcattgggaaaacattaggataaaataacatttgttttgtttttttgtggtcgtttcttacattgaaggcagattgctgttcaagtatttgagtttcttagtgttaatagttaatagttaatagtgtcagtaacatagtgttaatgagccatttatttctactgtgaaactgtgtcgcttttgtttctgatgcaaagtttaactgtgtagctctggctagcataaaacctgctatgtagaacaggctagccttatcctcagagatctgcctacttttgcctcccaagtgctgggattaaagacgttgtagaaatgatttaatcccaccctgaggtttctgccccaccttagaccgtttagttcctggataaaagacacataccatctttatatttacaataagccttaagcagctcaagaactaggcagatacctgccctctctgctgttagaatctacttttctatcgagaagcctaagttattccttactacatttcatctgggctgctcttaactccaattggccagccctcagggtcatgttaatttaacctcttatctgctgcttcttcctatgtctcttctgcccagatgttggctggttggcatctttatttaccattcagaagtaacttgaagaaggcctactcaaggtctctataccaggtcccagagggccacatttagcattacaatggataacaaaagaccagacctcaacaaaagacttgcagtattttccatctgcaaagaactcttcctctctaagtatctgaaatcactttgtatctttttatgtatgaattttaaagcataattcttttgccaacatttatgaactcaaaaagttttgaaggcacactgtacattttaataatcttgcttgcttgtctggcatagttagggtgctaaagaagattatgaaaataaaatccctgagtatgatcttggccattagacagagctctgagcgcctgtcagtcctttgctttgtagtcatgtgaccacagaagctggcctgtctcagtggttcaggaatatcctcgagttgggcctttgggtaaagctgcttgctattgagcttgaacccataaagctggttcccgagttccacactgctgtacacacatcacacacacagaatgctgcgagtgccaggctgtggcttagctcttcctgcactgtgaccttctccatcctggccctgtgtatgcttccatgagacaggtcaggcatgctgggacaaggtgagtccatgttctgttctgggtgctgcctctgccgacgaggttccaggcacgctgtttttctcatgttcttctgtcacacgtcattcccccttcagctcaagttaatgttgaggtccttcccagctctcttcttgaggaagctttttgagttgtgtctttagctattttcctttctgtttccctctgcatgatttgaccgctgtgtgtgtttagttttgagtttgtactacagaagttaaggatttggggtcctttgtgccctccccattcttagagtaggtttagaacagattcctagctatggatttccagtgtgggacatcattgtttgcttattcatcacaaagtccagagtcccctgaagggtgacttagaagagtggaatatccttacacttcttttcataagacctgtaaacaagtttgcttcggagagcaaaccatggagctgtgttggttgaccgagatagaggcttcctgcccttttgatgttaagagagaagttttgaaatacttaggttttagaagtgtgtgaaagtccagtgattcttgtaacagtttatatttgcccagtgtctgtctgtatcaggatttattactgagtaggtgttgaagtctgagcagctggtattttagtcgtttacttggttcagacatgctcctttgggaactggaccacacagtggctccctgtatttctgggtgctgtgctgtagctggttaggaaaacagaacagactgcaagatcttaacatcatttgtgctcaaagcacaaagaaggaagccttctgaagcacggtggttgaagtgttgtgtgtgattgaaactggtcagtgctgctaccattgacacttgggtatttacatgcaagaccatggagatttataactgtgtatagttggagacagtgggctaaatatttcttctagctgggatttaaagattagtatgttcaagaaacaggcttttctgaatgaggaaactggctttactagagaactccgaggtctgtctcagtaaaaaatgtggcatctcctcacctttgtttcttattaaaaattacaaaatctacactgatactctgtcttcaatagcaagtcactggtgagctgcttccctctcctacagatattttgggtcctctactctcccnnnnnnnnnnnnnnnnnnnncccccccccccccccccccggagtcagtgccctgctgcagagctctgtacttggcaagggttccgcatgaaggggcatcagtgctaagtagtgcacctgtcctgtcggcttcctgctggctaagagctggcaggactgacttctgggtgagcgactctctgaggatgctccatgagcatctcaggcatgtttggctaacacagaatgttgctttatcaaagaacaagcctttagtaccgttgaagtgcttcttggctccaatctctggaggcatgtagccagaaaacacctgctcacacacttggtcaaatatttcatttccgcaagccggtgctccagtcaaaagatagtgctgatgtatctggacggcacagtgcttcatgcacttgacaactgtgtcctgtattacagagcaaggaacctgggtgtgtgcttcatatgcagttgtaagctgtgtgaggtcagtctccaatgtttgcacacaggcctgtcagcttttagagaaccatgcacacttgaaatccatgcttcacacctcttgttccacatccctactttgagagtgtaagtggtgagcattgctagcctgtgtgaagctttcttaacagtagctacaccaccagcaccatctagtcttggagtgccatagcctgaggaagatagacagttccaggttagaagcctcgtaattatgtcttgggttatgaaatgctaacacgagctgaaggtgccagcagaggcgtgtcaatgtgggccgtggtgaagacttgaaggtctgtagtggcttccttatggtttgcaggacttgaggtagagtcatgagaagggggaaccgaggtgagagacgtctgctatcatgtctccagcagaggaggagcagtctcacacagtaccatgaagctgcaaggagtgagtgatacacagagtgagatggaaacccaagcacatgaaaggtggccagtgtcttacagggtcagtgtggagtgcaactctgagcctgtgctgggtatgcctgcagcctgcaggtcgttcacagtgaacctcacctcactgctaggcactgtgctgttccagcccacagtggtatgtgtgtgtgtgtgtgtgttcttttaatctaaagcatgtagcacatagagcaagtgcagaagcatgttcaagcataaaatctggctcatagaataattgtgtagttgatgaggcctgaagcccagtggtagtaaagactgaagtcagggcgtccaaggtgccagtgaatgtgctgcgagggctgagggctgcaaactttaaaagctttaggtaaaaagggtgtgttcagatgaatcactaaccagtttctctccttccctccctccctccctccctccctcacttagggtttctgttgctgtgagaaaaacacaatggccaaggcaaccagggataaaagttacaattattaggctcaggtttccaagggttagagtccatgatggagcagaggcatggggcaggctcagctgagcaggaggcagagagctgactcaaaatggtcttttgaaacctcagagtcgcccctaatgtcacatcacctcaaaatccttcccaaacagttcctccagctgcggaaccaagcctttgaatatctaagctctgtgcattattgctattcaaactgctgctgcctgttttatcttgttttgtctgctgtcaagccctgactttatgtcacttgttaatcttttgcagttagagcatatctcaggcacttgagcaacacttaattaaactcttacacaaagtgtagcttctcctcaggtgctttgtgtgcagtggctaatagcaggaaggagcccagcctcggaacccacaggcctgagagcggccaggccacagacaacgggctctcagtgcatgttgaccaaacacacacgtgtgcatacacacacacacacacacacacacacacacacacacacacacactccccatctttactgcattcctagacctgtaccatattgtttggttttattgctgagaaaatatcatactggaattgtcacacaatcttcagttagagcgggaaggacctctatgcagtctagtttgtgggactttgtgtcactttcccaggtagctgaactgtgataggttcctaatcttgctagagaaatctgtttggtttcagactctgggactagggactgaggtgattattttacatatcaaagcggacctggcccaaggttctcagcctccctcagtccccacctgacataccctgcccccaacctggaacttttggagctggactgcccatcccccagaggctcttccctatccatccagacattttgacttctgtctttctttctctttttctctctttattattttcctttaccttctctctgtgtgagatccctttctttcttgccccctccccatggcgacttccctggcctcaattcttggggccatggaacttgtccaagagcagcttctcagtaaacctgcctttaatctaatctaatctggcttggactcgctcttttcgaaggcagcagagaaatgacctattggaattgagataaggagggcaaagagcacccaagagcacagtgcaagtaagaggcagtcagagtagtggcaatggccccaatcataccaatcataaatacatcataactacagcatagcatcttcctcctaaagcgaaagaaaccacgacgcatcacccagttaagaagtgtgatgacttgactgtggagagagagtggcattgcagattggaaaatgttggggaccccagacacctgagagaagtgtgcagagagcagccatgcagcttcctgatgcacacgtgggaggagggaggtgacttccaccctcgcacagcctctgtcaataggcgacaccgaagacaggctgccagtcaacctgaggagctcgcggctgctgctccatcagggctcccatggcccgggtctttcttcagagcagtcaagtggagctctgcagtgtagtcaggtctctctcagtgaaatctcctggttaaaggaagagagaccaggaatatggagaggccaggctctgcattctgggtgcatgtttgcctgagcagtcagggctgagtgaaacggcaaattaaaatgaatgaatggctttggaagacagagaagtccatcatttagccagactgttagggagcaaatactggttttcctccttactaattgtacccattatacatgaggtgtccaaaagactgctttttaaagcccagacttggacatatttttaatgctaaagaggactttatgttttaatatttaataatatgatttatttaaaagctgtggattgagaagaaaactacatattaataataaatcatgaaaagaaaaaaccacctgatagccaacctgaccttgttttcagccataaatctggggaggagactgttctgacaccttgcttctttgtgctctcagatgaacccagagcccagacccttcagcaagggatcaagcactggcttgactgacactgcccccactctcaggggagcttgcatttacttcctgctggcatgggagttcaggtccagggctgagagaggatcactcgccttcctcaggatagcttctggactccctcagttctgtctgtcagcctgtctataacaacagactagacatttttgctctcataactatctgcttgtttgttttcttttccatttgtgtagtttcttttttttccaaacttttatttatttagttttaaagatttatttatttatctgtaagtacactctagatgtcttcagatactccagaagagggcgtcagatctcattacagatggtttcgagccaccatgtggttgctgggatttgaagtcaggaccttcggaagagcagtcagtgctcttaaccgctgagccatctctccagcccccatttgtgtagtttccactgctctgtgtttgagtgcactgagggcagtagtaaccaacagcatctaactgacagtcaggcctgggggtttcattcttcccttcttaaggaaaccacactggcccgggcagttgggaggatgctgagctctaggttcctggcctttgtagcaagaccttgtgtcaggtcagacaaagacacaagcaagcaagctagtgttggagttcatgctcaagtgggcatctcggttggggtcaagagggaggcagtggaggttgggctgagaacggttccagtagtctatgtgggaatgcttgcttcccagtgatggtgtgtgtccttgttggaggaggcatgtcactgggcagactgtgaggcttcaaaagactattttgagttagctctccctgactcttgcttgcgaatcaggactcaagctcgaagctcttcccgccttcctgccttttctttgccgtctctggttcttaccaccctgaaaccatcagcccaaataaatgcctccttctgtaagttgtctctgtcacagtgtttatcacagcaatggaaagtaatgcctgtgaatccagccagcccagcgagcctctctccccaaacagtgtaaggcagtaccgacataggagaaggtagaggtgaggctctggggctcccccatcctctcttcaccgcagcctcccttggtttggcacacacacctttcagaggacttcagtgtgcctgttctgtagtccttggacttaagacactgcagtaaagtgttaatgcaaatgtcaggttcgcagggtggcccttaaactgcccagccctgggccttgtgttcgatgttttaaacaagtggctcagatgttctgccagtgggattagaaggatgtctgagaggagacagctcctccactcactcactgtgaggccgagggcacccatagtgctccatcacagtacgcccaggttctctctcacttgcaagctttaatgagagtgctgttactatgtattggttaaatgtgcagattaacaatacataatgtgaggacagagctcattctgtggaagatctctgcattgttgtccctggtttcatgcaggaggtgtagataggtgcagctgttgtgtagggtaaaatcaagtaataggagatgagtggcggcgatttgaaggtagaatcccacgaaagtgtccctggccgtgccagtgctgccctgtcctgtgcgtccactggtcagtgctgactgtggactttggcagtggcctttgggggagaaacagtgctaaagcagagttcaccgttgcctttatttaacgagtaatcactgggtcagggttggcttttccagagtgtgcatttgatgttcgttactgttagcttcacatttccttgctgaggttgctgagttcatacttgtgcctgggagtttctctccgccatgagttctgctgttgaactctgttttcaggctgagcagtagactcctctgtctatggcctgtctgtacctggtggttgaaggcctttgacagtttaattgtaggacagtgatttagaaaaagaaacatcatctctgtgtttgtgtttgttggctgcatctagaaccaagtgcagctcagagttgctttttgagtttggagttagcctcgccattaactgcttatctattttcaaacatattagtgtcagtcactcaaattgtttaaattattttaaaacccatctgttgtgacagattggacttaattactgaagcataagcagtagagacaatacttcctaaagacattttcgctggagttactgtgtgtcaactctttgaagaacacgtctttgttgggcatccatttttgtttatgttgtgttaagggctttctatgtagctcaggttggcatggggctgaagttctgtatcagtgtgggaatagcaggagccttaagtcttgaagcatcttgagagtaattactctggttcatgcagtttcatttgttttcagaattaaaagaaactgtcatcatctaaaaatgaaatgcctcaaaatacactgaaaataagacagactcaaaggcccgttgttttactccctgtatatgtgttccagttggattacaaacatggagctaattttctaggtgattataaaggagataaatgagttgtaaattatcctgtggcattttatattaacgtacatttgaggctggtgatgtttaatgtcatgagctttgaggccaggctgcctggattcccagcacctgttgctcttgccacaggatgagcattgaaaattgaagtcctagcacccacatggtgctcacagccatcaccactcgtctcaggggatccaacatcctcttctcatctccttgggcaccagacataaacatagttggcatagatgctaagtgtaaaagaagtaacttacaaacaaaccaacaaacaaataagacagtcatttggggctggagggaatggctcagaggtttaagagcattgatcagaggtcctaagttcaatccccagcaaccacatggtggctcacaaccatctataatgggatccgatgccgccttcttgtgtgtctgaagacagcaacagtgtactcacaaacatgaaataaataaatcttaaaaaaagaaaaagtcattcttcccacctcacagactccaggtgaggatgaagttagtaataataccctggcaatgcagcgaggcttccccagctgctaacgaaacaagcagctcattcagtccttggaaggtctttagcaataggtcattacacccccaatttgcagatattaaaagtaaagtaactggcttaaggccccgtagctagttatgtggatctggagttgaaaatgtgggccattcaatgagttgggattgtaattgcctgattcctgacggctgctgcacttccatgcgtgagtgctgcggtcactttgcctgttcatattttacatgacgtttggcagagagacgtaattatagttaaatacactggctacagaggtcagacaccattctaagtgtgttttcaatgcatttctttatgtagatggctgcttgtctgcatgtctgtctgcagtgtttaccgccggttacaggattttgtgcagaaagtgagcattcaactaagagaaaatgcctttacactgttcttacattttctttaaaaatgtggcagtataggagtttcttagaaaggcttgctgcctctcaaggtgcacagggaacctgggtgagctgctgctcctcaggcagagcagtccaccgatgaggctcagcaagcaggggtgaaggcgactccaccggagggaaacacaacttcactttgccttctgcttgtgcaaggtgtgaaatgtctattccttgcacagcgagtcctttttcagatcacaggccattgaaagaatggcttttaccccagcatggccttggaaaacattagtgggccacttagtggcatgtgtgtggtttgtgctctctgcctctgtcgctcactgtctggggtagaggagaatcaacgtggggctgtattgacagagcccagcatgaaatgaggtggcttttacagaggcgcctgcgctctagcctcacctccctctcgcccaccccgcagagccccttgccaggacagctgctgctcaggcaggagagagatctgaagctgcatatctgtacactgtagaacaaaacaactgccattgttgtacatagttctgtctctcataactgccagagacactttgtatccattctttatcagtccagggctggcaagcagtagaggatggtgccgtgagtggtcagtggtctgatatactgccctttagagatgtagcaaagtcagagccacctctgatgctaactcttcgatgggctagcctggaggatgtgcttgctccctgatggctgccgagctgtggagcacagggtgtcccgtcataatccccctttcccagattataaagattctgtggactctttataagaagcaagtctcctatcagtcagaatcgatagtaaatgttccacatgaaacacctcagcttaacataatttttgaccttatcttgaggccattctatataatcagcatgaggttgtgagaccatgagtggagcgggagaggcgtggtcccaccacccttgcgactgcagtgtaagaacctaccacacagtatgtgtgtttggggaccttctattcatgcatttctgcacgtgtatcggcacagttagaaaagcctggtgtgtgcttgatgccaggctgtacctggacatcagtgtgatgagttcagtgccctgtcagggttggggcatggctctgaggagggaaggtgctcttttggcaggcagcctgacactgtaggatgcccatgcacactttgctctgtatcaaatgttttgccttgcctgtgtgcctgagcagtctgtgagagacgtgcgtggttagtaatatgcggccctgggcgcccctttccatcgaaggcaccaccaagcattttccagaagttctccttatcccaggatatcagagttccaaattatgagggatctcgctccttaacaagtcttcctgtgtgacttctgtgttgttgtcttagtagtacagtgattagtggcattgcctgttccaaagccatagcttttagtagttgtttttcttagagaggtggtgttaaaaaagacattaacttgattagtgtcaggccccatgatgaccacatgttccagtcagtgagagtttggaagtaagtggaacagaacactaccatctatacaccaagggcctgtgctgagtttaaatggccacctccttttgcttccctcaagccacccatggcctgtcactcagtactgtaatatagaaagaaggtggcttgctgggcccctttgtgggttccccagaaaccagcacagatgatgctctgggagtgggggtggagtgggggagttaggactaggtggaaagatggacagacaccttaagtactatgaaccagatatagcatggtgctgacctgacaagcccagggactgttatagttcagaggggtctgcaattgtcatggctggatcctgtagggcccccagaaacaatccagaacacatttccaagacaaactgctgctgctgctaccaccaccaatgatggggtagaatattactttggaagacagtaaaaggcacaagtgtccactttgcacaagagatcttgctcatgaatttggctgagacaaagctgcccttaagactgagagtgttcaccataacctgggctcctgtggaacttactcctccattcaacaatattaagatcctgtgttaaatttcccaagaaaaggaggacaggatggctagactttttctggaattctggaccagaattgtctttctagaaactttaagattagcagtgtgcctctcaaggaaagagtccctctgcatctgaggatggcctccaggaatgccatgaaaaacagagattgtatgttaatgtttgtccatgttagagattacaaagtagaagtcttgttgctagttcatgctctagcacatgcttctttgatacttgtagtaatctttagcttctttgtttatatgtagatgtatgtgtataaacttttcagtacagtaattttacatctttatgtccagatatatcttggggagataacagtatggatagtattgttggttagggtgatagaaacaaaagacatgcccatgctcttgtttactgtatgaagaacaccaccttcaaacggaatgccaatatttatttagttctgagatcagagccagggttttgcacatgttggttgggcagctgctctaagacagagccacatcctaacctctgcactgacagattcgagcatgaatcctaaattgtaagtgtactttattctcttttggtgactagagttgaattttttagtaattaaaactctttctgggactgaagagatggctcaacagttaagttaagcactggctgcatatcccaaggacttgggctaagtttacagcatctacatggtggctcacaacttaatgtagcaccagttttagccgatctgatgctcttttctggcctcaggtactccatgtatgttctgcacaggcatagctacagacaatactagacatgataaatgaataaatatttaaaaatataaaacagtttcttttagatattttgacatacacacaaacaaacaaaaacaaaacccaaaaaaccaagaatcttacttttgagtgcactaggtagcccagtggttttaaaataagaccaaaagtttactttcattgccagtagtgtgaaagggggaagtcctaagtgttatttctgcctttaggtctctgagaatgcagccatagtcctgacctctgaagagagctctccgtcggtagttgaaggaaatgggtattttcccttggctgttcccatgtgtggaccacttcatacttacgtttgaatggctgaggaatactgactagacgaatcacaacctctccttaggcattaggtgttcgtctcctctcatagagcctgctaggaagttctccctggatcgaatggtgttgggacaccggtggtcaggtctgcccttaggccattcagctttctctggggatgtggtctagttaggagggtggctgggaccggtcttcatactgtctgcacagaagggaatgcttactgtgtgagaaactaaccttcatgaggttgaccccactccttcccgcttacacacttacaagttggtgcgcttactctctagagcagccatttctaagatcctgcttgaagtaagagttctgaagttgcttactgggattgctttgaagtcttttaattcaaatgttctaacatgaacacatcctcatgccccctgctcccggtccctgttgtcctgatagcactgtagaaggggtagggttagaacgtcactgaggcagaaccatgcagttggtcgagttctctgtctgctttccctgtgagctgtgcaggagattgcatctgtgctgtgtgcagtttgtcccctgcttgtgcatgtggcatgtggggctcacacccaggagtagactaccaagcatagacacatggtcagccgtagtagacagttacgcagctttgcaaaccagagcccactgtggcagcagtgtgtgtggtggcttcttgtgcttcgcccttggcagctcctggaatgactggtcttagccattctggtatccggtgttttcccagtatgggttcagtttgaaagagttccggcgtgaatgttggactcattataaagtgatacatagttatcaatgtttacacgcatagtgctctgctcctgcttgagagggaggcatttagagagccatggaaacaagcgcagcacctcactgacagcagcccctgagccatgggtaggtttgtgggagtgctccagaactccttagagggttgtgtgcagcctgagctgccactacagagtggaactctacagagtggtggtatggggtggagggggctgagctccttggggatgctctctttcggaagatgctggggccctgcatccttcccttcctgccttccatgctgtggatgcacctgagcactgcgtttccacctgctgctctggaccactgcgatggccagtcttaagcatcaactagacagcatccggaatcaattaaaaccctggccactgggcatgcctgtgtgggattttcttgctcggatcatttgaggtgaagaggcaccgtctggtggcagcccacataaaaggacttggaagaaggaggcttttgctccctgcctgcttgccctcacccttgctggtgagttggtccctcttgctgaggcattccctccctggtgttagaacctgcttcttcgggagtcccatagagatggaagagcagcagccccaggagtcctcctggacgcccatcatggggctgagacagctgagacatccagtctcctcaagggaacaactcttgggttcttggtcgttctgttggtagacatccattgttaggccacagtctgtaagccattctgaaaaaaagttgtgctctctctattttattctaccagttctgttcccttagagaacccagaccaatacaaccaccacagcccctaaagcactgagccaagcagctgcctagcgccctggagactcttcccagtcacttcctccttccaggctgctggatttcaggtgacacagaggtgtctcacagggtccacaaatggagaggcaggggaagaaggaccgtcacagagtgctacctgggttctgttttggatacgccttgttttcttgcacacagtgaagcaagggtttggatcccaaagtgtggaactccaggcacacagtagcaggtaacagaaagatagaaggcagctacactgagtttgcacgtaaggccatgtacaacatacttgagtgactctcagtagcaatcctttcttgaattatttgctttagctcccccaaatgcagtgcgttgtagcactctgtttgtgttgggctggtatagaagggcaggacgggagcttcctgtggtggatggtggtaggctgcatgacacattccagcattgttctgctgggatggcagggctgctgtgaggtacggcccgccttgctgctggagctgggaactgagtcttgttcttctcttgctctgtgacctgggcaagtgtttgccttgccaagcttatgtgaacctagaatacaaagtttgactcagcttggaagagaggaaatgcttgctggagacagtgtaggagaaccatccagcctcaggaatgagatgtgtccatttcactagacctctgaggcagtgcggctcagtgctctgctctgagaagttgtgctctgtctaacagagctgaggttggctcctcacacacctaccgtgtgagagtaagcaggctttctttttctctctctgtccttgagttcctctcccccgccccttgctttgctacattaaatgcccctttaaggtaccgtgaatcaggcacagctgttaaaggcacacagcagggtgtcaacagagggagcacctctgttgtgctgtgactgtcaccctggctgctgctgcctccaggcacgcgctccatcctatctttgcttgttgcctcagaattagaattccaaaaatccctcaggcccagttttattctggctcctccataaagctcgatcctcgtacttattagaagtctcagcttgtctctgacacatctctatcttgtgtgcttatctctagccatgttttatatgtgccacggactataaagtccttgaagatggaattttgtttaactcctgtttccaagaacctagaagtcacctggtaaaacagaaaatttgccttggagcaactaagtgtggtttgtagtttgactgccttagggcgtacacagtgcacatctgccctgatgctctcagagtgtaggacacacagctgccctgatgctcacacagtgtagaacacacaaagttttaattgctttcattgcaaaaggcaggctagaggattggactaaataatatagaaattatgtgatagattcaagattgatgctttttctttggctaagaaaaaatttagacaattttttaaaaatcttgtaatcatttaaatttcaagccatttggttgtgggaaatccacccatttgtgatggtctccacttagacactaacaacagtgacttcacactgagccattccaaaagaggctattgctactgtccagaagtgggtgctttcagtggtgtcctctgctgaccggctgctctctgtgctgtgcgggaaagcacgttaatgacacagccctccaatcagctgccttggtacaaagtgccaatcctgggtggaaaaccgagacttgctcttggtgtcccagcaaaggacaacctggtcatttctgttctgctgatgtacagctgtcactgtggcatgcatgcttcctttgtagtcagtaatcacgaggggccgatactaggatcgttaccttgggaacaacacaggaatgctagtgtgtctgccctctatcctaggtcctaaaatagtgtaaacacacagattttaagaacatatcactcgtggtggcggcagctgtgtgcaacttaggcacttcctcgccttccagctaactgctgtgagagatctcagatgtgggcctttacttaaagaaaaggctttctggatattttgaaatctgctttctgatttatttattaataccttgtcactcgaagagctgtccgtgctggcatgagttgtacttcctgggccagtctgctgctccagtcacccttaccatccttaaattctctcagagtttcctgctgcctcaagggtgttgcttagcttaggtggtggaagagtggaggcaggaattccatggggagctaaccttccatagggaaggtttgctgatgcagcctagtagaaggggtggtggaactactcccgagacaccctgggcctgtttgaagaccctgcagaatgggggggggcagtatttttatttcattatgctgatctgttttctttaatttggggttttaatcactgacacagttttgttgcctatgaagggtgtcaagttgctagtactgtttaaatgacaggcacattgggtcaggagagcctgagcgcagaagcacatggcagtccctgctctcccagcgttgacatacagtctgtaaaggagctgccttgacaggttgactttgtaatgcatgtcccccttaaagagttccttttggggatggcctatgcgggtactggatagaaacaggctttccctccctcctcactggataggaggaggctttccctcctctttcatttaaaagctttcagatacccgatgcataggggagtaaacgacactccgggtgttagaatcctgtagtggggcgtgtcccttctgagtcagagcagtgtatttagtccatggtaatgtcttgtactgctgcacatatacattgctaaagggtctgcatgttgaaggctcgatggaggttgttgggtgatgttaaattagtctcattaacccggacagtacttgaatgaaggacaaaggcattgaatgtccatccagactgtgccaaggtggccagtcttcctcagtgtcagtttgtgcagctatcatacctgcttggcaatggcttcccagcagtagctttgtgtaacgttaagtgttcaatggcttgatggactggtgtttcactaggtgttgcaatgattcccaaggcctttgtgattgttttatttagttttgcatattttgattttttttattaattatatgtgggtgttttgcctgcatctctgtgccacctgcatgcagtgcctgcagaggccagaagggggcaccatatcctccaggactggtgttaacagcgggctgtggaccacagtgtgggtgctgagattcaagcctgggtgctcagcaagatgagctctgatcctccgagccatctctccagaccctggtttctccatacttagtttggacttttgggatagcattggaaatgtaaatgaggaaaatacctaataaaaaatatttaaaaagagaaaaaaacataaagcaataatcaattgttatttcttttctctgagcgaagataagccagtgtgtgtgcttcccttgcccgggcttcctgaagggctgtggatacagcagtgtgaggcagtgtctccgtaatgcctactctgccattttgctttgtttttgtgaatctgatgccttcataccaaactgaatgagagtatttgctctcacaagcaatgacatgtatgttatagcatatcctattatgaaaagataaacctgtatacaaacggacctctgagcagtttaaaatcattcattcattcattcattgtgtgtgaacctgcttacatggcacagcttatgtgtggaggtcagaggacagcttgcaagagttgtctcccacacataggtcccagcgtaggtaggcttggcagctgtgttgtctttatcccagccatctcactgacccactgtgggtgagttgtcagggactgctcccagggctgcacagacactacgcatccctcttctactactgaactgtctagtccaacttccagcagtgctgtgctctgcaagactgcctcacagtgagctcagagcagtacgtttccctcttggggattcgctgtctgagggagtccccgtgcaggagctccttatatctcagttaacccacacaggggcttgttggtttatccgttgtcgtcattgcactccttagagatttgcgtgggagccttgtagtgatgatgtgcagggattcttccacacttggtccgtctaaatcttacatagcatttgacagcgtcttctaaagggagaaccaggaagaagagagaataaacccatgttaaccacacacactttgtcagtcaccaggaagccacacgctgtgtgactggaggtttgttatgacgacttcatatctaggatgaggtcatggttcccatcatgaaattgggttcacttgtttgatcttgttagcggtgtctggttttattgagctttgaaacaggaacctatttccttgatccagtcttgatctgggcggattagtgaggagggcctgacatgaggactcttccatgagtatagtgttgaccagattctcccattgtcatgctccacatgtccagagaagtagcctctctgtgacagctcatcttgtcggctttggattcgctttgcagtcactctctctggtgggcagagctgatgggcactgtgggctttcatgtatagactcttcagagaaatttacttgcttaaattaaaaaacaaaaagagcaccacttactcatggaccactaaaaacaaagtattttagctttgaaatttctgaccctgaatcaggcattggtaactcaagatgtagccaccacaatatgaagtcgtctactctcgttctggtggagatccaggtgcaaagcagaaagctgcctcctttgtagctcctcacagggagacgcggcgttcacaagagcattgtggttctgagctcagtgcaggacttggcaagtttatctaggcaaaatagtctgaaatgtgtgcatctgttttgcatgcagtggtaaggctcttcagactacccatgaatatcatgtggaattaaccccactaattagactttagagttgttcaagtaaaaggacacagccttatggcagagtgccaaacacatgccactttgaatcaaatctctgcctttctgctgctcctcctctccctgtctgcatgtcagctcatcctgtcagggtgggatgggagagacgggtctacaaacacgagcatcaagccaggacaatagttttgttcctggataagtattttactcaaggccaggatgaatgcttgcacacatgtatacctcatgagaagacaggggaagggtgtgctgttggcccacgttgagttagcttgttttaattaaggagacaaagacatagacattgtatgctaacatggcttagtgcatactctggttttgtgtgagactactctgtaatgcatttcttcttctattagcaaatgtgattaatgtggcacacagtgttaactgtgctctctccccaaagacatcagatgggaggcagcatgtagaagctgaatcatttggagaggctcggtgattgatttaaacataaaaggattaattggtccctgaaccagactattaaaccgtactgtgatcttgactgaaagtgggagaattacaaatgcattgcatagaataaattaatacatgtcatggctttaaccctttccctctgattgctttttgtggttttatggactatactctgttgtgtgcttggtggtgcagaggggactaggtgtggtcctgatggaataggatatggggcggagcgagcatcagggtccaaggaatctggggcaatgctcacagactggattttctagcaacttccacctgtgaagagtctgagcatcgatgccaattgttactgaacagggatctaaagttctcagtctgtgggacattgataaagaggaactgggttaatggagcccttctcccctgggcagctgcatggaaggctgagctcctgaggatacatgctgtaagaataccagagccagagaaaactctttttctcttgagccaggcgtgtgctgctctctgaggaacggtactcatttgtcctttgcagggagaggaagtgtgtccactcacattgtttatgttgaggttcttgtgtggcccgctgttacagagtcgtctgggtggcagaacaagtaagtagttggttcagaggcatttgtgacccatgccgtgtgtgagttttccaataacatgactcccacatttcagagtggagtcttttttttttttccccgagacagggtttccccgagacttgcatgcacacataggtgtgggggatcacttgcttgaggttttttaagacattgtgctgtagaaatctcagtggttatctttgtccatttctgactatggcagcatcacatcatgtgcagctttaaatggcatgccacgtggctacttgttgaggtcacccattgatcccctttgctgtgctttcagctgttactgagtcgggatagagtggccttctctcctgctctgagcagttccttcctgatggcttgctcactggagtgatggaatttgggtactgccagttgcttggtagaaagccagagagcctttgtgacatctagtctttagaaaagagccaactcgcaccacagacttagtgttctcagcacggtgaagggagatgacaatcaggagggcatgtctgaactcagtgtaaaggggatggaggattctttcatttactgcttcattactgttagcagagttggtccgtgccattgctaagtagaataatgatgtttattcaggtgagttgacttcaacattgtctatgattataaactttaattgctctcaatgtttttgaattattaatcttagtaaattttacttaatagaaaatctttaaagacagatatctgaatggatgagtctgacttgccttaaagtttagtaaatttcagatggagttgtgcacacagggatggagaagtcaccttctacaatgacaaggaaaacgaaagggaatctcactagcttctttcttctctctgcccatggctgggtgctgttggaccacaaggaacacagctgagttcttcctcatgctctccctcctgagaagagcccaagggaggggctctccttgctctacagggctcatgtttctcacctggcttccgatgtggctctgacttactgctggtgtcctgccctgccctcattcctgaatttcatatttctgtcttactgcctctttcagatgtgccttacctgggctctgctcgccagtgctgccccctagtggtacttcctcttcctcggactgctctgcctgtcccttgtgtcactgtgcacagtgctgttgagaagagagccatgcagaggatggcagtcctcagttgaagtcggccccatgcctttgtttacggttcacaggctgagtgtgtgctctgctcagcacactccgtagcctctcctgcctgctgctttataagatgaacactcttaagcattctcttccccacacattcaacgtggctctggattctggcctctgcccagtccgcctgcctccctctttgctctcttgctgctgctcccttcgctctgaactcttgagcatgtcatcttgtttgactttgaccgcataacccgccctcggcctccactgcacatgtgtgctgattttctgaatgactttacacggactctttcttcctccttggcctgcagcttctgtggtccaggaccctgggtttttggcagtgtaggccccagagcagtgcccgtgcgcaggcactcaggctgcatactggtgcgatgaactagaggttgcctaagctgcaggaaatctttggttagaactttaaaaaaacaaaacactttgcaggatagcactctcaaatttaaatgttcataattgtaaggattctgtcccctttttgtagcaactagatactgagtgtgagagtgtgtgtgagtgtgtatgtgtaaataagcactgccatttactggaacatagattctttgtaggtgcagtgcgcccaaggcattgcctgtttcctgcttgttcctttacttcagtgccgatgtctcctttgtcctgaataactgtctttcaggcagtcccaacattctcattcattctttctctctgtctacctgcctgtctgtctgttgaattttcccactctttgaaaagcttcatgaggttttcatcagtcaccatttgggtgttgaccatgttgtagtgcatagccccctttggccttccgacctctgacactcacgctgctcgaggaattagccatgacatctacgttccgatggtgctgtccaccgaaggcagaggaagccatgtgcctggcacggccgtctggcactggaagagtgtggagataaatgcttgctgatggtagcaccttattaaatgagggtctgctcctgttttattttcctcttgctggggaaactgtggccttctttgagtactggtaagtgagaggccgcagcagtgttgagttggaggccctgctgtctggcagacacttgtggatcttggaatgcctttaaaggacttgccacaccacactgagtgtcagctactcactcagagatctcagaaggtagaaagtgcatcctggcgtggttacttcctttctctgctttggaagtagtgtatttaaagacataactaggaccattactttgaatagggacagaaaggaatctcatgatattgtattgatttgtgtatatattagtttccactaagtaaataatttaatagaatagtcatcaaatgggaggggcactctggcttctttccctgccgtgttcatgcttcctgtttgtctcagagtggctgatccatgccctgaggaaagggggcgaggtcatgagagcagaaggggcctggaggatggcagtgtggagaggtccctgtgtgtgtgggggggaagcttccgtgttgggttcctgtcagggtttcttttgtgtggtcttggctgtggggtggcttcctgcttgctgccgttcacctgagcgatggcagcatattgcagctcccatctgctttggctttcttggcaggtcacttctgctgcttgctgggtgcgtagagctaggcagatgtcggaggcctgggctacatttcttttaaactggcaagaactctactgtgcctaccacttaacctatgagtgtcagatcctgttataatggttgtgtgttcttgaaaacataagcaagcatcttatggtttaaaacataggataaaatagacccccagcttcacaatttagcagtgggtgaggtgcagacaggcagctagacctgcagagtgaggaacagtgatgggaagtcttattaggttcttcgtgataccgtctcttttctacatttttcttcttttcagagtaacccaaaaatcttctgagagcccccactttgtacttcttggggtaaggactaagcttgtgcatttacttgtttactctttgaagctctgactgacctggaacttcctctgtagtccagactggcctcaagtcagaaagctccaccttcctctccctctgggtactggattagaggcgtgctttggtgactgcaggtgatccacgacagctgccatttcaacccgggttctcccattggggttaaaggagctgctagagactgtggcaaccatctggccgagttgtgacctcaggggaaatttgaatacaggactttgagaagccttttcggatttggtgtgctgatatctgttgcagaacacacagcatggaagagagcagaccttgtagccattttgctgctttaaaaacagtcttgtatagctttgtccatcagggttaaccacaaatgctcacagcctttggatcaaagacaactgagttataaagcttctgttaagtgaggtcccaggaggaacacgagtcctttaagtcactaggacacagctctcgctttgacacagatgtactatagtgccagtccaggagccctgcagactcagagaactaatgtgcaccacagggacactttcattgccagggaacagcttagcactaaggataggatggtagaaaaaaatccctaattttgcacatgtgcacatttttgtatgcattcacacacatgtaatgtgtgtgcgtgtgcgtgtgttaacaaaatccagtaagacctcactgcattagaaggatgcactcgataacttttttagtagagtgattcttcatggactctgatagtaatttaatagttaagtactgcatcatctctcataacaaaaacatttgcagtcatggcctctgaggtggctcagtttgcgcccagggtcttgtggtgatagacggccggctcctacttgctctcctcctttgtgcaccaggtttctgcaggcacacacacaaatataactgactttaaaattgaagaaaaataaatacagataacagtatttttattgctttgtaatgatgttaattcattacgggaaaagatgagaattactaagaccctgtgaaggcttctgtagactactgtgcccaggtgctgccttctgaagaagcagaggcctgaccagcaagcgacactgttagtaaagtctgagctgccagagggaagagcatttctcaggaaggagagcagatatcagagagggctcatagactgaggcaagaggtttagttaatggcaactcagaaaattccagagtgataacttgattacacagaaagcatttaggtaaaaattatctgcatgcattctgcattgtgaatctgttatcaaaacactttacacctttgaagagaataggagcttattaatattcatagtgcattctgaaagcacatataatagctgtgttctgagaactcagctcaagatgtaaaagaccctttaaaaatactgtaggggagtggggctttctcctttgcagttctgcaaagccttctccagacacccctggtctaaggcaggccagtcaacagccttcaaaggtgccttcgtggtcaaaaccatttactctaataggaacctttaaagaaaaacaatctttcaaggtagaacgctctgttttgtacctcgctgtactgaagcagcccgatctgtattgtgttgtgctgtgtttaaaagacagtttcctaccaaataattgaggctggactgaaactcaaccctttccaccctgtttacgtattttatttattgtgtatatttgtgtgtacagctctgtggaggtcagaggatagcttacagaagttagttctctccttctaccatgtgggttctgggatccaactcaggtcctcaggcttggtggcagcctccttccctcagcgagctacttcccagctgtctgacttcagctcttccctcctgccgcagccccaggtgtcacccacacattctgcctctccgcagccttttccatgatgagtgacatgaactcagggaaagacccatatagtgagaattcgggattttttgtttctttaaaaaacacagaaatattgtcagaatttttcattttaattccaggtatggggatgaggggtggctttgcagcagctgggtatgatttgcctcgtgttctagcagaggtgtggttttgccggcagcagatagtttttataattgggtgacgtttggaattttggaaaattttcagagggtatgtaaatactagagccctgagaagtggttattggttattcaggggattggttgcagtttgttagtagtcatgctcaaagaaaaaaagaaattaggttcagagatctccgctccccctatcgttctttttccccttatctaagtgatagggggtgaaatggggcggggggtggtagaataaggatggaaaaccccaccaggcagcaaagacagggtacagttcccacggccaggccctgggaaggactagccaggtatttttctcatcatttgttaattgttacatagttcaacagtgaattaaacccaggtctgaacactgaaactagaagcgcatttgctaacacagacctgtgatcccagctattatagaagctacagcaggaggactacaagttccaaagccaactgggctgaagcactgggatgcggtcccagaagagaggtgcgtgacatagcacagcactgggctcacctcaggctcttcaaacaaggaaggggtttggtttcagcctctcctcaagaccccaccctcctaaccagtcccacacccagcacatctatcctgaagctcacttccttcctagggctcacccagtgtgacagtacttaccttacttagtctcacagcctgtctgtcactccttgtggggaaggtccccatcacacagacagaccttaccacgctatgactgaatgaccttgtgttttgacccagaactccagatgcttcttacttagtatcttagaaaaatggtagaaatgtttagaagacaggcaaaacctgaagaggaaagtatcacaaggaaaatgaaatactcattcagtctctgctcccatcaagccgatctgagcgctgctcatgacaggggttaccctgactcaagagtcagtgcggcgagtggctcaggacagagccctctggccaggccagagaagcaccgggggccagatttggtctttacttcgatttaaacattaaagatgaggaatggacaggccagttattctaccgaaagagcagcagtgctagccccaggtgtggtacagctctgtaccagtgctgagtgtatagtccagcagtgagtatgcagcccagcagtgagagtgcagaccaggagtgagtgtgcagaccaggagtgagtgtgcagaccagcagtgagtgtgcagcccagcagtgagtgtgcagcccagcagtgagtgtgcagcccagcagtgagtctacagcccagcagagagtgtgcagcccagcagtgagtgtgcatccctggaatgagtgtacagcctaggagtgagtgtgcagcctaggagtgagtgtgcagcctaggagtgagtgtgcagcccaggagtgagtgtgcagcctaggagtgagtgtacagcccagcagtgggcagtagtccagccagggggggctgctgagctagtgaggctttcctgactccacgcccttcctattacacacctgtacatatgctatttaaaatgctggtatcggaggctggtgagatggctcagtggttaagagcactgactgttcttccagaggtcctgagttcaattcccagcaatcacatggtggctcacaaccatctgtaatgggatctgatgccctcttctggtgtgtctgaagacagctacagtgtactcatatacataaagtaaataaataaatctttaaaaaaaacccaacccactgttatctagggacccaccacagtctaaggaggggttgagggcctccactgcccacagaccacagtgctgtatttacctgaatttctctgaaacaaaccaaaccattttgacagcttctttgtagcttccaataaaaagatactttgagggagtactctgaactgagcttagcaatgggccctcggcagcctctgagtctggctgtacctagaggaagaatttacttttatgaaaacagttcaataaattgtctcatcagtaacatcaaggtacttaaaatggcattttatgaacaaactccaggtaattatttcagcatttcttgcttatacttttcagacattaaacaccttacttaggtggaaaatacaaagaacaaacttcaggaggactggtttgtgtgcgtcattgtttttcttgactgtgacttgaaaaatgaaactcagggcctaagagaaacttagtggtccagagtgcttgctgcgcagccgtgaggacctgagttgtgatcccagcagcagcagcagcagcagcagcagctgctgctgtggctttacactcactctcgtgtaacaccatggtatatgtgttgggaggcagggttttagagggagtcactggctgaaggcacagggcagagtgccattagacaataggagtacacacagtcatatgtgtgtgtgtgagagacagacagacagacagacagagacagacagttaggaaaggtttgtaaagtaagagaactgaagccagcagctcagttgatcccacagacttagaagctcctacaccactatccttctgtcatcagctaccttcctgcttccatttttcttcctctttctcttgtcttggggtttgttaggatacaaaccctgtgagggccagaggtggccccacagttaattttgctgcccttgtttgggtccacgcacccacacggaggcttacaaagctgtagctccagctccaggtgcccagtggcctcttctggcctccacagactgatgtacatacatggcgtgtatagactcacacgggcaaacataagataaacagacgacagcgcccaacctagagcatgcatgtaacatcatgtgcactagttgtattggtacagtcccatgttttcactgtcgattcacaaatctcattacatacacagtacaccagatggcaggggtctaagtgaacagccatggatttgagctagctaatgggagcaacattgatttccaagcctggttgcagctgtgcccttgcgtagaatgcctaagaactcagatagttttcagcctgtcctttctgtaagaggagggagggtcttagtaggaaatggcctggatggtactagtgtacctgcaatgggcaccgagcctgatgcctgtgtgcatctttggagacaaggggtaagtgggtaacatcacaccagggaactgtgacttggttacctggtgagatgacacaagacacctttgtcactttgccagtgtggcctttcccaccattgtagcagtgccatggctaggggtgcttgtggtttgttgagcacctgaaggacactacagcagcgagaggcaggacctgcctgatcttacctcagtagctttctgtgtggcaaatggcaggtatccaaagatagaaaagagattgtgaattatccccttcactcacctcacagtttgtgggcgagtggctaggctttgcagcacattgtccaacagtggttttacagtagtataagcaaactgtccatgcgcgccccccccccccacgcctgctttctacttggtagaagcagatacactgtctgcactatttcagaacccctttctctctcagaatagtttccactgcgtcaggctgtgcccacgtcaggctgatcatgtaagtggtagcagaatggagtctctggaggcagcagtctgtgcctgtagctgcgttgcacatgccaggggcatcctcagagaggcggtaaactggcaggggggacaggcaccaccacttctgactgcttcctccaaagcttgatcttttcttgtattttaatcaatagtaaaagtaagtgattgactcagatcttctccttttccactcctgcttctctgttctctgtggggtatgtgagaaatgcaggcgaatgctgtgatgtcacccaacattccctgtactcagctcacttggtaaaacaagtgcatctactctctgcacttactaatcttgttgagtcaagctgagcttttgcctctgctgtctgcacacatgcctgctccttgtttcactctggatcctgccctggctttctgttcccaactgcttccttcaccccttccctcccgggagcccaagcctggtgctttgattgcattgttcctgtgcttccgtgtgagcttcttgtagggtcgggaccaccacccaccagcccgttagctctctgcaggtgctttgtgcttactggcgggcagctgggcggcttcagctccatgcagttgataggagagctgtgctgtgtagctgtgactcccaccaactcctataaactgtggtatactgagatagggccgtggataggacgagtcagcccaacccactgactgagagatagctgatccagggtcagaaaactgcttaggttctgttgtgtgctgggtagagttcatgtttctcatcactgcttttgtaaaggacagccagtcttactattgtatgctttaaatgtgttcctttttttgtgaacttgaaatttatggatatcaacaagtctttctgagttcttttggggaaaaaaaaatccccaaatgagacccccttttctttgttgtgctgaatatctacgtctaagagcaaaagtgtgttctattgacagaccttcacattcttagtaaagcacaaaccaccagggtaccgtcctcagacaggaccttgtgcgtcccttgtggtatcgatgtgcttctctcgtttgctgtaaagcattacgattttattcttgaaacaagactgcctcttttgcggagtgcttctcatatgccctgttgtcattgtgtggagacctcgtgaacaggagctgcttcccagaggcggctgcgtcagcggtgtggttttggttcctaggcagtgttcttgaggacactttggggaatgagggtgtattactggtggctcaggaccaaagctaacaactttgaaagactatgccactgtagtaacttttccctccatggcacatcaggaaatcagtacataaatgagaagaatgtaaactgtaaaaaaggatgatgtgatagataagcctcctacctcgaggggagctgtcatcaccatgccgtggtgtgggcactgctctcattcggttctgttgttgttttgaagtaggatctcttagagtagttcaggctgatctcagctcctcagtagatcttctgcctcagactccaatgtgctcagatgacaggcctgtgccaacctgctcctaccatttcagccagttttatttaaccttatataatgctctaaactgtgtgacatttttactacgctgaaccccaaataaataaagccattgttatctctacaatggggtagaatctcagctccattgcttttgatcttgtccataatccactttaaaagtaatacttaaactttctgtttcctctcttatggagctaacaggggttgagcgctcactgtgcaggaggccctgtggggtctctggctgacatgggagtttcatgtgtgaataggggacatcctgttgagcacctgtgagtgttaagaactaacatctgctgggctttgacacaccatcaactagaggctgctgtgtgtccccagcagatgaggggcatctcggctgggtggccaagggcagagccgcatccagttgctgcccagtgctgctccctgccgcttgtgaaagcaagtgtcctgtttttctttcagtgagcatctttcctgtgctttcacattcttccttcatggagagagtaacgtgtgcacaagtgtggagatagctcagcaccagccgatctatttgatcaacgaggaacacttacacatggcccaatcttcacctgcaccatttcaaggtcagtcagaggccacgtgcatgtgctacccacaccagcgtaactgcgtgcagagctacctctccccgtgggatgtagtaggagggctggggtatcgagggtggtgatacggtggagtgaggtcttgtaggaggggaggcttgcttcaacagtggtctaaagtaagcgagatcagctaatgacatttctcaggtaagcacatgtctaacgtggccttggtaaagctgtgtcatttcctttggaacaaactaagattgacaagcatcaccggccagagtctcccatctcctggccattgcacacagtcaatgaaggggctgtggttgtgtctgccaccaaggctcttcagggaaatcactgacaaaaggtggttgctaacaaggagagctggctttctgagtctcttccagtgtacagttttgttagtgaccttactgtcagcattatttcctttaattgcacactgtggatgagtatctggctatgacttgacttcatacactggtggtctcatcactttttatctttatctttgaactagaacaactgattttgattccacaaatctatatcttaatcttaggaattcaggattttctatgaataatagtcttgaaatgttataaaccgtgaaaaaaatctttctggctcagtttgatttatcatttctaaaaatgtctggctgaaaaagacatgacatacagaatgtaatagcttgtccccatgtgggttctcatctattaaagaaataataaagataggttcaccttaagttgtgaagataagtccaccttaagtggagagagaccttggattcttctacctagttctcagtcttaccaagagataggcctgccaccccttgtcatcattgtttacattctgctagactataaaagccaggcagccggacagggcagtggtggtatgccattaacctcaggactcaggaggcagaggccagtggatttctgagttccaagacagccagaactacacagagaaactcttgtcttgaaaaactacacacatgcacacataccccaaaacaaacaagtataaaattcatgtaaaatttaaaacaacccaattctcaaaacacaaactaaggcgccatacagcatgtgctagtgccaatggtcagatttgtttaaatactgtgtttgagtttgaaatgtggaggaacgcctggtgtcatctccagtgttctcactgaaaagcctttatgaagataaaggtcgctagagaagagaagtagctctaacctcggaggttggatggagagagagtgtgctgggagtaaaggtccctagagagcacgtgctttaagtcagctctgtctctctgcccccgtggaatacattacccagctgctgtaaaactggcgctacacttgaaagagagtgtctttatataacgcagtaatatgggaaataaataaactccaatagagacattctctaaatgtttttaaagttgataaaagaaaaaaaaaaaaaaacgaaaaaccacctgaagccaggtgtgggggtgcatgccagttctctccgttttaggaggatagagaattccaggtcagagtggattagagataactttggctatgtgagatttgtctcagaaagccaaaagggaggcgggggagattggctcagttagtgcagtgcttgctccccagcatcagagcctaagtttgttttccagcatcaggtcagagctggatatgacataacctatgtcctcagttctggggctctgagcctggcaaattcctggggctttctggccagcgggcagtctagccaggtctgtgggctttgtattctgtgagacaccttgtctctcctgcaatggtggagctccaggaaggtggcccagcggggaagtttccccagataagcactcaagtgctagaacagacttctgcagaccgtcctcttacctccatatttggacacacaaattaatttaaaagacaaagatgcagagaggaagacctctgacattaatcctggtctccagactcacaggcacacacatgtgtgcacgtagactgcacacatacatgcagtgcacacacaaagccacagggaaatggggcacttcccactctgagttgtctagtcccctagaaaggattattccgaagacttgttcacagggccacagtgtaagtgccatggtagcctagcttgcttctaactccaccaaaacaaccttggcttcaaagactgcaggaagcagaactagtgtcagctccatactggagttcacacggcctgagcatgctcatcatgcatccctgaagatgcacgtcatgctctgggcattaagatctgctagtaggcgtttattgttgttattatatactctatattacctattatactctgattattgcatgtgtagggttctcaggatccacatcagtgctgagtgccatataggcctgggtccatgcccatgttgatcagccattatccatacatagtcatgaattttaatgtgtagttgatttataaagtatataatgatagaattaaaagtgtaatggtatcccaacttgatattttagaaaattgatgtaattaaaatacatataaataattctaaagtaaattttgaaaccacactgtgaaagacttaggatataaatcaaagggcatgaagtgtagtgctctcttttaacctaaaatgaccaaatagctaggattatatgtgatacctgtctctcctttccgtagtactggtgagtccttacggcttaaatggcacactaacagggcatgcatacaagatgtctgacccggccgcccgcaagctgattgaggaatggcactgtttctacccgatggtgctgaggaagagggaggagcctcgagaagaggctgagctggggtatgacgacgacttcccggtggcagttgaagtcattgttggtaagaaagtgtttgcctggggaattgtgttttaactccaatggcccctgcttcctgtcccttgtgctgtcatggtgactctggcacacatgttcaagcaggtgtgcttgtgcaggacttcctcttctctgtgtgacctgctcactgagtcagtgtctcagcctgatccttgctgtctgtcatctctcctcacaggtggcgtccggatggtctacccttcggctttcgtgttggtctctcagaatgacatcccagttcctcagagtgggcacggcacagttgcacagcaggggcttggtagtgtgaaagaccccagtaactgtgggatgcctctgacgcctcccacctccccagagcaggtggttataggtgagtgcgacccagtgtgcccctaggaaggaggattcccggaccaccatcagcattgcagaatccctgatgaagtggtggagctgggccaaggggtagtgtgagaaggctgagtggctgtatctcagagttgtgcctgtgccaccttagtctctagtccatggattgtgttggtgcattccttatttctgcacacacaattaccctgtcacacgtcatgtccatgtttctgcacatgaacaggaaactatatatgagtagcctgttcctggtcttttatataaacaacagtggcaaatacgatgtgaactttgtgcctcagtggccagatgcctgagacgcccgtgggggaagaggatttgtctgactcccagttacagagggagcccactgttgctcggctgcatgcattcagatggagcagtatgggagtgggaagatgtgggaggcaattctcagtctcttgttggatacagagtaaagagcacagagcaggtgaccagggccaggctgcagtcctgagggcatgttccctagggtcttgctttctccagcaggtcccaccggcccttttaccactgctcagtgaactcggaagggttcatcctttgatttagtcagaggaactgtgtctcttgaggtgccttacagacatgatgccctggaggtgtttcctagtccagtcaaatggacagtcagagttaaccatcagaagccttggaccagggagagttggaaccttgcctagctgacagttgctacccaaggacaagtatgcagtgattctctctccattgtaagagagtgttagattagtgtgacactgagtctctactgatctgctttctgaaatnnnnnnnnnnnnnnnnnnnnnnnnnnnnnnnnnnnnnnnnnnnnnnnnnnnnnnnnnnnnnnnnnnnnnnnnnnnnnnnnnnnnnnnnnntggagagattgcttgaatggagaacaaacagtttgattcactttgttgagtgacagggctcctgtattaacactcctggctggagttagcccgttctggttggaaatccaccagcagttgtgtggtggtgtccgtagttcagagacgcttacggtgtcaggaagctgggtgtagattaggtgagagtgttttatgtgcaccatttatgggtcagatcgttcttgcccagagcaggtcgttgacgtgtctcttccagaaacagtttgccattgattgatttttattataagtaaattggaaaagaaaatacttctttattttttgtagtaatcatcaaagaccctatctgtcagtattttgaatattttaaatttttgtcagttttagtttatatgatagtatatttattaagtcaaataagagagagccatggagttaactagacattgcctttagactggccagtgtctgaaatgggaatggtaagagcttctgtcaacacgtaccatcacagtgggtgtggccagaaagaataggtactggacacacttgaggcaaacatcacttggagacaacccctttccgtgatttaatgctaagctcagggagctcacattgggagtaaggcaagcagttccagacaccagtgtgccaatgaattctttctcttgcttgtgcactgtgtgcctttattacacaactgcttaaatgagtgagcacagagctgcctctgctgctcaatctgcccccaaatatacggattgtgtttagttcctaaactcaggacaaataatgaatgtttgcgtctttaatattataattatgatctcttccttataagtgaggttgcacctacatggggtgagatgttgctgtgcaagtcttcccaagtggtgtgcacatttatcatgtctattgccttaggggaaacacagagaatcccacagacccaggctacaacttggtgttggtattggttggtgtgtgtgggaagagctgtggggaagattctctcatccctgtagatagtgttgttgctgggagaggagacagagcttcacagatgtgagtttggcaggtacaatactcagcagcctatgctccaccagcacccatggcggtccccatgcactaattgtgcttgctttccaggagagagcggaggtgtgcagagtgctgccagtcacctcggttcccaggatggagggatgtcaactatgcacagtccgaagagatcaaggaagacccctcctaaactgcacagtcacatggtccgtcgagtctggcgggagtgcatcctcagccgagcccagtctaagtacgtgttgtgaatgcgactagtcacagctccctgacggcaggatgaagagggcaagtcagtcacaagtacagctatgtgaccaaacccgaagagctccaaattgtcatttgtatgatttaagctcagtagaatatgatacaaaacaaagatgctaaaaagcagaacattgctttacctgatttagatattgtggataattttcaggttcttgatcatatgaaaattaacatggtgttgatgtgacatctgccaacagggacagctcagaggtttaccctgactgttaggtggcagtcagggtctggccttctttttgtgcatatttctgagtgattcccagttacagagggaaacaaacttcttggacagtcgtgttgacctttcaccagcagtgcacgcctggacgttactgtggtcctgacttctctctctctgtctgcctgctttatttcatattgtgtttatgtgtgtacatctgtgtatgtacatataggtatgtgtgtatctgtatgtatcgtgtttgcatgtgtgcatgtgtgtctgtgtgtatctctgaatgtgtgatatacatgtatgtgtacatgtgtgtgtctgcatgtcttgtctatgtgtgcatgtgtatgtatgtgtgtctatctctgaacatatacatattacttttacgtttatatgtgtgggggtattttgtctatacgtatgtctgcaccacttgaatgcccgatacttacagaggtcagcagagaaaattggatcccttagaactagagttgtggatggttatgaactagtgttctgagaaccaaactccctgaggcctctgcaagagcagccagtgttctcaacccctttgccaaccatctctcaagcccctaatattactattctaaaaacagggcctgtgggggccaaaagaggtgctggcacatgtgagccgccagacatgtgtgctgggaaccaaactcaggtcctctggtactgaccaagcactctcaaacacggagtcacctctgcaacctgtcatatgggtactcttcttactaataacttttcatttggaaataaactctcctaagagagtactgttcaaagttctatgtgtgggttcaatagcttccctttggatcaagcttttagcaaattgatgttaaatacttactttcagatgaattgattctagaataggccactgaagatatactagacaaactctaaaataattgtatggaaaatcatagtcaaagacttgaaaactgtccccaatcacttagaaaagattgtatcctctagcataattagtacaaatacttttccttctgtcttaactgcctagatagtatttcagttagggtttctttctcaccatcctccgcttttactcaaaagcagcctctcacctctgctgtttgtgacagacagatcgagtccctctcttactggccaagtaggagccaggctcccgggaagggagaaaaggctgtctcaaggattcccactgggccacctggcgtatctgcggcatcagctgctgggaacgaggagtcatagcactgcctcttttcttgtttcagtggcttgttactaatgacattaaaagtgttagaacattgcctttaatgtaggtgcttccaggatgatttacagtataactgagtatatataatttgtagatgtcttctaacagtaatttaaaatgttttacatgatgttaagtgactttgtgtgtatgtatgtacatatatatagtttgtgtgtgtgtgtgtgtgtgtgtgtgtgtgtgtgtgtgtgtgtgtaaaggatgggagtgggcaagtttgcatgcaagtatgtggttctaaacccaggccttgctcctgtaggcagaagtgactttctgaaaggcagcaacagggtgggtgctgtccatcgccgtgcgtgctgtctgtgtacgtgtaagataagcttgaactgcctctggtctagcagatgtaccttctcattactctgaaatcctttatcagcaggatctatgtctatgtaaaaaggattcacactgaagggggaaaagatgttttgtttgtagcagaatgagttagctcctgtgtgtacaaagtcattgttttgcccttcctaggaggagccagatgtcgacgcccactcgggaagaagaggctgctcacagtcctgctgcctgggattttgtggacccaacccaaagagtcagctgctcctgctccaggtgggtgtggggaggccacttcatctcagtcttccctctaaacgtcctccaggacggaaggaaggaaggaaggactctgtcttgtcttctgtgaagtggtgttttatcgccaggattcagagttcaggatgagcattggctggttgaagtcaacagaactttgatgaagtgacttttgccaggggctcttgagttcctttgtttggaggatctttgttactgttagaggcgaggcgtttgctaacaccccaagagccatagtggtgtctcagttgctcgtctctggagtgtttgcatggctcctaacctcccctttcccccaattgagttaataccaccactgtgtggtagtacaggacctatgtcactgccatgggcttttacggtttttaggggaggtaaacctatctcccagttcagcagatagttatgacaggccttgcttttctacttacgggtctagagttctagaagcattcctgctcttaaacattgtggagctgaaagaggcagtgtcagaagcttacacaagttacaacaaatcctttctttgaagagtttgtttaagaaccctgccagaagatgagtgcagctgcctcttctggggaaagccctgatgtgtgtgtataaaagttagaaccgagcacctggaagactggagaggggctcactgaggcggtgcccttggtgcatgaagcacacctctgccctcactcttcttgatagccttattcaaagtcagcctcttcttgcttttgctttgttttattattgtttagtttttaaacagtttgagtggagcgtttgcagattatgtactgtaggattgccaaatcgtatggaagggcctactcctctcactatttaatggctgaatggaacagggcggctattcttctgtcccactaagccatcccatcgtggcacacaaatccattttactgtccatgagggcatcatttagttcagtgcagcagtaatttaataccacccaagtggcctcagagtctccgctgcaccactagagaacgtgcagtcttcctggagcaatttacagacggagaagcgggctgaccctttgtggaatttggctgcgcacagtcaacttggcatcatttagccatcccgaccaagccgttcctcaggcctgtgtttgccaagcagtgtggacagataaacatcctcgacgaggtgccgcggggctcacacgcatgtgcatgtactctgatttccaacctctgagctccagcccgtcctcacgtgtctgaagttgacagttgtctcacgtcccttcccgggcacactcagaggcaagacttagtagtccatgaatcctgtcaggtgttcttgtttttcttggcttcaccatcttcagaggatggggcacggcaattttatctccagtgtgcactgttacaagtcatttaagccattgtgtattcccgtcagagagtcgggatatagaaaatgaatttctcccagtctccagatgcatgagggtgggtatgtgtagctcctgggctagcaaggtttgaggtgagcagggtgggaagttatatctcacatcaagtccacttcttacctgcttgaccttatatatgagtggttctggacttcctgtcaggcacttgtatctcagtgcttgtaagcatattggattctggagcctttcaaaggtgtcagtcatccccttagcagagagagacgcttgctatgtgatgtcacagtcccgccattatctgtactgggtgtgtgttaacgtcactttaactcttgttgtaggcataaactgttaaaacggtgtgcagtaggacccagccgacctcccgccatctctcagccaggcttcagtgcaggactgccatcatcttcatccttaccaccccctgcttcttccaagcacaaaaccacagaaagacaagaaaaaggagacaagttgcaaaagagacccttggtgccctttcaccataggccctctgtggccgaagaattatgcgtggagcaggatgcgcctgggcagaagctagggctggcagggatagacgcctccttagaggtgtcgaacactcgaaagtatgataagcaaatggccgtgccttccagaaatacaagcaagcaaatgaatctgaatcctatggattctcctcattcccccatctcccctctgccccccacactcagccctcagccacgaggtcaggaggcagagagtttggacccaccttctgtccctgtgaaccctgccctctatggaaatgggctagaccttcagcagctgtctactatagaggacagaactgtcctcgtaggccaaagactgcctctgatggcagaggccagtgagacagccttgtacagtgggctcaggccttcatacaccgagtcgtcagacaggtggtggcagagttttcgtctcccatccagtgaggatgctgagttccggcctccagagctgcagggggagaggtttgacactgccctggacctgaatcccgagagcacggccctgcaaaggtgagcctgttctggggtggggatgggacgggcagcctctcctcgctccctctgtgggagggaaggggatgcacacccacactgttctgtctttgctgtcttcactctctctgtagacttctgcacacggggagtgtctcaaaatcaaaccccctgttctttatgagacttagctatgtgatggcgtttaaatgcttggcattttaggacccacagtaaggatccacttatctgttaagtttgttaatccagagtataacttgaagagacttcccatattgcatagccagttctgtctggacagtgtgttctctgtgccttggagccactcactgttctgagcctcagcgcaggtgaccgacaagcatgcttgtgctgatttgctgactgaggagccagagctggtgtcctgggagtgtgtgtctaggaagtgtgtgcctaggacctgtcatttctgaaggatctgggcgtggactgacaaagctgccttagttctgcctgataatgcctaagatcttgaaaaacaaaaacgcgatactggaaatgtattagttttttcagtgttgaggttcaactttcttttaaatggtaactactggactggggagaaggctcagcaggcgagcacactgagaaccagcactgcagacggagactttctctgtctgtgacgtttttacgttcaccatgctgagtccacagaagcactggtgatgcctgaccctgactttaatccccagaaaggagagtgtcagctctctgaccttcacatggtacatgtgccacacacagagccaataaaaagaaatgtaaaagtcatatactgctttgaaaaagacacagtttcaccttacttaccttattcaattgtcactcattttcccttttagactcttagcacaacctaacaagcggttcaaaatctggcaggatgagcagcctcaggtgcagcctctccccttcctcgacccatcacctctgtcccagcagcctggagacactctgggagaagtcaacgacccatacacctttgaggatggcgacataaagtacatcttcacagcaaataagaaatgcaagcaggggacggagaaggactccctgaaaaagaacaaggtaccattcacctcagtgtgagtcccgcagcccatggggtttggcgtttgccgtgtgtgtaggagggtcctgaggcggaatgtctgaggtagtagtcctgcctggttgctctgtcctcatacccatgctcttggtactgctgtgtggagcagcattctgttcctccatgtcatggctcacctgtgttcggagtcggccgagcctaaaggaagctgcgtgttctccaggctgtagcttataccgtgcatggctcctctcatgctaattaccgttggcctgtgctccctgcttacatcttttaaagtattttccaaaatagttaagatgtaaagcaaaaagtgttgagggcagtgtctcttcttaggaagtgcttatgttcactgtgctgagagctgtgcctgtgtgttctctgactccatatcagcactgccgtagcctgtcagtgggaaccgctcaggttccatcgccatgatactgagtgctgggtgtgcctgccagcggcgtcagctatcaaaggaagcattctggagagagtaggaaggatggcagttaaagaggctaatagagtcgaggggacaatgtacagggtctatgtagatccagaggcttggtctgtcatttaatattggtacaattactgaagacagcgttggatgccaggacaggtccttaatgaggtccaccagcacccccaagtcgctaagaacacctagagggttgtgagagatgggcgttctcgattctgtgcagtgcagagcaagggcctgcctttgattccctttggttgcgtagaccatggtttctcacactgctcataataggttccattcaacgcgctaattctttgtgttctccctcatatcccacactttgggttgctgttcatgtgttttgtttggctgaatttattacacagtcagaggatggatttggtaccaaggatgtcactacaccaggnnnnnnnnnnnnnnnnnnnnccaggtcattccacgccggtgcctgatgggaaaaatgccatgtctattttcagttctgctactaaaacaggtgtgtacattgttactccctcacttggactgttgctaaagtaaaatgcaaagggaattcctctcaagttcagattatgttcctagtgctatagcagtaatttgatcacaactttaatagtttttttttggattgtttttggttcatttcaaagctgataagcatatctggaaataattgtgtctaaatttaagtaggacatagggaattcccagcagaccttgtccactgaggtccagtccatgtccttccctgtctccctccctcagctaggagcctgctcaccctgtccttgcctcctctctcacagatgtccggcaggacagcgctgctggcagagccggctctgggagccttacccaggtgacagatttggcaccttccctgcacgacttagacaacatctttgataactctgatgacgacgagcttggggtgagtctgctgtagtggcacccgtgagacccaccatgtttggtttcttgtaggttcctcttagttggcttcactgaactcgggactctccttctaggaactacatggtttcaaaaggctcttgtttggaacctctgagtgccttttactagtgctgttctgtgttgtacattattattctccatagttgtaaatattaaaatcctccacatttattttaataaaccctcctaatattatggaaatacattttccttagaggaggtttttcttgaccttctaaccgagcggcaagtttgtggtcacagtgctgtgctgggaagtggagtgtagacgcaggattgcagggggagggggaattagaagtcttcggaagctacctgagctaagaaccaggaagttcatgcgctcatccttttgtcatctctgtcccttgggcaaacatttgcactcgctgtctctagggatactacagcggaataagacacattcttttcaaagaacttagttcatttattttattttattttttcattttcttaatcttcctttccatctattttacataaacttttcaaacaatttgattatcagttcttttgtaacagataactgatataattaacaaatttacatacttgattaaattactggctttatgctaaaaacacaaagcaggtaagacagcctataaatgtatttactggtgaggtcagcctcaccccagggtcccaggatgctgaccattggtgcagagggggcagggtagcagtgtttaacttgaggctctgggttaagtagggatcagagttctaactttaaactcagacgtggctaattaacagatcttatgcacccttggtgctgtatatagctcctgaggatgagggaggtaacattggctttgacaaatggatttaaatgcctggagagggggaagactggggttagaaggggcgggacattgagtgagtgtggaatgagccctgattggacagcaaggggaagcagctaacactgggaactggccagcagcttgcccatctgctccctcagaggtgggctcaggaggatcttggccttccataacttccagagctctgctgagtgtggagccactttcttgtttttaagtccgaattgcagaaaacaagaattttatttgttaatttttgcattggagcacaggagccttaattcaaacagtggctacctggaagagaagggcacggcagtgactgggagagacaactaggagaggtgactaggagagttgacttgttcccttgctgttggtctgggccttggagagttccgcttttgagtaccaggaagatgagcacaggctgagctgggggtgggcaggagggccgacatgtgggagcttctggtgctgatgagagtaaagcatggaagggaggtgatgcagtcagccaagcagacggagcaggaagggcaggcaggcactggggtggactgtgcagggcatggttgctggccacggtgaacggcgatggtgatggagctgtctgctctgggcctgtggcttcattccctgtacaagtcatacattactgttggccttaatgaagaaacggctctttgaggaatatactttaaacaatattaaacacaaaggagatgttttcaattgaatttttatttctttgaaataatagattctttgatttctcctccagcatttattgataaaactgatttacctagtgagtgatgggggggggggcagctggctgagcagtcagatgtgtttgaatttaaatgtacatttcaactgtatataatggaagtataaataaaaggtgttagatctgcaagatctattcttttgaaaatgtattaaattttattaaatttacttatttagtgtatatgagtacactgtagctgtcttcagacactccagaagtgagtcaccatgtgatgaattgaacctctggaacagtagtcttaactgccccaagatctattcttttatgttattggatatactttattttgtaaccagcctatttgagatcttaaaggtactcttttctagtaaggaaattgccttgttttgaataactgatcagttgtctgcattcagaggttcttagatggagctgcctctgtgaagacagaggttaacttttaaatgggaatgacaggacataaaccgatggctttggggagggagcacaggaccactgttttagttgcctcctcccatggaggaaaagccagccccacagccagtaactgccagaatacctggccagctaccatgttggcacagctgccctcgtcctgtcctggaggcagtgtgcctgaaggcctgtgccaaacagactctctagccttctcactggagatgctgtgtttgtccctggcatagctgtctggaagtggttctgggagtgtcatgaggatgtgcttgctttattttttaagtgtcagaggtgtgcgctttcaagtgttctaactattcaacttgttttcaggccgtgtcccctgctctacgttcatccaagatgcctactgttgggactgaggagcggccccctgggaaggacggaagagctgctggcccttaccctccaagtaggtgcaggagcctgaaccgacacggtcaccattgagagttaaaacttaagacgttggagcttccgagaaggcaggcagctgctcagagacagaacccattctcgtttgatgtcattctgctttgtgtttacactcagtttcgagggccggaggttctgtcggaggtcactttcccagtgggtcacaagcaacacacttaacttcagagaagttacagaaaactcttcttctttcagcattctaattgacttacagataatgagtatttgtcaggacttgtcatgcagtttaaggtttcttattgaggccgctaatgcacgcgggggccggggggggggtggtcagtagtgtagtctttacctgaaggaaacagacccgcagtgagaggaaagtcagggtggccctgcagaccctgagggagacacaggccgttgcacatcaccctgtggttcctgttcattctcttcagctgttattgagaacaaattgaggggaaaaccgctgtgtcacaggacgagtcagaacgttttatgactccgtaaatatagtctgactggctcagatgtagaagtgggacgtgcagagattggatcgtgacagtgtaagtggatccacagcttcttactcaagcatgccatgggaggaaacggatagtgatagccagccagtcactgtaggggtttttaattaacatgaaagaaacatggacttacagggctggtcagatgaggacttacacgtgtactaataagacagtcctttctgtttcttcatgagtgcatacagcaggagacatcacagtatatgaagacatagccacggctggccactcactgtagccatcctgcagggtggtccttagactgtgcactagtctttcatttttatttaaaaggcgattgctttagagtggactcagcatctgatgcttaaaagtacaggctgcagtaatgagttaaaataagcactgaggtaaagagccagcaccatccaaggcaagacctaagtgaatttgtaatgggaggggagaggagggccagagccagacacagacacatacacacacagagacacacaccgacacagacaggcacaggcacagactcagacagacacacagatgcagacgtagacacagacacagtgctgagccagtgctccctcctcaactgtagcagtgcaagcagcacaccctgtttcgtctctgctctgccttcctgactgtggtgagctatgaatataacatctgccagggcaccgcccaacggaatccaagacactgcaaactggggcaacacttgtacatctacttaggacaccccatggaaggagttttgttaatgaatgcatcacatgtcatttctaatgtagccaaggacaagaagtcatagagcacttccggggcgctctagagttgtgtgtgttgtgtgtacagcttgtgtcagtttgttccagttctgttgtgttctgaattcccagtagccacttgtagctagtgcatacaggtaaaaggaaaagattccatattactaatttgtgtatgtaacaatgaaggatcaatacagtgagcagaccatttgcctatgaatttctttaaaattatatcttttctttttctaagaatgaatcttaagggaaaacaaaacaaaacaaaatgttagttggaccattcggagtgtttaattctgtgcttgggcttctgctctatcctctgaggcaggaggatcctgagaaagaagccactggtttgaggtgggcggagagcgggaaaaggccgagaggaaggagtagcagggctcagcccttgagtcctgcatggagttgcccatgtccttttctaggagcagcaaagtgctggccaggctccatggctgcctggcatctgaatccagactcgctgttttctccccgtgcacagttgcccgggcctgctcttagagcgtgtgtctgagcactgttctcatggcattgcactcctagttgagaggtgggcaccatgtgctgccaggtgctcacctgagccctgccttctctgtaagtgtgcagggtgaggctatttactacagtgtgggtggcgttgacagtaggcctcccttagcagtatttgatggtaagaatgtggagagcactttaaagtgagcctgtggcaacggaaattctatcttgtctttgtggaagtgagcagggtgccggaggctttgaaaacacgaggctgtaactttttatagcattagtgagacaagtggcctcagcagaaataaacttaccatgattcttacaggaaatttaaaacaaagctatttatttatgtgtcttaacttttaatatgattttatttttattatttttaattgtgtgagtgtatgagagagagagagagagagagaatggatgtgggtgtgtgtgtgtgtctgtgtacttgctcacagtacaggtacccttggaagccttggatcccttgaagttggagtacagacagttgtgagctgccatacatgtgggtgctggaaactgaacctgggtcctccacaagagcagccagtgctcttaactgctgaggcatctctccagcttttgtaatttttttgttgtttggaaaggtctcactgtgtagccctgactgccctggaacttgctgtgtagattagaatggccttgaactcagagatctgccaacttctgcctcctgagactgcagagttgctgggattaaaggctttgccaccattaagttagtccattctggaaacacacacgtcgtttcactgttccctgttgaatttttctttccagcccttcctgtccactctgccctcatctccccagatagagactccttctctaaagccttgatttggtttgccatagtttgaagcacactgttctgactctcagaattctgctttaattccatgttaacagagtagagctgctgctcttgagcttggggaaatgttagaggtatagtgcacatttctccagtcagcctgtaccctacagtaatcttaccctgtgtttgaaataaaatacattgatttgattggagacctttctcttgctttagagtcaataatttgtgtatagagtttccaatagttaccttgcctggccttcttagttgcaggcattttcaagttgtaaatcctactactagccagcaatcagaggcaaaggctctgaaaggtcgctcacccctgcctgtgacccccgttccaggtgtccatttgctccctccctgtagtgagctcttggaagctttcttgtcctggtggaaagcaagcaagcctgttatatatctaagggagacttgctgctagttggtggatgaggcactgaggaaggatctttcccagccacagctgagctctgcctggaggatgtggaccctggagagtatgcagccagaggcagcagccaggtcacaatctgcataatcaagttcattgtttcatattaattcctgcttaagggctaggtgcttagttaaatgttggggctttaagaaaggcattagctatggaaatggggaggacatcaaaagtaataataacaatcataaactcctagttccaaacacagggcaccacctagtggccatgctctgtaacctccacttgcattgtattaggcacagcctgctttgagactcagcctctcaccagttcatgaactgtttgttattggatataccgactctgtgaggacagggttctctaagccctcctccttccttgctgggaacagaaggcaggaatgtgcaccaacttgctagactctgactgtaaactgttttctggccactgtgtaccctgtcctgttgacagcacctgtagagtctagagagacagcatgaagtcattccccagacagcaggactatgactcagtcacaccaaccccagccttgctctaaatcaattctgttttctctactctttcataaacatttgcagatgaagatagactttgataatatataatgtagttggattgctttcactttcttcttgactctttctgggtcagttactggaagaaagtgacatgctctgcagactctgctcactgcattagcattacaccatgccatacagcccttgagagggggaggctcgggagtgtggccgcctgagggtgacctgtgtcttgacattctgttagccttgtgtggacactgctgtgcctggctgcttgtctcagctttgaggaatcttgctgttaagatgcacttttaattttgtttttagcagttgcagacttgcaaaggatgttccccacccctccgtcattggaacagcaccctgcattttctcctgtgatgaactataaagatggagtaagttcagagacagtgactgcactgggcatgatggagagtcccgtggtcagcatggtccccacacacctcacggagtttaggatggaagtggaagatggcttaggaagccccaagccagaggagataaaggtaataaccagtttgggcttccccagggctggggtgcttctcagtgggccacacacacgagtgcataaggaccattgaaactggagcttgtcagtagaagtcactccatcaacagctttggcatcagatttttctttttacttattagagagaactattgaattacagtcggttctgtgcctgggttttatgaagcaccgagccaccgtggctggctctagtttgccagcattaagccaaccccatttcattgtcacaggacttttcctatgtgcacaaagtgccgcagttccagcctttcgtgggatcctccatgtttgctccactgaagatgctgccgagccattgcctgctgcctctgaagacacctgacgcctgtctgttccggccctcatgggcggtccctcctaagatggaacagctgcccatgccccctgcagcctcttctattagagacggctacaagtatgtgtgggactctacctaccccttaccatatgtgatagcacctcactgttttctcagactcatcccggggccacagtggctcagtctctgagaccacttgctcgcttagtttccttttgaccatgttgtcttgtgcgggtctgtgtgtttatttttaaatgtttcttctgtgtgtgtgtgtgtgtgtgtgtgtgtgtgtgtgtgtgtgtttgtgcgcacttgcatgtttgtatacaaattaagattagagagctgtgtgtgattctaagctggtgtttgccatagaatctacacttgattgaagttgttgatgtttgtgggtagtgggaggagctttgatttgtaaggtaatggtttcagtgtgggactttacaattaggtaaagcagtaacaggttgaggtgtggttggggaaagtaaaggtagacatggctggtaacttgggtgtctcgacctgccggagaaacagtatttataccagcagtgcagactccgctttctttgaaagaaagaacctcttattcagataatttgcgaatgcaaatgtgcatctaagccacatgcatgtgtggatggataagcaagcaagtgcaggttgcaggtgttttgctcggtttcactgcagggactgtggagatgagtgggctccagcacatgccccttcttagggacagttgtcaggcagggagattgaatatgtatattgtcttattttaaaatgttaaccactaattcaaagataagccttaggaacaagtaaaacaaatttctggttcaggactcatttttgtcacatgtctgtgacagacgccagtgatttacatagtcagtgtcagaatgaggaactgggtagaaaaaaatgacaggaggaccctggatttgggagctagcaccaccatgccgtgtgacagctctgccttataaaatggctacttgggcttgaagggtgctgcacctgggtctcccacgccttacagtgggctccctctccccagagctttgggaaagctccagcagccagtggcagcagaccacggtggggaggggagaggactgtgccgctgccctgcaagtggttggcctggctgctgccaagctccatttgggctctagctgtgcagcctcagccccagactctctggacaggctctggtagtcgtcatgctctgagctgtcactatacccatcactcactcctgccctgtgccctctgcagcagaggttaggctggcattgctacagagcctgtgcttacaggaaggtaccttttcccctacggtctgatgtgtcgtggtctgatgtcagcgttgacccctaccatgtggctagtttgttgttagctctgcttcacttaaaactagccttggggtcccagacctgctttatggagcaggcagcacagctctgcactgtcagggtcccactgggttccccagtgcccactgcgtttggctcacctgtctgtcacacttgggacatttgctgatgcttgcttcaggactgctgcaggccacgccaacttctgtctctctgctgactgtcccatttttcacacaagattggtcttcagtccattcttaatgaacagggaagaatgaggctgttttctacctagggaacaagtgaagtacttagattttcagttagcaatcatggatcctttttggtccaaactgcagattcattttagaattttgttgaccaggaaaatttaaaggaatctagtgagtgtgcagatagttatttattgcactgttgaatttctgtatcagcttttgtttgaacccaagaaacccttgtatgtcagggtttatataaatattgcctgatacctgggatacctgagatatctgggccaatggtgcaggttctagaagattacagggcaatgactgtgtaagtaatacaggtgtgcagctcactgaggagcacaggcttcatgtgccaaggcaccagaactgaaatacttgctgtccctgatgacttgcaagtgcacaggcccatgggagtgtgttgagatgttttataatggtagaacatgcaaatgctgcagacatggtcttcttttctgcttggctgctcttcccaagccactgcttatgaggtaagccctgtccgtctgaggaatgagagtgattgtgtagaatatgtaacatggaaggataaagaaaaccgaaagggaatcttcaggaacctcttggtgcgtctttctcagtgactgctgagtgacactaaagcctgtgcaggacagacagatgggcacaacagtcacacagtgctggggacacgcaagcccttaccagggctgccttctgaattaggaaagcaccacacttgaatgtgtgtttggttacagctacttcagtatcattacagaatcatagcctccaagaaaagcacacaggtgggctctcagtttcaaagatggcaaagatgtagctgcagggtggatgcaagccctgcagtgctccagctagtctaggctgcactctgtgttcctcacacagcttcctccatgaccgctaccgtgcaggctccccacagctccacagcaggtcaaggtgtggagtgtgtgtgtgtgtgtgtgtgtgtgtgtgtgtgtgtgtgtgtgtgtgtgagagagagagagagagagagagagagagagagaattctcatgttctccctctgcccctctctccttccttccttctctccctcattttttctttgtttttgaagagaaaattgcagatattcagtgcagnnnnnnnnnnnnnnnnnnnnatatctcaggtatcccaggtatcaggcaatatttatataaaccctgacatacaagggtttcttgggttcaaacaaaagctgatacagaaattcaacagtgcaataaataactatctgcacactcactagattcctttaaattttcctggtcaacaaaattctaaactgtacactccccccccccaaagctactttgtatctgttgcagtaacgtgcctagtgtcgggagccttgcagacccagactatctgaacacaccacagatgaacacacctgtgacactcaacagcgccgcccctgccagcaacagtggagctggagttctcccatctccagctacccctcggttctctgtccccacaccacgaacccccaggactccaagaactcccagaggtgggggcactgctagtggccaagggtctgtgaaatatgacagcacagatcaggggtcaccagcttccaccccctctaccacaaggccccttaactctgtggagcctgccaccatgcagccaattcctgaggcccacagtctctatgtcaccctcattctgtcagattctgtgatgaatgtcttcaaggacaggaactttgacagctgttgcatttgtgcctgcaacatgaacatcaaaggggcagatgtcgggctgtacatccccgattcctccaaggaggaccagtaccgctgcacctgtgggtttagtgcgatcgtgaaccgtaaacttggctacaactcggggctcttccttgaagatgagctggatatttttggcaagaattctgacatcggccaagctgcagaaagacgcctgatgatgtgccagtcctccggccagtccaccttgcttcctcaggtggagggtgcccggaaagccccagagccccccataagcctcctcctcctccttcagaatcagcacacgcagcccttcgcttctctcagcttcctggattacatctcctccgctaatcgccatgcactcccctgtgtgagctggacttatgaccgtgtgcaggcagataacaatgattactggacagagtgcttcaacgcattggaacaggggaggcaatatgtggataatcccacaggcgggaaagtggacgaggctctggtgagaagtgccaccgtacattgttggccgcacagcaacggtaggtgtcccagagtacagacttcagtagaagttatcttgctgtacatggtggccaaggaaccagaagtgagggctgggctgtctcttctgccttgagtgggctgtgtcctctgtcttgggaattgggctgccttctgcttaagcttttgaggacaagtaactgccccctgagactttgccattccatcccatcacaaacaagtggtgcttgtggcagcttgtggccaagtgtgtaaaactggtggtcagtgttctgcctatagggatccagtcatcctatggtgtgcagttgccatggtatcccttcccttctggaaactggccacccatgtcctgagtgttgtctccttctggtttctcaatgtgctccatatcagtgaccacatatgactttgctgtggttacaggggcacattccaggggtttgagctattttaaattgtcaatcagcccatagtctagctgagcagtagagctcatggtttgcctgtgcgaagcccacggttcaatgcctagcactctggggagaaggggaaacctaactccagttgaccacagtgtttggagttgggcagctcctgcctgctttggatccatccaggcataaatggagaccaaggccaaggcccctgcctgccttcctgaactttgtaatctgtctgcatattaaataagcacacaggaagtcctcagaagcaaattttaagtgacggaacataaggcagagggaccccctcccaacttccccccacctcccgtgggttgggcagggctgccctgagcaggcagtagcagttacactgaccagttagactgagcaggcagtagcagtcacactgtagcaggtacactgagcagtcacactgtagcagttacactgagcagttacactgtagcagttgcactgaggtttcacagtggccctgagctctgcaatgctcatgtcccacagggaactgagagctgtgagaaataagggccaccgtggggcagaggcttcatccaaagagcagcaaagataatcagtcatggaaggtatttttcaaacaatagtgatttcacatttatgaaggtaaatggaaggcagatagaagtctgcgtctgacagggtagggtgaggtaagagaaggtaccggggacagatctggggaaactgaaaaccaaacagagcagagcagctgggactggaaaagtagctcagtggccaggggcctgtacgtgtgcttgcaagggtaaagcaggcggatctctgagtttgaggccaccctggtctacagagcaagttccaggctagccagggctctgtagtgagaccctgcctcaggaggagaaaaaaaagcacctgtactcccaagtaaaagtcctgagttcagttcccagcatccacctaaaagtacccacaaaggcctgtaactgaagccccaggaggtttatttcatgacctcgtctgccctctgggcacctacacttctgtcctggtacccacatgcaggcacacatgcatgcatatgataaaactttgtaaatttagatttaggtgtatgagttttttgcctgcatgtatgtctatgcaccatgtgcatgcctggtccccacagaggtcagcagatgtcagaggaccccccagtgctgtaactacagatggttatgagccaccatgtcagtgctggtacttgaaccccagtcctctgcaagaataagtgatcttgactgctgagcaatctctccagccccattttaagatattttaataaaagaaatagataatgcagagaaaataaataatagcttgctttagggtagggagaagtaggtatatttcagagctgtctagagagtagtacagggtctctttctctctaaagctttcagtgtttcccaaggatattttacagggttttctaggtctcttcctttttgttcccttatcctcaaaatgatgatgtgtaaacgaaaggaacatggtaactaaggaactttgtgcttctctgtcttctgaaaaaatcttagaaacaggtttatatgattggaacttctttacttctttcacacagtttttttcaacctgcttctcttggtagcaagctaccagtcctttcctttactttggaaaagcctttctcttgactccatgctgcccatctcctataatggagacccaggatggcatctagaaggggtcatgctgccctgacatccttgtcctctgcccttttctcctgccacagtgctggacacaagcatgctctcatcccaagatgtggtgcgcatgctgctgtccctgcagcccttcctgcaggatgccatccagaagaagcgcacgggtaggacctgggagaacatccagcatgtgcaggggccgctcacctggcagcagttccataagatggcggggcgcgggacctacggtgagcaggcctcggggttggaatttcctttgtgcttctgtgctctgatggctgcaaggcctggcctccctgctcttcctccgtcatacttaggttccctaaaggagcttggcctcagctcatggtgcctgttattgggcttcagggtttgctcggcctcctgctccatgaccaggatccctgttgtgctcaagcatactgaagcagtgtgcctgttaagtaacctgccttgctgccttctgccctcactctccatggccctttctaagatctctaactcctgtgaagttcttcattcgggcccatttagtgagctgatacagtagtaggaggcctgtagagcatggaccaggttcccatggctcagacacccgggtcagagcgtcagggactgccaagctgtccaacatgggaagagacttatgttccttcctaaacagcactatcttccaggttccgaagagtctcctgagccgctgcccatccccactctgctggtgggctacgacaaggagttcttgaccatctcgcccttctccttgcccttctgggagaggctgctcttggagccctatgggggccaccgtgatgttgcttatattgtggtgtgtccagaaaatgaggccttgctcgaaggagccaaaactttcttcagggacttgagtgctgtatatgaggtgagcatgctgtggggctccctctctgctctggggctgcctctggctgttactaaggaacaaacctggagtcgatcttaaagagcgtttgttgtgaatagggacgagtcatgggccctgtagacatgggaggcacatgcacgttatgtttccattttggctgtaagagttccaggaaatgttactaaaacatttaccttgaaaatctctgaattgaagggtaatttaatggatcatgctctgttgtgctttaacactacattcatcttaataataaaatttggtagattagaaaatttggtagccatattgatatccgaaacaggaaggtagttttgcatctctagtgggtaagctccttcagttgtgagaggcctgactcctgggtcttgtgctgaagcgccaaggcctgactcgtgtgaaacaaaaccagtatttgctaaaagcaattaggatgctggctagcaccgatgagtgctgcagaagcgtttgcaaataagacctggctgatggtcagctaccctctaggacagagctcgcctctggctgaacagggacaggtcagctgaggggatgctcacatacaacgagtgacatctgttaagcacgaacccttggatgttgtcacttctgaccattgcctgctgtatatccaaaacactgttcagtcacaaccgagctgtcacagacagctcgtctcccctctgaatgcccctctggcatttcatggctcactgggtctgttcaggtataccacccctgctaagaaggagctgcaggtggtaggtcctcctgctcatgacagtgtcatctgggagtgttgggtttttgttgctgtgataaagcactgatgaaaagccacacgagcaggaaagggtttgtctcagcttacaggttacaggccattgtggagggaagtcaggacaggaagctggaggcaggaactgaagtagaggccatggagcattgcttgctggctgcctttctctggccttctctggcttgctcagctgactttttctgcagtggctgagccctcacacgtcccccaggccaatctgatggacgcattcctctactgagattccctctttctagattagtctaggtttgtgtcaagttgaccaaagctaagcagtacagtgagccttctcctcagcagctacagtaaaggaatgtggttactgcttcctggtcaggcagaaaactcccttgttagagctgattctgtgaactctgctcacccctgtgcgtatccttagcttctgactctgagagagaggtccgcacacacggtgctgtagcagctctgcctctttagaggaccacccagaattggacagagcagtttcagggatgtgatgtctgccagggagggccagctgctaatgctggcgtgcttgcatgcttctgtgggggtggctgctgtcatgaccatctcatgtgctgtcagatgtgtcggctgggacagcacaagcccatctgcaaagtgctccgtgatgggatcatgcgtgtgggcaagaccgtggcgcagaagctgacagaggagcttgtgagcgagtggtttaaccagccatggagcagtgaggagagtgacaatcattccagactcaaactttatgctcaagtttgccgccatcacctaggtaaaggggaaaatggttattgtgggagagttggtgacgtgcagtgggagtcttctccctccctagcaggtgcagcattgtggttctgtctcagccgtggctgacctggaactcactatgtagaccggcctctgccttccgagtgttggcactgaggcctctgccactgtgcctggctaaatcctgatttttatgtgatgtgttttttaatttgcttattggggttatatgtgcttagagccattttgaaaacagcagcattcctcaacattagctgcttaagcttgaagacaatttcagagcttgcagagctgcatattcatggtgtactatgtgactgtgagtgaacatccatgtgcactgtatgactgtaggtgaacattcatgtgcactgtatgactgggtgagcatccatgtgcactgtatgactgtgggtgaacatccatgtgcactgtatgactgggtgagcatccatgtgcactgtatgactgtgggtgaacatccatgtgcactgtatgactgggtgagcatccatgtgcactgtatgactgagtgaacatccatgtgcactgtatgactgggggagcatccatgtgcactgtacgactgtgggtgaacattcatgtgcactgtatgactgggtgagcatccatgtgcactgtacgactgtgggtgaacatccatgtgcactgtatgtgactgtggatgatccatgtgcactgtatgtgactggatgcatgttcgtggtgcactgtcaaaactgtgggcatatgcacagctaaaggatccagttctcagtgacatcagaaaaggaggcttgttaaaagtgatttcttttctgtttcttcctgtaagccaaatgtagaattgactagctgttctatgtgcactcagctgtttgtgtaggagtttgtattcatatatggtggcagtatttaaggtgtccaggggacactgctagggtcactaagatgatttttgtcttccttcagcaccttatttagccactctgcagctcgacagtggcctgctgatgccacctaagcaccagagcccaccagcagaagcacagggacaagccacgcctgggaatgctgggtctttaccttcgaattcaggctcaggagcacctccagctggcagtgcattcaatcccacctccagcagctctgcaaaccctacaacaagtagttcatctgcctcctctgggccgccaggctcctcagctgcctctgctccaggcatcactcagatgaacactacctcttcttcaggattcggtggtggtgttggagggcagaaccccagtgcggggggcagctctacagatcgaaccccagggaatgtggcttgtggagacactgagcctgggcagagctgcacccagtcctcacaggatggacaagacaggtgtgtttgtgtctcacaaccaagttaagcttccacttggtcacacagtggggcttctgtttggtcacacagtagggcttctgcttggttatacccctttactctacctcacacacactttctttcagaattcagtcaaatgcttctctgtccttgctaataagaagtgacaagtggcgctccgagggcctgttaagagagagtcaatcagcgtgcttatgactgagttcattaagtggtagtgtttgttataaaacctttgtgtgcactgttaataaaggatcagagaaaacgcccatttcagactaacacagatacaagtactctgtttaaacacactcgagtccagacatgcttgcagtattgggaatttggggatatttgcatagccagcatcctttgcctgaaaatgagaaacccaagaccctgagttgtgagtgtcacatagcaacttttggcttttgtactgctgtctgtctcctgtctcatctgtgaaatgttgagcctgatgtgtgacacgtggctgatgcattggatcatagcccggggactggtgggctctgtgattgatttgttccatagagtttatcttggccgtcagggcctcatactcgactctctctccagtgttacagagagggagagaataggaatccccacggagcctgactctgcagacagccatgcctaccctccagccgtcgtcatttacatggtggaccccttcacctacactgcggaggaggactccagctctggaaacttctggctgctgagcttgatgcgctgctacacggagatgctggatcacttacccgagcacatgagaagctcgttcattctccaggtcgctgtccactagcttgctctttgtgctgctgggaggcagggttctgagtcctctgagttgcagatccattagcctgtggagagcagggctcctttaggatgccatagtttagattgagccatcatttctgtcctagagtgtttctgtgcttgtctcattacaaggtcaggggtctctctttccagttaacatgtgaacacctcccctctccgcttgtcatgagaacactttgttgtcctaagacaggtttcactgtggtactgaggctggcttccagcttctgatgggccaacctctgcagtgctgagactgggcctgtccagatagcacagtggatcttgtatgttggccatgctcacataggtctacatttggtgtgcactcacttttcccactggtgtaagtgaagtctaacaaacatgatggtgcattgttctttattctaagtccttttaaaagtggatactcaatgtagacactgaaatgtcactttccaaagtgcttgctcttgtttcctgagcaggaagtgagcacgcctgcttccctgcgcttttactagactttaaatgaagtgatggttactgttctgcacagtggagatggctcatgagcgctttattgaaagctgtcctgtagagtgaaggcgtgaagttagagtgaacagaagagactggcagcctaacttgtattaaagtctaagtccacccgattagatagctctgcagcatgctgtgtcagatgtacaaatgggcatacactaagatgccagctttaaagtatgagggccaccggacggtcctcaaggagactggcatacccataccacccttctcaaatggctggtggacatttgaggtccagcttttatgtcactgagaggagttagggtataatcacatgtgacatttacgttatggagttaaggtcccgtctgtccactctagccatagccctgccttgctggtctccagccgtctgtctgtctgtgagattgaactgacttgctcgcctctcgtagattgtgccttgccagtacatgctgcagaccatgaaggatgagcatgtcttctacattcaatacttgaagtccatggcgttctcagtgtactgccagtgcaggcggcctctgcctacacagatccacattaaatccctcacaggcttcgggcctgcagccagcattgagatgaccctcaagaacccggaggtgagtgtgtaaagagagccatctcctgcagcagcgcacaccagggcacctcttctgcctctcagcctagagctaagtcatgcctaccagtccctcaagtgtgctgcctatgactccagaccctcctgaggctgcgcacaatagatttatcttattgtggcttcagtttctgttttcctagtgtccgttgacatttggtcagctttcttcttactttctaatacactagtttctttcagtcaagcatcgatggcttatactatttactgacaggtgttttaaacaactaaactataggcccccatagttcatgcatttcaatatactcttgctgtctgtgtcctcgttgccagctgtgtttagtcttggagagagggtggtgggaacagcctgttgtcggtgccccctgttttcctccctgctgttgctctgggttttattgtaaacactaccttggttggccttgtgctgataatgaccttgattcttatttcagcggcccagtccaatccagctttattcccctccctttatattggctccaatcaaagacaagcagacagaaccgggagagacctttggtgaggcgagccagaaatacaatgtgctctttgtgggctattgtctgtctcatgaccagcgctggctcttggcatcctgcactgacctgcatggggagttactggagacctgtgttgtaaacattgctttaccgagcaggtgagacccctttctaattgggtcagcttctgttaactctgcgcttagaaagtgtgccctgctgagtgacagctgactcgtgtaggacccttcatgttcctctgtctgtcaggtcacggaagagtaaagtgtctgcacggaaggtcgggctgcagaagctgtgggagtggtgcctgggcattgtccagatgacttctctgccctggagagttgtcattggccgcttggggcgtcttggccacggggagctgaaaggtgagcaggtgcaggggactgagctttgactggggctgagcagtgcaaggacattgccccaaggccaaaactcatgactgccatgtattatgaagggataaataaaccagaagttctaaactctgtagctccacccctaaccagtcacttacaaaagtaatattttaaatggaaagtggaaagcatgtttcattagtataaagttagatttataacatcacatattaaggcagtaaagaaagttaggattaagacaacttgtatcaaagattgtcggtgattgctaaatatcatatgtaagaacagcattcatggctggagagacagctcagtgtgtaaaatgctttattgtgtaagcgcaaaagcctgcatggaatctgcagcaggttccctgaggtcgtctcagacacacagcatgtgggtgcagcatggctaggagacccctcacagcaaactccctgatccctggctcctctacagggctcctccacagggctccctgcgccttaggtgcggggatcgtggtgcagggtacattctcaccaacatggctgcctggacatgggctcaacagtagatatgcaggggcctctgccgtgcacaagagcgcgagctaagggataagagtgcagcagttgactgtccactaccacatgatcagcccaaaagacacacacttgagtaacacaggagtaacatggacagagcacgttagatttaggattacttacgtatatagtgtacacagatacatgggacatggaagggtttggagggaagcgagaggaggggtaataatcacattattataatctcaatacaagaattaaagagaaagaagacaggcatcccaaagtggacagtgtccttgctgaggcccgagagcagtttcctcttgcagagcagttatcagtttgtagttcttccagtgtgaagtcacaacaagcataagaactgcatgaatggctgtgtctgtgactgacacaggcggcagactgtagttcatgccagcccctgtgtttgagtgtactgtttgatgatgcaagctgggtgctgtagactccctggaattaaaccatcgagagaggaagaacccacatgcaagctgctgcatgtagggcagattgtactggagtgtcaggctcagagccatgtgtgcacacactgcagtgtgtatgttctagtcacacatgatgttgtggactgggagaaaatgtttgttttaaacagcatcagacttactgagtcttgtctcagtagcctggaggttaatccatcgggaattcctcttgtcattgctgtcagattggctctcttcctccctactctgcttttaaaggctctcagctcttcacaacccctggaaggtgggggaataatagaaaagaagtagggggtgagcatgctgtatgtcacttgctgctttagaaatgattagggccccctccttataagactgtgggaagggtgtactcttcttccttgcctcttaaagaggccctgagtgtggctggaggaaatgtacagaccgcagaagcacatctttacctcccgaccgactggggctcctcctctcggagccatgcctgggtgaggtcatgcagaagtccccgtgtctaccggttagctgccagtgtttgcccggaagaacccagccttgttgctgtgttatggtgctcacacctgtcttgacttctgctacttgaagatgttttcttcctgttctcagccacttttctctctcctgcgactaccattagaaatataaagcacactgccctgtccttgccctgggaagaagagccatgtgactgtagaaaagcctgcagctgagcaccgtgtgccctgcggggtgtgagtgatgtgactcatcagcaatgcttagacacagtgcttctgcttaggggcagtgaacagttgtcagagggaggtgaaaaatcagaccctgggggaacatggctaccccaggctagcccagccagcagagacctcagcactgaaaggcttttagcacctgcatctgccagggtctgttttaggccctcagagggtactctacagacagatggaagcctacagaagcaggcttttgtttctgtgttaatgcagtgagatagaaactatataacaaaagaagggaggggactgatcacaggaagccctcctcccttggagtcacagcagagctgacatgcgtgagtgtgagacatcgtgcacacttgtaagcactgtgtttgtggtgtctgactttagattggagtatcctccttggagaatgttcactgcagacaatcagcaaacagctcaaggatgtgtgccgaatgtgtgggatctctgctgcagactctccttccatcctcagtgcctgcttggttgccatggagccccaggggtcctttgtagtgatgccaggtaaattgtctcttgtcacttacattaattaggtattttatcagcccagtacattcaaacttaaatccatgggtaaatgtagtattgtatttctaacagaagcttgagttttgacctagaaaatgagaccatctgctatcttcctggggcaggagttgactgtctttgttggccacagcttgggagaaagatgaagtcctgggtgtgagggaaagctggtgcagccaggctggtgtgtgtcttaagcctagtctcctggtcataggagctcaccctacagaaagcctcaggatgccagcatagcaccccgggaagggcttagtgcctctgctgttgctgacgatgaataatggagcaaagagaagaacatgtatttagcacagggccagacatgagtgagctctggtgactgtcgggacctcgggtcagaagcttggtgactgtgctggcttttggaaagctagagcagggccggccatggtctgactgccactaagctgtttgacatgtcagaggcagtgtggttttgaaccctgtctactcctttcctgtgaagttagcagtgtctaaggataggcttcagagcaggacagtggctggactgtctgctccttagccctcaggtcaccttgcttgccagctgcagctgtggcagtttacacaccttttagacacttgtgccctcatttataaagtagagacacttgctgctacctcagggtggctgtgctgaaccagtgaggttcgtgcatggagcttagcacaggccagcatctggcaagcgctgtctagggctaagtagaacattagctgctgtcattgagaacggtgtgcttataaatcgtgaccacaggtgggaagcatgcaggaggtcagcatcaaggctccaggtcacttagtgggtaagtcacttacagatgtgtgctcactctgtccagtgtcatgtccacatttgcaatgtaaggcgagggtcaggcaatcatcactggtggtctcagttgggtactttaaagacatttaagcagctaggcctgccccttgaggtgtatatgtcgcatgacacctcactcgggctgtcagtctgctgaggcattctgacactgctctgcttttttagatgctgtcacaatgggctctgtgtttggccgaagcactgcattgaatatgcagtcgtcccagctgaacacacctcaggacgcctcctgcacccacatcttggtgttcccgacatcatcaaccatccaggtggctccagccaactaccccaatgaggatgggtttagccccaacaatggtgagtggaaggcacactgggaggcagagtgcagtgtggggtgggggccgtgtgtgtgtgtgtgtgtgtgtgtgtgtgtgtgtgtgtgtgtcttagcagtgtcataggagccatagggagaggggagctgtagtgtcaccgtgttgtgcttctgtgcctctgacaatccctcagaaagggtttgttttgcccctggtttcagactccagcaaggaagctgtggcgctgcttggcagcccccgaggctgcagggggccgggcgccgagatgctcattctccttctctgctttctgcatcggcctctgcccagagctggcactgcttgtgtgcagggcagacctcccccagtacaggatgtgtgcactagtgctcactgggaacaaaccagcctgctctattctcgctgtggctgactaagtcagttaagttggcagttaaccaccaagaccagggaacatgggtgattaccttagcccactgtctgttaaagacagaatagcagctgtctgctgatctccacctatcctccattcttccagtgcactgctgtgctgacctcagtgtggaggccatggtcgtgtgaaggtgccacctcctggctcaccctggggatgcagtttgctagagagcagctctatggagctgattatttttaatggaattgtttaaatacttttataggattgcagaatgagtcataggccataaaatgccccattttgtgcatctgtttgtgctattgttgaacttgtaacatcttcatgcctactatgtggggaggagaaggacaccagaatgtgctatgacacggcctcaccgtagtcccagtcatgtggggacagacgggctcatggcagctgtccacactaactgggtgtgtgacggttttaccttcatgtttcttctttccaaatttcctgcgagtctggccttcttctgcagtgtagggagagcatctcctaatgagcactgctttaatctgctatggggtgggcttctccctggtccctgacatcagccttccagccctgtagctactgaccatgtacctagctggggtctgcttgctgctggacagtgccaacattgaccttgcaacaactgagctgccttttacctttttctctgtctttggaggctgaaaggaattgcgggctttcctccctggctgtgatttctccacggtgtgtttacttggttaggaggtcactggagagaaaacaaattacagtgtgtagcacttgcacacagtgggcacctgttaggtaccacagcatgcctgtggggttgaaggttaacagaacaccggatggcaaggtggagcgaggtgactttttaacttccctgtgtttccctctagatgacatgtttgtagaccttccattcccagacgacatggacaatgacattggcatcctcatgaccgggaacctccactcctctcccaactcctctccggttccctccccgggctctccctctggaatcggtgtgggctctcacttccagcacagtcgggtaaggatgttggaaggaggttgctgagaacaaccacaggctcaggaaaccctctcctctccagccctgctttgactgctcatgactctccccagaggtcgaggtctcaggtgcacagctctcctacctatctcggggagcagggatttggaaagaaacattcgggcattcctaatgctccctttattaggaagttagtctttctcctatactttctcgtatacagcgctggtcatgttggcagcagcctgcaggggcatagttctcagatgtgtccggatcactgctacaagccagtgagggagccaagcccggtgccagctccatctttaaatgccgtggattaatgaaaggtttgaaggtcaagaactgccctctagctctgtcagctttgtcccagccagtgacttagacctacctcacagccagattgtacatgtgactgaggttctgaggagggatttagtcagtaaggagttgctgtgtgctgtctctccctgagcaagtgccagccaccccgtgtgtactgacttgtagaggggaccatgctgccagcgctgctgtcacttagggtgatgaggagaaggaagggttagaatagagtcactttagtcatagagcagctgaagggacaggggccagcagggccctcagtcattgcctgaccagtgcttctcctcctgggaggaagagatggtaaatgcctgggattccttccggctactggccagggggtgacaagctgtttgttccctgatgtttattttgacagaaactgaaaggtcaggttttattctagcagtttgaaatcatattcccgtgattggtgcatggcagcctgtggtgaccccgccgtgaccccgtcatgacgccgtcatgtgcttactgcttgggttcactgtagcattcctaagatctcagctgttgatgctttcagttctgagcccctcagcctggagcctcccagagtctttgagcgttttttcttcctgaactgtttatccctagctaagtcatcacacaggaccaggaggtcaaggctttgtctttgtttcacagcaggcctcaagttggctgccttcaagtccgatcctcctgccttaacctttcttcctgagtttgaggattatgtgcacagatatgtgtgtgtgtgtgttctactgtgtcctgacttcactttttatctttggccagaataattttattttacttttctctatccagaatcagagttgataggacttgatgtagtaaattaataaggatcattttctttctctacataggagacattaaagacaaactgaccacttaccattacttgtactaaaggcaccttttaaatctcagtagtcaccgacaggtgggaagtgcttgatgcagagaggcgcagaagactccgagaggcacacgacactcactcacagcacactcactcagcactcccacacagcgagcacacagggtggcaggagcattgctccctgcagactctgagctgtggtgctcagttctaatccaggggaggtgatgatggagagcaggtgcactctaggggtcctggatgcccctgaggatgctggggtcttccatctcagcatgcagtgacacaaagctccagagcgggtgccttgtgcttctgggatcactgtatccatttttccaaaacctttgtctggtcgatagtgtttgtcagatgcctgacttcactgcagagacctgtgtattccaggtcacattgcttagtccccaagggctttggtgggaggtactgcaggcaggggactgtcactagtgtgcatagtcaagatgaaagctgctgttagtgcctggtgatgctcattgtgctttgggccttgtttttcagagccagggagagcggcttctgtctcgggaggctccagaggaactcaagcagcagcccctggcccttgggtattttgtgtccactgccaaagcggagaacctcccgcagtggttttggtcatcgtgcccccaggcccggaaccagtgcccactcttcctgaaggttggtagatgcacgctggggtttaagacaagtctctggcatgtgttttcatttggttggagctagaaatctcctcttcgctgacccaggctctttgtgctcctgtgtcacttgtcacttaaagtctgaggaggttttagttacagaagagtggacttcagaaaagggaccccgacttgctgtcaagaagtgagttcacacaacctgactctcctagtcggtactgatgactgccaggaagccacagcacagtcctacctggctgcatactggagccgtcctccatagagcagagccagggccattcaaacctttcacatctgtgtgttttcctccttgtatggcttttattgattgtgcccttaaaacaaggcccacacgtgcagagtgtaaaggagcctcagagggcatccatttctcatttttggcagaaagagagagaggtttgagagtataccatggtgggagccatggggagaggactcttataagggagtcaactgagtgatgacagccctgagctccccctgtggcacagcatacccacctccagccattggatgctggcagatgtgagaaatgatgtaggtacttatcatgcccatgcctggctgtgaaggtggctgaggtgggaggtcatatgacttgtgagctgaaacaaggctgaagggcacagcaaccctgccacagagtaagccagcccagtgacgggagcaagagatgaggggaagcggcatgccgtgctgtgagtaagggccagctgagccagctctgcagcactggtgtcgtctcagtgggcagagctgtgagccactcttgtgtggcatggaggggacatggagtaacctgtgggaaatactccagtgtaggagggacacctagtcagtcagcagagcagggagagtccccaggactgttagggtcgtatccaaacaggaggtgacaaacaggcggtagtgtgtcactctactcagagataccaggcacaggcgggcacggaacgctgtgatggagcgccttgctcacctgacagctgagcgtgaaggaaatggccgtttccttcgtggaggttagtctctgtctgtattgggacagcagacagtcagcgcctctgtgtcctctgattatgtgcccaccttgtggaacgcgcctgcctgcctgtccttgaggtcctctgcctgcccaccctggaggtgcacctgcgattaaatctccagatcagacagtagggattgtgaggggtctgaagggtagaggggttgagaagccccacagtatgaagagccacatctagactgcagagcctcgacacccctcacggcagcttagcccatagctggaggacggaagagaaagttttgagaacatcagagagacttgactatatagcccattagctgatacaaaggaatcacattcagtgtgcgcgcgcggtacagttcttaaaggttctcatctgtaagcattacttcctaaatttacaagagaaatgatagagtatttggtttgttttaaaatatttcaaaggtaaaatactgaaaagaaagtgacaaatagtggccactgtcccagctttggtggcagggcatacagcactacataggaactgctgtttcatgtgctcgactgttgtgttagaagcaaggtatgctggtgagatggcccagtcagtcagagagcccccaagccccggccgggtgcgtctggtggcagggatcagtgcgccaggctgtcttctgacctcacgtgtgtgctgttgagtgcacacacaccagtcagcttgttttctcaagaagcaaaatgaagtcggttagaccagaaagagaggcccctgaaactagtgttgagcttacctctaggacagtagtgtgtcccaggagatgactcagcagttgggactcaggcacacagcagcctgcctctgcatgactgaggagccggagcctgggctggggccgcgctcattctccactgtgctgctctgcacctggaaagaaacaaagttctcgggtctttccccaggcttccctgcatcaccacatctctgtagcgcagaccgatgagctccttcctgccaggacctctcagcgggctccacaccctctggactccaagaccacatctgacgttctaaggtagctctgactgaggcagcgtcgctgtccgtgggaaagtggtgctccttcctccttgcccctgaggagtgcaggacagggtggtgctcagagacactgctgcttgtgcagagcagcagagtccacttctccccacggtgcagggacacacagtgtgtgcactcagttcaccacacaggaggtgcagggacacttcatttcctattccaaagaggtgatgcaggtgtcagccctgggcagaaggacaaaggttagggagcagagcctgggagtggctctgcatggaaaactcagtttgaccttctctgccacagataagtatgttcgattgactagagcactaattctttgttatggaatgcacctcagatgcacggactctgtttcactgttttcatcagggcataaaatttaatggtgcatgcctgtaatcccagaacttgaaagagaaggctaaagaaccaggagttgaaagtcatccttacttacttactgagttcaagcccagagtccagcctgagctccggagacactgtgtggatgtgcatgtgtgtgcatgtggatgcacgtgccagatgccagccagtctcttcctgtctctcaccgtgctcctgagattggcctgtgtccacctcctctccccttccctcctcctgctattggattatagtgtgcactgttgctcactgctttacacgggttctggggcacacactcagcctttctgtcactagctgagatattgccccagacccaagactggatcttcaaaacaacaagcagacagaagctatcctgtgccttgagagctgagcctttctgggtgctctctgatgtactgtggtttggaaatgggcgatggacaggtgcctcactagcaacttggcccccagggtctctgatggaacagagagcaagggtcttgtgcaagttaagtacaaccatgcacacctaggatacccatgcacacccaggcagacaactaaggctgtggtcaaaagtatcaggctaacctgccatagagagcaaggccctgtccatccctgttgatttttttccagtgaccacatcagaataacatggagaaacttggaaagccgagtgtcagtaaagtattacattctgaacaattcaatatgatcagtatattctcattttggcatctagccaacatgaaacagttttcattcagtggcttcctgatcctggaggccctgaggtggccatgctggtgtgcagggacgcagggtgggccacgtgggccccacacaccccaagcctgtggcccagaagctgacctctgtgctctccctggcaggtttgtgctggagcagtacaacgccctatcctggctcacgtgcaatccagccacccaggaccgcacttcctgccttcccgtccacttcgtggtgctcacgcagctgtacaatgccatcatgaacatgctctaaccgggaagggaagcgcttgccctctgcctcagctcctcctgcagccttggccagggagcctgctccactctgcaaatgcccggccttttttagagcactccctataccccgcactgtgacgccttctgagcaggctcatgctcctcctgcagtgttcattgccacagtgacttcttgacgtgtctcacgaggacctggaaatttccataagcagtgacttgagccaatgtgtgatatgtgcagcctgcagtccccgggaagtggcggctgttggtggctgaagaggcaaggagaagagacaccgtccttttgcacaagagcctgctctcagcctctgtttagtaccaggctgtccagccctctgaatgcaatcctctagccaatggtggatgcctgggggtctcccatacttcataacctgggatgtgtcacaactaagagccagctccaggacaggatctagtgctggggcctctgcctcccccgcctgtcaggagggttttagttgatggcacacctgtgtagacacaggaggtctggggacagctgcattctgtttatttatttttcattttgttgtaagtttttttgcgactttgtttttttctaatcttgaggaccaggtacagtagctgaagcccactgagacccaccgtaggattctctgagtacatacctctgtcctagaagccaagaaaggagtgagaagaagcggggaggccacctagtggtagactcggtcagacagtctgtggctgcagcctgtgtaggttgcacccctatatgaagatggtcaggctcagccccgagctggaggcaaggaccttcatcacttctctatacagtcacatggaaataccttttctagagaattcttacagaaagccaggtctctcctttcattagatcaaaagggactcgtgtacatatcacaaccaaagtgtttgctcacgaaaccagttacaaacacagtgaattttttctggaccataggaatattgtttcaaagaaatagtgcaactcaaccgttacatcagtacttgaagctgagcctctatgtgggactttaaaaaaaaaaaaaaaaagcctttttaaagcattcgcagctgattgaagtattcttgactccctgtcccagaccttagggttgactttgaaaccctgtttctagcccttatgtcgtatgtttctgtctgtgggtggtgggtgtagaccggcttcccagagcctcctgacaggcccggcactgagcccggctcccgtgggagagtcatgcaaactaagttcttccaagagactttcatgtcctggttattaacaaagaaaaggaaaaaaatgtaataattgatatggttttgtaaaagtatttttcttgagataatctaacgtttaaaacattatattaacatgtggtggggatgtgaaagcagagaaataacttgtacatgggtgactgttctctgtctcaccaactgggggggttgctttccaatgtatagcttaaaaaatctgatatatcaaaccgtttgtatctaacgtgtacagtgtaaaattgacttaaaatatcgcagtgctattttttcttatcagcgaggaaatcctcaaggccttttgaagagcgtaagatgacggagatgtaaacttgtataaagtcacctcggggaggacgggctgtaaactagatatttgtaatctttaccacttgggattgcttcctctcagagttcaccagaactttgaatttctctctctctctctcttttttaaatgggctgtttttactgcaggggcttttcttccctagaaacccaactctacgcagaaaaagtgaaaaggaaaaaaaaaacacaaaaaaaaacagaaaaaaaagctataaaaagttttaaaagaaggcagcaaagggtagtttccatctggtgtcttttatttaagttttttaagttaagaaaagctggtgacatatttatacgtttttgggcaaaaaataaatgaatggcaatagatttaaagaaatcttattatgtacttctgtgtgcaaaagtctgtataatatttcccctaaatatgcattattttacctgtgagttttttacagaattaatctgaaatgtacaagccctggatttgctacagagtgagaagttattttattttatttttttttattttttattttgagaaaactgcagaaatcagaactcctaccatggtttgaaaagggaggcgggaggggaggcgggagggctggtccggcatgcctgtatgtatctctcaagagccttttttttaaaatgtaaaagctgtacatttttgggaagttctgattttctttttctttttttttttttctttttgtttccttttaccttcaagcattttgcagtgcgcttcttttatatctagcagacaattggaaagaaatacaaaacctatgtgacgttcatttaagaaccacagcccagtgctggttcaatacactaaagactttgataaaagagaatcaatggcaaaggtctccattttaaatgtcattcatatataccttgtggatgagagctatatacttttacacacttttttagaggaataaattattgaattactgaaacctcgagtggctcttttcccctcccaccccctctctgtactgagatcaccccgctccagtctgcacatgcgtcacagacggatctactgctctggcctatagagtgcacgtggggattgcatcacccaccaccccagtggctgttccagcattcccaggtcgggtcccagatgccaccagcaccaagagcctcttaggtgctctggtgtttaggtccttcgcgttcttgagcagggcagatctgatcgtgtctagtcctgggaggtttgcagacagccctaggacaagtgtgcatccccccctttcactactgatgtacaggccggtggcagtagcttgctatcagtcatgccacacacaagcaagtcctgctaaacacacaccatccgctgtgactatggtgtttctttctccagtagagaacccactcactcggtcttgggttcactctcctgtccgtttgaaacattacccaaaatggacaagccctgggactcggcggctcttccagtaaaaaccagaataattggaagggacttggttttttcattgtcctccatcagctttgaaatctactctcagtgtctccgaatttagacagcaatttgctgggttgactccataggacctcccccccaccaccacgcccatccccctggtcacatcatttacagtgaaaggcaaggggagttcacaacaagtgctctgcaaagcagaaagctcaacactaaaaggcagccatgtatccatgtgtttccattggcggtaccagccgtgacacacacacacacacacacacacacacacacacacacacacacactcactcctcagatctccctactccaagctaaacagaactgggtgggttctcgagggccttcctgtgcactttgctcaattggtactcacctgattccatcattgctgactttactcctacgggaagcaggacttcctgtagcttgtggctcaacccgaggtggcagaagttttgctgtagacgcggagacatgatgacagccgttggccatccagctgaccttctgcaactggtttccaattcccacagccctccactccacctgtgagcctgagcggttttatgtccctgtttttagaacatcacagggtgagggattttatgccaactggtatcaaatagtaagaccccctttggaaactgcttttcctcagtacaaggactaaaaagcttccgaagactagctactgaaacagaagccacaccctggagctcagtctgctgcagccatggtcctggtcactgtgagaagtagcttggctctcctcgtgttggaagtcctacccgaggtgcagtttctaatgtgtggcccacgtgctccgggtgttgccagagtcatttacatctactctacagagagccactattagttactatttcctgttactaatgacaggtgtcaagggaaggctggggatccagatagtttagaagatggtttatgtcctgggcctctagctctgcatccggccagattaattcagtctcacttcaattcaatttttattttttaatatttatttattttggttttctgttttgtttgtttgtttttgtttttgttttttttttgagacaggtttctctgtagagccctggctgtcctggaactcactttgtaggatcaacccccacccccaccccccaccccccaaaaaaagccttgaaaggccagcctggtcaattcaatttttaagttaaaaattgctcagcatctggctacaactctaagcaagtcaaaagccaatgagaagtgctgtttagcattgaggaggaggaggaagaggaggaagaggaggaggagggctgaagagggctatgtgctttctctgaagagaattagcctgatgggtttgcatgttattcagtgattgcggtccagatgctgacacctgtggttactaggtaacagggatcccagcctcagacacctgcaatggtctcacatccttcttagataaaaggagagagaaaagcacactaggtctttctgattggctaacacctgctttgggcccataccaacatgaacctctgaagtgaccaagggccctctcagatgattgactaccaccctgcctttatgccctcctcgtcctaccattgatggggcttgtttgaatctagctgttccaggaagccagatgacactcgggaacattggcacaccagactaagactagaaacatacgggcctgctctagccacctagggaaaggcatgctaactactcaacatgtaaaatagtctcctcactccaagtcagttcacccagggctcttgtgccttgattgtattaatatcctgtctggccctctcaggtacaaggcctgactgtggaggtggtatccacatggttgagacaggcacactgcatctggcctgctacttcttgcatccctgccaagttaagaaaatcccatctcatcaagtacagagaccgggcccttctctcctgcagcatcaacctgtgaccgtccggtcatttatgacagaggagaggctgctctttctttgaacctggaccaagctgagctaagactaagtacccccagatatttgagcattggcaacaacatagaccttatagcacctcaaaacatagcagcggattaccagagaatctaccagctcctggcacttctggaggagggtggttggggaaaaggagaggaatttaatttgttcgtttgtgtgttttctgtttgtcagtttgacttagactttatgggtgtgtgtgtggatttgtccagtgtcttttttcctagcagttcactgtctggtactctttgctttctccatgctgagatttccctacaatcgtctcggcttctgctttctttgctccccagctttctccctaagaggtttgtctctcgggtcttagatcttgggatcgtaattgcatgttgaatttattgctgcacttgatatacaggcatgtgtagccctgggcttcagggaaggggtggggatggggggtggggaagaacgggactcttcagactaaattcagttactcagagctttccaggaggcccttcatgcgacctgaggtgttaaaagtaagaggtgaagattagaccccttgtttaagttgatcttgctagtcaggttactctcccgactcttttcataccccttgttaaggaaagttgtctttgggtataaaccataaagcgtgccctaccagagagcatccactcaccgtcttgttttttgttcgtttgttttacaagcattctctcataggcttgttgtgacctaattcggggacagttgtcagaagagatacgatgtgtgtcccgtacaactttacagtttctagaagccacctttaagaagtcaagagaaataggtgaaaattcattcaatcgaacagcgtattttattttacccaacagagccagattcttctctttcaacgtaaagtcagtgttaaagctcagaaacatctgactaagactcttcctcctgcggtccgccttcagagggctctgtcctctcagggatcttaggtttggctgctgatttgggtcagttgaggcttggggtgggacacgacactaatgttatatcgcttggtttcttttgttttgttgttgttgttttttttttttaatttaaattgtaactaaatagtcctctgttgtaggtccatttcaaaagattcagtacccactctgggccagcatggcctggtgcagggccatacacatctagctgtctcaggcagctgatggtaggagggcatctcccactgtgcctgcgtctctgctgccttctctttgcgcttgcttattggtgcgtgcaggtttaatgatgtgtctgttcgttataactgcacaagggccctttgttctgcagaatggccctcccagccttgacttagaaaacccagcagtctgctgtgacagctctctacgtggcctctggattctgtgttgtacggtatatgctgcattgtgtaggtcactgtattttatttttaatttttttgattaattcatttattttatgcataaaataagtacactgtcactgtcctcagacacaccagaagacatcggatcccacgacagatgtgccaccgtgtggttgctgggaattgaactcaggacgtctggaagagcagagagcagccagtgctcttaaccgctgagccatctctccagtcctggattttgtttttctcatgcttccgttgaacaggatcattttggccatgctcatttggtcttgtccagcagtttctattgctgtgagtgcctgccagcttcccttcctctgacagaaaccaggttcctctgcttctctgagctctgttccccaaccctggaatttaatgggtgggaactcaaacactcctgtgcctaaagatgaggcagtgagggctgggctctgccattaccctttttctttggacatagactgggttgcaagccacccccaacaaagtcagaaatgaggtgtcacatggagacttcattctgtgagcaggcatctcttctcacccaggacctataaatagaaatgttcctcaagctccgattctgactccaccttcaaggtgaggaatcactgtgggcagcaggcagcagtggccctacccactcacctctgtcatgggacccacttcccacggaaacttctcacctatcgatcatccttcactgctcgcccttggcaaagtcactgtccttgatctcctggtcacagagaaacannnnnnnnnnnnnnnnnnnnnnnnnnnnnnnnnnnnnnnnnnnnnnnnnnnnnnnnnnnnnnnnnnnnnnnnnnnnnnnnnnnnnnnnnnnnnnnnnnnnnnnnnnnnnnnnnnnnnnnnnnnnnnnnnnnnnnnnnnnnnnnnnnnnnnnnnnnnnnnnnnnnnnnnnnnnnnnnnnnnnnnnnnnnnnnnnnnnnnnnnnnnnnnnnnnnnnnnnnnnnnnnnnnnnnnnnnnnnnnnnnnnnnnnnnnnnnnnnnnnnnnnnnnnnnnnnnnnnnnnnnnnnnnnnnnnnnnnnnnnnnnnnnnnnnnnnnnnnnnnnnnnnnnnnnnnnnnnnnnnnnnnnnnnnnnnnnnnnnnnnnnnnnnnnnnnnnnnnnnnnnnnnnnnnnnnnnnnnnnnnnnnnnnnnnnnnnnnnnnnnnnnnnnnnnnnnnnnnnnnnnnnnnnnnnnnnnnnnnnnnnnnnnnnnnnnnnnnnnnnnnnnnnnnnnnnnnnnnnnnnnnnnnnnnnnnnnnnnnnnnnnnnnnnnnnnnnnnnnnnnnnnnnnnnnnnnnnnnnnnnnnnnnnnnnnnnnnnnnnnnnnnnnnnnnnnnnnnnnncacatggtggctcacaaccatctgtaatgagatctgacggcctcttctggtgtgtctgaagtcagctacactgtacttataataaataaataaatcttaaacaaaaacaaaaaaacccccaaagcccagccccagtgctgtacttgttgaaacaaggctgaacctttccatagcctctccagacagtgctcccaactgtgagggacctttctcattaataaaaaaaaaagaaagaaagaaacctcagccagagtcctgcagccagcccagcccaccttcccttcaaaccttgtcctcactatggaagtctggtacccggagcttagcccatgttatcttcctcatcctcatatcctgctgcccactgatgctacatcctgaagatcatcaggcccctgaccaggcactgggatgtcacaggaacggccacaccctaccccaagcctgatgtggcttccgacccgtgaggttaggaggagatcatgtagccccagtctggccctagcagtatcctaacagcaggtgtggccagcacaccgcgtaaaaagccttctgtcaatgtgaggtttttaaatgatctgcagaaccctagaaagcggttgtcaggagtggggtgcagggcccgttttaggagcacagcatgtggaggccagaaggggctaccagtgtccacttcagatggccagcaagacgggatggaactgaaggatgaagtggttttgtgtaagcaagggccaaccttcccaattatgtgactttgggagaaaagtgttcagaggagggggcagctggagaagccccaccccagtgtgggcaaggcaggggcacactgtgatggcaccaacagcgtagagatggactcagcaggtcggggtacaggtgtcagagatgtagaagcaggtgtccctgcaatggctagggagatgggaatgttggtgccggctgagcatggagtcagaggacagggcaggccggcccagaggctaagctccaaagcaggagggaccacagacagcaggtagccagagaagggcacaagaagctgggtggcttgactctttgcatcagattagggagtgggtgaccacgagaaaggaacgacttggggaggagaggaccagagctttggctgatggttccattgtcgtgtgaaggaagacacccatgggtactcagggcagaggagggcagcatccttggtgtagatggggtgagaacccagcatagtgaatggctgtttatggtggcaccaatctgactgactttgaggaggttgaatggaaagaccccagtaggtcccttgttccaccccagtgtaagaacacactcgcagatcccatgccttccaataacctgttatatcctcagctttgcacccaagagaagtttctagatagtaggtttctgtcccctggggtggtgagaggctgtgggaagcaggaagcaggtgacaggcacagcgagcaatgttgctgctttaacgcttggctctgaagcatcccaagatgtttcctctgtcttggtgcatgtggacctggatccttctgcctctgcctgggcctccaaggtccctggcccaggactctagtatggtcctgcagcctctgcaggagcttgcaacttggtttctgtatgctggaatccagcgaggtaatcccacgggcaagcagttctatgggactggcaggatttggagagaagacacaggcttgatctttccgtattgttgttatacctgtaatgggagaaggctagaccctgcgggaggacacgtaggcgacactcaagacttcaatgacaatcccagtggctgtcatcccctgacctctcaccttgctatcatgtgatagcctcagctttccacaaacctgccacagcaaggtcttttgaacctcaagataacgggtttcctagacagcaaatggttcatccagatatcaggagaccattggagctcgctcccattccctaaatcttgtaatggcttctcatttcccgttgccttctgtggctccaggttcctggctgaggagccttgatagttggttgtcttctgggtgtggttaccttctgcttttgtctgatctcctcgggcctctatgtggtgtctgcactcatgtgaagtgttccagaggtctccatggacagcagctgtcacgttcctgaccagacacaggagagacaatccctgagggttcttgggcctgcccctcttgtgtctagggagcacctaactcctctgttgtgtacctggcttacatctagaaagttcttcctgtttaagtatcttggactaagccaaaccttggtgttccaggcctctggagatcacaggtgactttgggtggcacccttctgtctgaattgcctaggagtggctggccactgtcccatcctggcactgatcaccagagttgtggaccttcttgcctgtgaagaggaggaggcggggtcatcagaaaaatcaaagcgtagggctggaggagcccatgtccttcccaagttgctagtccagctttgcatcctgcttgttacctacagagacatcggatcccctggagctggagttaacagcagttgttaatggcccccatgggagctgggaattgaacccttgtcctccataagagcagcatgggttcctaaccactgagccatctccagctccagatatctattctcatctctctccttgagtctgagtgcagctttgtctctgcttcagggctgtgattctccagcctccagccaccctactcatggctctctctaattctacatcacagccacagcacccagtgcagacacagctgcttggtctatgtatcctacctggaacacagacctataagggtggcaactgtgtctccagcattgatgatggtggaaaaaagcatacaagcatttaaaaagcatatttcttttgaaacaattgtagatctacaagaacccacacaagtaacgtgttcttgcccgaccccagtgttcccacaggcttgcattgtgagctgaagcagcccacccatcctaacattgcccggatttcccccacagcgcatgcgtttcgtagagcccctgatccaattcaggaccccaatgtgacccacactcccgtctcctttcttagtcttacctcagtgccagccagttgcttgtgatgtgttcactccatttgggttggccgcctgacactttctcgtgattaaactgcatttcggagcaaagcttgagcaaaagcggtatgactgttctcgtgatgtcacatggtggggtgatgctcctgagttgccatgggtgatggtcaccttgacctgttggttaaagtggcatttttctgactctccacactcctccacagccccacgccccccattgattttcttccccaaatgctttgaaatgaacagcatcagggaaaagcaggcactaccccagactgtccaccagatggcagccttcaccaccgaatcttcatagatgagagtcttgctgttggaaagaatatctctgaacccacccttacggcccatctcctcagcaggccactgtctaggctgttgttagcctctctctctcctcatacacaccttcctgtctattgccatagaagtctctccctctggttgccagatacaagaacaaatacccagaatactctgggaatttgaatttcagacaatatatgggttttgcataagtacatctcctgcttcatttttagatacattaacattaaaaagtacaatcaaattaaaactgaaatctagctcagtcttttgtgttatagttgtcacctgccctggtacttttttgttttgttttgcttttggttttgagacagggtttctctgagtaacagagaccaggctgacctggaactcacagagatccacctgcctctgcctctgcctctgcctctgcctcccgagtactggtattaaaggcatgtgctaccatgcctggctctgccccgggattgttattcatgcgtttattaatcttgtcatgtgagcacctttctcatgcacctggcaactggggactcctaactgccttagtttctgccaacaaagcctttctcttactgcctgagaagtcagtcctagcctggcgagccaagcagtgtgtcaggagcagtaagcatatgtggctgcggaatgtgggtgctttgggagagcgggccatgtgtcctgaaggtcccccagattcaaagaggacctcagtagtctgcgatgaggattaaaaacagtttgcaaacaaaaaagctgtttctccgtattgaagcctagacacttgtgggcacacagatcaaaatggtcctctcccaggctggcaggatggctcagtggttaaagtccttgctgcagggtctgatgacctgagtcccatccctgggagccccatggtggaaggagagaagagactcctgcaagagactcctctgccggccacgagtgtgctgtatcgtgcctctacccacccacaataaagaaagagaaatgtatcaagatgcttctcttcctgttgtaaaggccgttgctcggcacaggactgtcccaggcatgtggccactggccagctcctgagccgcttgctcctgagcttgcttgcttttctttctttctttctttc

SEQ ID NO: 1709 - DNA, 8534 bp, Mus musculus
gtgcctaatggataagaacttcgtgcggatcgggaagtggtttgtgcggccctatgacaaggatgaaaagccagtcaacaaaagtgagcatctttcctgtgctttcacattcttccttcatggagagagtaacgtgtgcacaagtgtggagatagctcagcaccagccgatctatttgatcaacgaggaacacttacacatggcccaatcttcacctgcaccatttcaagtactggtgagtccttacggcttaaatggcacactaacagggcatgcatacaagatgtctgacccggccgcccgcaagctgattgaggaatggcactgtttctacccgatggtgctgaggaagagggaggagcctcgagaagaggctgagctggggtatgacgacgacttcccggtggcagttgaagtcattgttggtggcgtccggatggtctacccttcggctttcgtgttggtctctcagaatgacatcccagttcctcagagtgggcacggcacagttgcacagcaggggcttggtagtgtgaaagaccccagtaactgtgggatgcctctgacgcctcccacctccccagagcaggaggagccagatgtcgacgcccactcgggaagaagaggctgctcacagtcctgctgcctgggattttgtggacccaacccaaagagtcagctgctcctgctccagccaggcttcagtgcaggactgccatcatcttcatccttaccaccccctgcttcttccaagcacaaaaccacagaaagacaagaaaaaggagacaagttgcaaaagagacccttggtgccctttcaccataggccctctgtggccgaagaattatgcgtggagcaggatgcgcctgggcagaagctagggctggcagggatagacgcctccttagaggtgtcgaacactcgaaagtatgataagcaaatggccgtgccttccagaaatacaagcaagcaaatgaatctgaatcctatggattctcctcattcccccatctcccctctgccccccacactcagccctcagccacgaggtcaggaggcagagagtttggacccaccttctgtccctgtgaaccctgccctctatggaaatgggctagaccttcagcagctgtctactatagaggacagaactgtcctcgtaggccaaagactgcctctgatggcagaggccagtgagacagccttgtacagtgggctcaggccttcatacaccgagtcgtcagacaggtggtggcagagttttcgtctcccatccagtgaggatgctgagttccggcctccagagctgcagggggagaggtttgacactgccctggacctgaatcccgagagcacggccctgcaaagactcttagcacaacctaacaagcggttcaaaatctggcaggatgagcagcctcaggtgcagcctctccccttcctcgacccatcacctctgtcccagcagcctggagacactctgggagaagtcaacgacccatacacctttgaggatggcgacataaagtacatcttcacagcaaataagaaatgcaagcaggggacggagaaggactccctgaaaaagaacaaggagcctgctcaccctgtccttgcctcctctctcacagatgtccggcaggacagcgctgctggcagagccggctctgggagccttacccaggtgacagatttggcaccttccctgcacgacttagacaacatctttgataactctgatgacgacgagcttggggccgtgtcccctgctctacgttcatccaagatgcctactgttgggactgaggagcggccccctgggaaggacggaagagctgctggcccttaccctccaacagttgcagacttgcaaaggatgttccccacccctccgtcattggaacagcaccctgcattttctcctgtgatgaactataaagatggagtaagttcagagacagtgactgcactgggcatgatggagagtcccgtggtcagcatggtccccacacacctcacggagtttaggatggaagtggaagatggcttaggaagccccaagccagaggagataaaggacttttcctatgtgcacaaagtgccgcagttccagcctttcgtgggatcctccatgtttgctccactgaagatgctgccgagccattgcctgctgcctctgaagacacctgacgcctgtctgttccggccctcatgggcggtccctcctaagatggaacagctgcccatgccccctgcagcctcttctattagagacggctacaataacgtgcctagtgtcgggagccttgcagacccagactatctgaacacaccacagatgaacacacctgtgacactcaacagcgccgcccctgccagcaacagtggagctggagttctcccatctccagctacccctcggttctctgtccccacaccacgaacccccaggactccaagaactcccagaggtgggggcactgctagtggccaagggtctgtgaaatatgacagcacagatcaggggtcaccagcttccaccccctctaccacaaggccccttaactctgtggagcctgccaccatgcagccaattcctgaggcccacagtctctatgtcaccctcattctgtcagattctgtgatgaatgtcttcaaggacaggaactttgacagctgttgcatttgtgcctgcaacatgaacatcaaaggggcagatgtcgggctgtacatccccgattcctccaaggaggaccagtaccgctgcacctgtgggtttagtgcgatcgtgaaccgtaaacttggctacaactcggggctcttccttgaagatgagctggatatttttggcaagaattctgacatcggccaagctgcagaaagacgcctgatgatgtgccagtcctccggccagtccaccttgcttcctcaggtggagggtgcccggaaagccccagagccccccataagcctcctcctcctccttcagaatcagcacacgcagcccttcgcttctctcagcttcctggattacatctcctccgctaatcgccatgcactcccctgtgtgagctggacttatgaccgtgtgcaggcagataacaatgattactggacagagtgcttcaacgcattggaacaggggaggcaatatgtggataatcccacaggcgggaaagtggacgaggctctggtgagaagtgccaccgtacattgttggccgcacagcaacgtgctggacacaagcatgctctcatcccaagatgtggtgcgcatgctgctgtccctgcagcccttcctgcaggatgccatccagaagaagcgcacgggtaggacctgggagaacatccagcatgtgcaggggccgctcacctggcagcagttccataagatggcggggcgcgggacctacggttccgaagagtctcctgagccgctgcccatccccactctgctggtgggctacgacaaggagttcttgaccatctcgcccttctccttgcccttctgggagaggctgctcttggagccctatgggggccaccgtgatgttgcttatattgtggtgtgtccagaaaatgaggccttgctcgaaggagccaaaactttcttcagggacttgagtgctgtatatgagatgtgtcggctgggacagcacaagcccatctgcaaagtgctccgtgatgggatcatgcgtgtgggcaagaccgtggcgcagaagctgacagaggagcttgtgagcgagtggtttaaccagccatggagcagtgaggagagtgacaatcattccagactcaaactttatgctcaagtttgccgccatcacctagcaccttatttagccactctgcagctcgacagtggcctgctgatgccacctaagcaccagagcccaccagcagaagcacagggacaagccacgcctgggaatgctgggtctttaccttcgaattcaggctcaggagcacctccagctggcagtgcattcaatcccacctccagcagctctgcaaaccctacaacaagtagttcatctgcctcctctgggccgccaggctcctcagctgcctctgctccaggcatcactcagatgaacactacctcttcttcaggattcggtggtggtgttggagggcagaaccccagtgcggggggcagctctacagatcgaaccccagggaatgtggcttgtggagacactgagcctgggcagagctgcacccagtcctcacaggatggacaagacagtgttacagagagggagagaataggaatccccacggagcctgactctgcagacagccatgcctaccctccagccgtcgtcatttacatggtggaccccttcacctacactgcggaggaggactccagctctggaaacttctggctgctgagcttgatgcgctgctacacggagatgctggatcacttacccgagcacatgagaagctcgttcattctccagattgtgccttgccagtacatgctgcagaccatgaaggatgagcatgtcttctacattcaatacttgaagtccatggcgttctcagtgtactgccagtgcaggcggcctctgcctacacagatccacattaaatccctcacaggcttcgggcctgcagccagcattgagatgaccctcaagaacccggagcggcccagtccaatccagctttattcccctccctttatattggctccaatcaaagacaagcagacagaaccgggagagacctttggtgaggcgagccagaaatacaatgtgctctttgtgggctattgtctgtctcatgaccagcgctggctcttggcatcctgcactgacctgcatggggagttactggagacctgtgttgtaaacattgctttaccgagcaggtcacggaagagtaaagtgtctgcacggaaggtcgggctgcagaagctgtgggagtggtgcctgggcattgtccagatgacttctctgccctggagagttgtcattggccgcttggggcgtcttggccacggggagctgaaagattggagtatcctccttggagaatgttcactgcagacaatcagcaaacagctcaaggatgtgtgccgaatgtgtgggatctctgctgcagactctccttccatcctcagtgcctgcttggttgccatggagccccaggggtcctttgtagtgatgccagatgctgtcacaatgggctctgtgtttggccgaagcactgcattgaatatgcagtcgtcccagctgaacacacctcaggacgcctcctgcacccacatcttggtgttcccgacatcatcaaccatccaggtggctccagccaactaccccaatgaggatgggtttagccccaacaatgatgacatgtttgtagaccttccattcccagacgacatggacaatgacattggcatcctcatgaccgggaacctccactcctctcccaactcctctccggttccctccccgggctctccctctggaatcggtgtgggctctcacttccagcacagtcggagccagggagagcggcttctgtctcgggaggctccagaggaactcaagcagcagcccctggcccttgggtattttgtgtccactgccaaagcggagaacctcccgcagtggttttggtcatcgtgcccccaggcccggaaccagtgcccactcttcctgaaggcttccctgcatcaccacatctctgtagcgcagaccgatgagctccttcctgccaggacctctcagcgggctccacaccctctggactccaagaccacatctgacgttctaaggtttgtgctggagcagtacaacgccctatcctggctcacgtgcaatccagccacccaggaccgcacttcctgccttcccgtccacttcgtggtgctcacgcagctgtacaatgccatcatgaacatgctctaaccgggaagggaagcgcttgccctctgcctcagctcctcctgcagccttggccagggagcctgctccactctgcaaatgcccggccttttttagagcactccctataccccgcactgtgacgccttctgagcaggctcatgctcctcctgcagtgttcattgccacagtgacttcttgacgtgtctcacgaggacctggaaatttccataagcagtgacttgagccaatgtgtgatatgtgcagcctgcagtccccgggaagtggcggctgttggtggctgaagaggcaaggagaagagacaccgtccttttgcacaagagcctgctctcagcctctgtttagtaccaggctgtccagccctctgaatgcaatcctctagccaatggtggatgcctgggggtctcccatacttcataacctgggatgtgtcacaactaagagccagctccaggacaggatctagtgctggggcctctgcctcccccgcctgtcaggagggttttagttgatggcacacctgtgtagacacaggaggtctggggacagctgcattctgtttatttatttttcattttgttgtaagtttttttgcgactttgtttttttctaatcttgaggaccaggtacagtagctgaagcccactgagacccaccgtaggattctctgagtacatacctctgtcctagaagccaagaaaggagtgagaagaagcggggaggccacctagtggtagactcggtcagacagtctgtggctgcagcctgtgtaggttgcacccctatatgaagatggtcaggctcagccccgagctggaggcaaggaccttcatcacttctctatacagtcacatggaaataccttttctagagaattcttacagaaagccaggtctctcctttcattagatcaaaagggactcgtgtacatatcacaaccaaagtgtttgctcacgaaaccagttacaaacacagtgaattttttctggaccataggaatattgtttcaaagaaatagtgcaactcaaccgttacatcagtacttgaagctgagcctctatgtgggactttaaaaaaaaaaaaaaaaagcctttttaaagcattcgcagctgattgaagtattcttgactccctgtcccagaccttagggttgactttgaaaccctgtttctagcccttatgtcgtatgtttctgtctgtgggtggtgggtgtagaccggcttcccagagcctcctgacaggcccggcactgagcccggctcccgtgggagagtcatgcaaactaagttcttccaagagactttcatgtcctggttattaacaaagaaaaggaaaaaaatgtaataattgatatggttttgtaaaagtatttttcttgagataatctaacgtttaaaacattatattaacatgtggtggggatgtgaaagcagagaaataacttgtacatgggtgactgttctctgtctcaccaactgggggggttgctttccaatgtatagcttaaaaaatctgatatatcaaaccgtttgtatctaacgtgtacagtgtaaaattgacttaaaatatcgcagtgctattttttcttatcagcgaggaaatcctcaaggccttttgaagagcgtaagatgacggagatgtaaacttgtataaagtcacctcggggaggacgggctgtaaactagatatttgtaatctttaccacttgggattgcttcctctcagagttcaccagaactttgaatttctctctctctctctcttttttaaatgggctgtttttactgcaggggcttttcttccctagaaacccaactctacgcagaaaaagtgaaaaggaaaaaaaaaacacaaaaaaaaacagaaaaaaaagctataaaaagttttaaaagaaggcagcaaagggtagtttccatctggtgtcttttatttaagttttttaagttaagaaaagctggtgacatatttatacgtttttgggcaaaaaataaatgaatggcaatagatttaaagaaatcttattatgtacttctgtgtgcaaaagtctgtataatatttcccctaaatatgcattattttacctgtgagttttttacagaattaatctgaaatgtacaagccctggatttgctacagagtgagaagttattttattttatttttttttattttttattttgagaaaactgcagaaatcagaactcctaccatggtttgaaaagggaggcgggaggggaggcgggagggctggtccggcatgcctgtatgtatctctcaagagccttttttttaaaatgtaaaagctgtacatttttgggaagttctgattttctttttctttttttttttttctttttgtttccttttaccttcaagcattttgcagtgcgcttcttttatatctagcagacaattggaaagaaatacaaaacctatgtgacgttcatttaagaaccacagcccagtgctggttcaatacactaaagactttgataaaagagaatcaatggcaaaggtctccattttaaatgtcattcatatataccttgtggatgagagctatatacttttacacacttttttagaggaataaattattgaattactgaaa

SEQ ID NO: 1710 - protein, 1960 aa, Mus musculus
CLMDKNFVRIGKWFVRPYDKDEKPVNKSEHLSCAFTFFLHGESNVCTSVEIAQHQPIYLINEEHLHMAQSSPAPFQVLVSPYQGTLTGHAYKMSDPAARKLIEEWHCFYPMVLRKREEPREEAELGYDDDFPVAVEVIVGGVRMVYPSAFVLVSQNDIPVPQSGHGTVAQQGLGSVKDPSNCGMPLTPPTSPEQEEPDVDAHSGRRGCSQSCCLGFCGPNPKSQLLLLQPGFSAGLPSSSSLPPPASSKHKTTERQEKGDKLQKRPLVPFHHRPSVAEELCVEQDAPGQKLGLAGIDASLEVSNTRKYDKQMAVPSRNTSKQMNLNPMDSPHSPISPLPPTLSPQPRGQEAESLDPPSVPVNPALYGNGLDLQQLSTIEDRTVLVGQRLPLMAEASETAKGLRPSYTESSDRWWQSFRLPSSEDAEFRPPELQGERFDTALDLNPESTALQRLLAQPNKRFKIWQDEQPQVQPLPFLDPSPLSQQPGDTLGEVNDPYTFEDGDIKYIFTANKKCKQGTEKDSLKKNKEPAHPVLASSLTDVRQDSAAGRAGSGSLTQVTDLAPSLHDLDNIFDNSDDDELGAVSPALRSSKMPTVGTEERPPGKDGRAAGPYPPTVADLQRMFPTPPSLEQHPAFSPVMNYKDGVSSETVTALGMMESPVVSMVPTHLTEFRMEVEDGLGSPKPEEIKDFSYVHKVPQFQPFVGSSMFAPLKMLPSHCLLPLKTPDACLFRPSWAVPPKMEQLPMPPAASSIRDGYNNVPSVGSLADPDYLNTPQMNTPVTLNSAAPNSGAGVLPSPATPRFSVPTPRTPRTPRTPRGGGTASGQGSVKYDSTDQGSPASTPSTWLNSVEPATMQPIPEAHSLYVTLILSDSVMNVFKDRNFDSCCICACNMNIKGADVGIPDSSKEDQYRCTCGFSAIVNRKLGYNSGLFLEDELDIFGKNSDIGQAAERRLMMCQSSGQSTLLPQVEGARKAPEPPISLLLLLQNQHTQPFASLSFLDYISSANRHALPCVSWTYDRVQADNNDYWTECFNALEQGRQYVDNPTGGKVDEALVRSATVHCWPHSNVLDTSMLSSQDVVRMLLSLQPFLQDAIQKKRTGRTWENIQHVQGPLTWQQFHKMAGRGTYGSEESPEPLPIPTLLVGYDKEFLTISPFSLPFWERLLLEPYGGHRDVAYIVVCPENEALLEGAKTFFRDLSAVYEMCRLGQHKPICKVLRDGIMRVGKTVAQKLTEELVSEWFNQPWSSEESDNHSRLKLYAQVCRHHLAPYLATLQLDSGLLMPPKHQSPPAEAQGQATPGNAGSLPSNSGSGAPPAGSAFNPTSSSSANPTTSSSSASSGPPGSSAASAPGITQMNTTSSSGFGGGVGGQNPSAGGSSTDRTPGNVACGDTEPGQSCTQSSQDGQDSVTERERIGIPTEPDSADSHAYPPAVVIYMVDPFTYTAEEDSSSGNFWLLSLMRCYTEMLDHLPEHMRSSFILQIVPCQYMLQTMKDEHVFYIQYLKSMAFSVYCQCRRPLPTQIHIKSLTGFGPAASIEMTLKNPERPSPIQKPPFILAPIKDKQTEPGETFGEASQKYNVLFVGYCLSHDQRWLLASCTDLHGELLETCVVNIALPSRSRKSKVSARKVGLQKLWEWCLGIVQMTSLPWRVVIGRLGRLGHGELKDWSILLGECSLQTISKQLKDVCRMCGISAADSPSILSACLVAMEPQGSFVVMPDAVTMGSVFGRSTALNMQSSQLNTPQDASCTHILVFPTSSTIQVAPANYPNEDGFSPNNDDMFVDLPFPDDMDNDIGILMTGNLHSSPNSSPVPSPGSPSGIGVGSHFQHSRSQGERLLSREAPEELKQQPLALGYFVSTAKAENLPQWFWSSCPQARNQCPLFLKASLHHHVAQTDELLPARTSQRAPHPLDSKTTSDVLRFVLEQYNALSWLTCNPATQDRTSCLPVHFVVLTQLYNAIMNML

SEQ ID NO: 1711 - DNA, 81349 bp, Homo sapiens
ggaagaaaattctaggcacagggaacagtaatttcaaattgtgattgtttgaataatagcttattaggctggaatgcagagaagaaaggggagagagcaataggcaatttggttagaagggtaactggggctgggtgttggggattactgggccattggagggttgatttctgagtttcctgttctgttccattggcctctttgtccttgagtcattattatcctgttataattaccatggtttaattataaatagtgatactagcaggttgtctctcacttgtttttttctttaaaattgggttggctattcttgactctgtgttctatatgaattttagaatcagcttgtcaaaaacttgggctattgattagaattacatggaatttttagatcattttgggaaattataatctttatggtatttattatatccaggaatatatgatacatcttttaaaagacttcatatattcttttatattcttcaaacagactcatctataaatttctccatagaaacctaagctgtcttttattggtttattttctgggtaccttacagtttttattgctattgctaatgggatatatttttccccattttattttctaagttttttgtaggagtacaactattgttgaacttgtatctaccaaccttatctacatgcttgatctcttttgttagttctcttagtctatgtattgtctacataggaaatccaagaaaattatatccatctgcaaataaagatagcatcaccactttctttctttttttctttctctctttctttccttccttccttccttccttccttccttccttccttccttcttttcttttcttttcttttcttttcttttcttttcttttcttttcttttcttttcttttcttttcttttcttttcttttcttttttcttttctcccgtcccgtcccgtcccgtcccccctcccctcccctcccctcccctccttctcttctcttctctcttctttttttggacagagtctcgctctgttgcccaggctggagtgcagtggcccaatctcagcttcttgcaagctccacctcctgtgttcacaccattcttctgcctcagcctcctgagtagctgggaccacaggcgcccgccaccatgccaggctaatttttgtgtgtgtgtgtttgtgtttttagtaaagactgggtttcactgtgttagccaggatggtctcaatctcctgacctcgtgatccgcccgcctctgcctcccaaagtgcttggattacaggcatgagccactgcacccggcccctttctaatttttataccaccttttttcttttcttgtcttattgcattgacttggatatctagggcagtgttgtgtagaaaagcagttatctttgttttgctccattttttaaaagggattcttctaaagttttgacatgaagcaagacaattgctttatctgttttggtcagttccttttgattcctagagttccctaagagttttaaaaataattattattgaacttttttctgaaatttaacatatgcttctttcctaggtattgagatagattctttgatttttctcattcatctgttaatgcattgtattagtttcatagatttgctgatgttaattcatcacatcatttgttgaagcagtttgaataagagaaatgggttgagccttgaaaatttggtaaaacctaagatggtattgaagtgggtggatgggtttttttagttactgttttcaaattcttttatttttatagaaaattacttatttcatatatatcagatttatcggcataaagttactgtatttatagtgttcttattgttaaaagtgttccttctttgtttgtagttatttcctctatgtttgttcccaggattgtttgagcacttaccttcctgcacatacatctttcatccctctccttaaatcagtcatacctagtatttttgtcatctgttagtctgctcaaaaaagaagttttatcttgttaatcctttctgttgctttttcctattttattaataatacatatttttgttattattttcttccttccgttttattgtgtttactccttgctttcttcatttaagacttttaggcctataaggatataaattacttgtaagtactgtttctggtagattttgacatgtattacttttgttgtcattcagttttaaatattttgtgatttccattgtgatttcttctgtaacccatgatttattaggaactacacgtttaagttttcaaacaaaaggattttattttaacctttaaaaaaaaaactgttgatttctaactaaattgcactgttgttaaagaatatgtagactgactttgggaggcaaaggtgggtggatcacctgaggtcggaaatttgagaccacctagccaaaatggtgaatccccgtctctacgaaaaatacaaaaattagctgggcgtagcggcgcacatctgtaatcccagctacttaggaggctgaggcatgagaatcacctgaactgggaggtggaggttgcagtgagcagagatcatgccactgcactgcagcctgggtgacagagtgagattccatctgaaaaacaaacaaacaaacaaacaaacaaaaagcccaaaaagagtatgtagactgtatatcatcatttctttgaaatgatgtcttgtgtcttgttatgtattcaatttttgtagctcttccatgtattcatggaaagaggatacgttctttctttgtggaaagccatggtatacactagaaaacatgttaaaatatttattaattttagatttgtcagtttcttcttattcaaattttttctgtgtatatttctgagctgtattgcataccagtgtggctgtgtacatgttcatgattgattacttttcttcttgagtttctctttatatatttattgatgaacttaagttttaaaatatttcgttgttttatttgttgttattcctgtaccaggttttttcttgttagaattcatctggcatatgattttctacatttttttaacttttggtgtaattttactttgcatgccttttgtgcaatacgtagatgggtttactttaattattttagctactctggtaatctttgtcttttcagtaggtttaattacactagtttttttcatttgcacagtgatagagccaccattgccttttaaaaatgtctttaaaaatggcagactctccatacctttgcacttataagtttcaatttttttaatggttttttaccactttcctttttcttatgatttaaacctcagtttaaatgcttccctcccccccctttttttttttcagagaagcttttctctgaccaatccctttttagaatagaccccaactcccattattttcttagttccttatttatttcttttataatacttagaaaagttttatctcatttctatgtagattatttagtgatgatactagtattaatgtctccattttttatcattttatttatatgttagttacttgatattagttggtagaggatgaagaaaagggtagcatggtcaagaggaggtgcttcagcgttgggttacctgaagcaaattgaggaagacataaagattattcgtgatggaagagagtatgtataggagtaccttcacagagagaaagtaatctctagggaagggtgaattaagtttaactacagagatttttaaggtgagaaagaggttaaacaaagaattacttgaatcagacctgattcactgagtaaagagtggagaataaacagagttgagaaggcgtggaatacttgtcaagtggtgtgcccctaagagaacaggggtgaagctccaattttcctttgaccttgccatgtttttggttctgtgtattcatttgatagtatcttctggcctatagcagttagggagatagtagaactgatgccgggactagtttaagttacattgtgtctgatttatgttgatgttgaataggggtgaaggcagcattgatctaaggtagaaaatcttggatgtactaaacactatgttaagaagaaggaccaggtttttattccaactgtgctctgaacttgctgtgtaactttgggctcaatcttgccttccccccgaatcagaaagaggttgaccttaataatctccaaagtcttaaaatttttaatgaaagtatatgaaataaatggggtgagtaaaggttcaggtaaaaaagagtaataagtgacaagaagcaagaacatggtatagagcttgtaataaagatttacctcccacttctcatgtaacactgtataccctaacatatctataattgtattcatagaaccccttatcttcaatgttcattctcaaatctgatctcattttaacaaattaaaatttaagttgatacagttaatataaatgaacattcccacttatgtacgagccagctagtagaaagaacattgaattttaaggccaattccagtcgtgcatttagaagtgttattgggcacactaaagtctttttagccctattggttcatctgtgaaatgaaggagggtggactttgtatgaaaacaccggaattttacttgcaggcacatttctagatcagagaaatatgatagttgttgtgtgtccatattttatcaagacatttgacataatctttttgattattctctttagagtagaatgagtgagtgacaactcattgttgaatttgtaacttggagttatctgatgagatggcacaggattctgttctcagtgcggtttttatttcaccatttttagcattgctttggataaagatattgatggcttgctaagcaagtaacttgtatgttggattacaaaatcagggtctcagcaggctttgacttaagcaccaaatatgacacatggaagcaccgcggatttctctagagcactcctctggttgggccaacaagcagcgctgcataaggataggaggcaagggcttcctcagatcttgccttcacattgctttctgtgtgacacatgatcccacatttcaacaagtataaaagaatattgtgaattctctctttcccctttagtcatgccgtttcattccccgagggaaccaaaattattagggattgtttgtttgtttgtttgtttgttttgagacagagtctctctgtcaccccggctggagttcagtggcatgatctgggctgtctgccacctcaacctcaaaggctcaagctgtcctcctacctcagccacccgagtagctgggactacaggcagtgccaccacacccagctaatttttgtattttttgtagagatgtggttttggccatgttgcacaggttagtcctgaactcctgagctcagcgatctgcccaactctgcctcccaaagtgctaggattacaggcgtgagccaccttgcccagctgttattaggttttttaaatgatctgttcagaaaaatgttatgccacattgcaaattgtaagcaaattgtgtgtggaaatatttttctccccactttcacattttatacagctgggtgtatattactcatattgttttgtacctttttccttttttctcataatagtccttgttggaggtgtttccgtatcagtgtgatcatttccttttacatggctgcagggcattactttgtggcttacataccatagtttagttaacaggtccactactgatggacattttagtgtttttcagactttattacaagcagtgctataatctgtactctataccatagttttatatatgggataaattcttagaagtgctgttgctaggtcacagggggattcaactttctagtgtcagtgctgtcattcctgtccttgttttacatgatcttagaaaaaatagaatttaatagttgggatttaggcattatcaaatccagtgattctcaaagtgtggtctttgagccaggagcagcagcagcagcagcatcacatgggaacttgttaaaaatgcagatttatggggcccaccctaaacctcctgaatcagagcctcaggggcccagcagtctgcactaacaggtgcttttacatctatggaaactgatcagagtgatgaaataacttgccaaaaatatatagttactggtggcttctgttatatttccactataacttctatttttcttgttttcagtgcctcttttaaaaggacattttgttttttaagttatcaatataaaagatccttgattcgattttaatcttttttatttatgcttctcaactgtctgtgttttgggacatagcaaattcaaatgaatactattttgaaatttttataacaattccttagactttctaaaaccaatccttaaattaactgcctgttattttgcatatacgagtcttccgatgtctcaagggatggcccccgacatcctttttttgactcctttccagtcacatcccaccattccaaactatatccttctcttaaccacatctgttccttgcctcatgttttctcttactttttctttttactattaaaccctattttctttctttttttgaattctattttattttaaattgacacataataattgtacatatttatgagctacaaagtgatgcttggatacctgtatacagcgtgtaatgatcaaatcagggtaattaacaaatccataacctcaaacatttatcatttttctgtggtaagaacattgtctgttttacctgttttgagatatacaatgcattattgttaactagttaccctactgtgcaatagaatactagaacttattgtttctaactgtaactgttggctaacctcctccatctcttcccttcccctcccctgcctctgataatggcaattctgttctctacttatatgatatcaggttttttagattccacatgtgagtgagatcatgtggtatttgtctttatgtgtctgatctgtttcacttaacataatgtcctccaggttcatccatgttgtctcaaatgacaggatttcattctataacttaatagtattccattgtgtattatataccacattttcttcattcattcatcccttgatggacacttaggttgattccatatcttaactattgtgaataataatgaataagcaagggagtgcagataactcttcgacatactgagttcatttcctttgggtatatcaccagtggtgggattacaggatcatatggtagttgtatttctaacattttgaggaatctttatactgtttttcataattgctgtcttaatttacattcccaccaacagtgtataaaggtcctcttttctttgcatccttgccaacacttgttatctgttatctttttgatgatgtccattttaattggagtgaagggatatcttactgcgattttgatttcctttccctgatgattactcatgttgaacattttttctatatacctgttggccatttgcatgttttattttcagaacaaagcagtggtggggggatacatcacactacctgacttcaaagtatactgtaaagctgtagtgaccaaaatagcatgacactggcataaaaacagacacgtaaatcaatggaacagaatagagaacccagaaataaattctcttatcaacagacacttgatttaaaagaaggtgccaagagcacatactagaggaaagaatagtgtcttcaaaaaatgatgctgggaaaattggatttctacatgcagaggaatgacactagacccctatttctcaatttaaaaacaagatcacctcccccccccccccgccccgccaaaaaaaagcatgaaactactagaagaaaccataggagaaatccttcttcacattcattgatctgggcaaggattttaaaaataaaacttcaaaggtccaggtaataaaaacaaaaatagaaaatggggttatatcaaagtaaaaagcttctgcacagcaaaggaactgaccaacagagtgaaagggtaacccacagaataggagaaaatatttgcaaactatatatctgacaggggattaatatctggaatatctaaggaactcaagtcagtagcagaaaccaaccagatttaaaagctgggcaaaatacctgaatggacgtttctcaaattttcatttgttcttttcttcttaaagcatttgtttgtatattctaaattgaagaaatcactactggttagcctttctatggcattttgttattatttgtatgtttgtgcctggctttattttattcatgtgttttcatatcagtctcttgctagtgaatatgctccttgagggcaaggactgtgttttcttcagtgtcacttcaggctccttgcaccattcttagataaatgttggttgtatttgttctgatgcacagttgggactcggtggaatagagaacatgttctatggctgtagtctacatttatttctcccaccagcttcttataaataagctagtaactacatgggatactgggcatgaatagggataagtcagctcaaactcccttagctgaaatttacagctgaaaaataagccaatccacaatcagtaaaactatattttggtcctatttaatgtgccagacataatgttgtatgtagaagatggtgtgtttctagtgtcattttcataaaggacagagtatttttactgtttatattattttatacctatagatgttcaaattatgtgcatttttgcttttgtgaacttagaagtatggtatcaagggtttttaaaactttttttcaaaattcttttaaaattgtagtcactatcttgaatttactctgtcatgttaaatacccagataccaagactgggtgtttcctactggtgaaatgtcatattttggtaaaacaaaaaatgttatctaaacatactggtcaaaggagaatatatatgtgtcactatgtgatagagaaacattttaattttatttcatgttttcctttcaagcattatgattttgcacttgaaacaacattttttttttgagtagtactccaaatgtactttataatactttagagaagttttgaaaagaagcagcatctttgagatgacttttaaaaattgtggttgcttggctttatttagtaaaagtgattttgtttcatcaggaaaatgttcttacgagatgttttgagaaatggagatgtgttatggctatcttagggccaaagttacaattttgaaaaaatgtgctgaggggttgccttctgatcttgttcgtaagccactttttttgagacaggggtcttgctctgttgtccatggtggagtgcagtggcttgatcacagttcactgcaacctcgaacccttgggctcaagcgatcctctcacctcagcctcctcaggagctaggactacaggtgcacaccaccgtgcctggctaattcatttatttatttttggtggagatgaggtcttatgttgcccaggctggttttgaattctggcctcaagttatcctcctgcctcagcctctcaaaacgttggagttacaggtgtgagctgttatgctgggtcagtgggccactttaaaaaataagtcttttaagtgtttattcatttatttgacttaacacgttttgagtgcttgtcttgtgctagacactgagacaatagaaaactattccaattccttctctgttcttaggtgtttatagttggcataagagttagattttatgcaaatgaaactggaaacattttgtacagtaacttacaaaagttctcaatgcagtatattcgtatttccagatttatctgatggcttagtttgtcaatactgaattagaagtttctcttttgcccacaattagaagtcagccttactggacggttgataaagtagagctgtatcttacctgtagttcctgtttctagcaccctttcctaccaaaatataaagttgagtttctcattctctcttttgtagtgagcatttgtcctgtgctttcacattctttctgcatggagaaagtaatgtatgcacaagtgtggagattgcccagcaccagccaatttatttgatcaatgaggagcatatacacatggctcagtcttcacctgcaccatttcaaggtaagtatgggtgttcctgctctccacccctatccgccaccgagtggataaccatcttgcccagtaaagttttgcagggtgagaccttatcttaaatggacattttaaagctaagcataagggtcagattttgaagaaggaagaaaagactaccatttcataattaagtagtaatagtgtgttagtttttcgctgaagcttatcgcatatataagatggtcttatgtgtattcttttgtaagaataaaatgtagaatttccttcagaacaaaagaaaatcaataaatacttgaaaaatagaattcaatgagtaattgaccaaagtcacaaattaaaggttttcattgttgtgtttattaacaaggttttaggaatgtaatggtttatagaagataaaccaaatacttagtatttgaaatttctatcagaatcaaagttctagaattatacagtgtatagtttcttcagcgatgttcctaactttgttttaattttaaactccattggtaataggtatttagctgtaatttaaatgtaattgatacattcatattttcattaattctcagctttaccacctatatatcaccaaaataacttcatgtccttttgatctgagcattacaaatcttagttttgtctttggaattcagaattttctgtgagtaacagcttttaaatgttataatattagattgaaccgtatggaaacaatctttttttggttcagtctaatatgtcattattagagatgactggttgaaatagtcttagcatatcacacaatataattttaaaaaacactgatattttaacagacttgactaaaatattataattgctgtaaaagcctgtcatgagcatttagcctccattgtatttattttttgttttctataaactattctgatttaattcaatgaaagcatctgtttcttgccccaaatataataaaactactagaaaattcaaaacccaattcttaaactgtacagtacaaattgtacagtatttgcaaattatggcttatcagaatttttaaaatactgttttcttgagtgtaaaagtgctgaggaccatctgactccatccaacattttatcactcagaataaaagcatttagttatggtaataacagaggaataagtagtcatgagggaagagaacttatttctaatcttcaatgttgggaacaataatattaggaataccaggtccctatagaccacttttaatttttctgatttttgtcactgatggaagtcatagaatacttttgtggagcattattctgcttattttccatgattggtgtggaggaagaccatactaaggcagttgctgtccttatggataattatattcatcataattatccaaattgatgtgggaatttcctggaagcattattgcaaaaaaattacccttgattaactgtgttagttggagtcagtatttttatcccatttggatcattgaggaacagcagaaagactcaacgatacatgtgatgtctataactgtctctctcttgattgatgtgacatatgatctagctctttaaaaaaattaaaaaaaagacattccgtttaatgaccatgctgagtttttgttaaaaattagaattaagaaaaagtggcctttatcttcagaaacgtattatttggaagattgaagtactcacttcaaggctatgaactggctgggtaattcacagtactatattaactatatttttgtgtctgactcagtgaaaatgccatcaaggtcaaatactgaaagaagatagaggactttgggtcctttactttgagttaaatcaaattttacttagagttgttttatcaacagacctctaaaacagtcaaaacagaaacgataactattatgcttcaagcttttgtacattaaaactttcccactgttagaaatttcatttatatgttattctttgattaccacagatgtttagggagtctcaggaaccacaagagtgttcaagttttaggcagcatttgcggtctccatgttgaatgattttcttctgttttgagagagtcagtgtttacattgtacaggctattattaaacagatatgtatatgcttcaaagcatagctgtctgataacattgtactatccatattttatttcgtttaaaaattgtgggaggtgagaggtgtataaataataagaaattttaaaacaagaaacttcaaaatatcatacttttgtggctaaggcgggagcatcacttgagcctgggagttcaagaccagcctgagcaacatagtgagacccagtctctacaaaaataatttttaaaaaaatttcttttaaatcatactttaaatagagttaggaaataaagaacaatgcacattaagtgatactgtaacctaaaattaccacatatgtagtgttgcacttaagtaggaattatttctctaatgtttagcatgtatttctcctcccctccatagtactggtaagtccttatggcttaaatgggacgctaacaggccaagcatacaagatgtcagacccagccactcgtaagttgattgaggaatggcagtatttctacccgatggtgctaaaaaagaaagaagaatcgaaagaggaagacgagttgggatatgatgatgatttccctgtggcagttgaagtaattgttggtaagagaaaatattttgcctgaagaactttattcttcttcctcttccttaatttaaaaagataatcatttagattcttcagaaataatctccatacccatctttttaaagaaattctcttgacacaatggtatgtactgagtagttatcttgcctgaagcacccttggtccttgtattccaaatgctcttatcatcatgttggaacacatgtttaaacagctattaacttatgaaagaatggagcctatcacttttggcagtacttcatgagcatctcattttcaccattggaatcataaaattggaagtcttgtatgaattctttctcagtcctgattctttccttgttctctttgcttataggtggtgttcggatggtttacccttcagcatttgttttgatctctcagaatgacatcccggttcctcagagtgttgccagtgctggaggccacattgcagttgggcagcaagggcttggtagtgtgaaggacccaagtaactgtgggatgcctctgacccctcccacctctccagaacaggctatcctaggtgagtaggatccaggagtgtcctggggagaagagatctcagacaattgtatagtctacctgccatggaacaggtgagaaaacagaaattcctgttggaagagatggaggtagtagagtaacgtaaggatattacaaaatggagaaggaaaactataaacaaacagaattcatacacttcagaattttaactctgtccatattagtctttattgttattaaatagtttagattctgttaaagtttgcacacacatctgcccctgtatgtgtgtatgtgttcacatatagataaaatgtagggtttttttttgttttttttttttttaattttgaacaactgaagaatactaaatcagagagtagctgaagcctctgccccggtgaccattgtcagccagggacaggccttgaacaactcttttccctgttagatgtaaagttagactagtgcttagtagctctgaataaatacttttctctgtcagtaaagtgtctgcattaataataaatattaattatatgggacagttttgacagttggaactgcctgtcttcatggaaaaattcagaaattgtttaaattgggaacatttttgccttctttattgagtagtatagttcctatattaactttgttattgttgtagttgacctcactttaattagaactgtggtcagtatggaaaggatactcatcatacttgagccgaaatgagattatttatttataagcattgaatgtgggccaagctggcaggaacattagagtaaataaagccttggctgctaaactttgaaaataaactatcaagcatgatacatacgtaatcctcatgaaaattaccagagtaagacaaaatttgaaagtttctagcacaattcttggcaattagtgggcattaaataaatgtttatagttaaagaagatattggggaaaagcatatactttgtgattgagcgcacctcgttgtaaaacctggctatatcgtttacaaggtgagtgaccttatttaattctcgtagtttttctgaatcttggttattttttctgataaatacatactttaccgtgttgttgtacatactaggtaatatatacaagtgcttggtaaacaataaagtcatatacaagtggtagcaataatttaaagcaatattcaaaactcgaagtttagcacacattgtctggaggtaattactcagatgttttgtgggagacatagaaatggacatgtatgtttttaagaaccatgtatttgctgagatggttaaaaaaaaaaaaagaagaaaagaaaagtacatccaaggccaggcatgatggctcatgcctgtaatcccatcattttggaaagtcatggcaggtggatcgcttgagctcaggagtttcagaccatcctgggcaacatggtggaatcctgtttctacaaaaaatacaaaaatgagctatgcatggtgacaaatgcctgtagttccagctacttgggaggctgaggtgggaagatggcttgagccctggaggtggaggttgccgtgagccaagacagcatcagtgcactccaccatggtcgacggagctagaccatatctcaaaaaaataaaaaagtacttgcggctttcatttggtagagcagagaatttggatgattccttgtgaaaggatttatcatcaatcaactatattaaactaaaaaagaactttcatagtcttttgtagtaatcatcatagagaagatatatgaatataaaaattagaattatcagtattttgaagtttttaatttcacatcacaatttggatttttaacaattgcactacattaagttatccacttgttatctgtttgtttttgttttgccttgtacttagtgaaatttgtattcaacttaaaattgaaggcctgctgtgtaaatgaggctttgacctctggtcagttcagaactcttaatagtcataattcagaaacaagaggttttttttgatgggggatttcagtgtggactaattaactatggatcttcaaattccttcccctttaactctgtatgctattgtgttaggccttggataaataaatcccctgatgtcgccttattccttaaaacaaacacacacaactgaacaaaagctgccgatatccttgtagtaaaatgaatttgcctaaattttcatatcataggatgttgaattacaggttaggagtcttaatgctgtatcagagagtatcccggtcagccttgacattctgtagttgaatgccatatttttctagatataggacagaatgggctactttgccgtctaaaaaacaccaaggttctccttgattagcagagggcttaggagggccgaatagtattagtgacattactcataccttatttggattggtatatccacttgcctctttgtttgatatgtagaggtaattgcaagtaacaacattcaacatgcattttaacagattggagtaacaagtcttgtttaattccatctaagataccactcagattttagttcagtcatttaagtgccactgaaaagcttcaacctagctttagtcagaaaagtctctatggcttgtttctccctactcttttcttttcttggtcataaattgtttctttatgataccatgggcatatgatctctttagctatatcataggatgttttggagagaaggtctatgttatctacttcatacttctgtttatttctttagtttgcctagttttataattggtgtttgaaaagcaattgtaaaattgaaattaattcttttgcatcatgaaccaagttgggaacttttaaaatgtagcaaagttcaaatttcttatctcatttgtaatatagtaatacttttatcggaaagaagagcgcttcatttccttagaatataagcatttgggtcttttttttaaatagacgtaagcctgaccattcagcttgtatcatcatcatctttcattgataataagaatacttagtttgtgttataaagttgcttctttctttttcaccttgactttcgttaaggtgttttgcatcatagttctattgagaagaaaatccataatatatacttactaagtcaaataggtgaaagtgattcaatcagaatttaatactggaaattgactttagtatttgtcttatataagatagaagtagtaaaatactcaaaatgtaaacaacaaccagtatcatcaataatcataatgaacatagttgaaagaaatagattatatttataaccactgtatttgaaaaaactaagtggagttactagagagaaaccagtgaatttttaatcctctgaaataaaatgtcaagacaacctctttcagtgtcgtagtactaagttttaaatacatagtgtcaggcataaggacaaacagtaccacacacaaatttgaaatttgaccttgttaaaagctttgtgccattactttctttttcctacccagggcactgtgtgctgctgatatacagccatttagctacatgagtataaagctccctctactgttcccttttgccttgaaactcattgactgtgttaagatttaaaaatctaaaacaatcagtggaggtttgcatctttaatattgtgatgtatgtacccttgcttctaagttgtttccaatacatgtggactaggagtgcctatgtatgtgtgtgcccttatggttgtgtgagtgttcatctgattaattgatttagggaaaaaacaaagaatcatacagacagagttccagggaaaaaaatccattctgatagaaattttactcatgattatagatagtgttattgccaggggatagggaaaaagctatgtatatgactttcaacaattaaaatgcatatttatgttaataagatagcagtctatgaagtaggaaaccttttcagaaaatcctaacattccaaattgccttttttttcaggtgagagtggaggtatgcagagtgctgccagtcacctggtttcccaagatggagggatgataacgatgcacagtccaaagagatcggggaagattcctccaaaactccacaatcatatggtccatcgagtctggaaggaatgcatcctcaacagaacccagtccaagtaagttttctcgattatgtctagatcatagtttagtaaccatctccttgattgctacctggaaaatgtcaatcacattgcactattgtgtgaccaaacttgagaggtcatcattggtatttcatctttttgaatttaatagaataaaatttgaaataaatatgttaaaatcaagacatttactgtacttgatttcattatcgaggaactttttgaagttcctgatactgtacagattggcatggtgttgacctaatattttgtagcacagctggcacagggattcaccatgggtatcaggacagcaaccagtgggtttggtttttccttgcatatcaatgtatgaatgcgtccctattgtgaagggaaagaaccttccttgctgatttactattgtatacaggccttagttgtaattaacaatacatttttgaactagactgatgacagttggaggggtgtttattatctgccgtgctcctgtttgttgatttgagaaaattatgttcttttcttccctgacctaactttccttcctttccagtctccctgcctttcttctttaacatacttttggaaaaggagagaattgatttttagaaaagactgctgctgattattttaattgcctaaacagtaatgacaaacaggagtcaataagtactattccacttatcaagatttatgtaaacataatcagcacagtttcatctctgttttaatatgagtagatgtctgctttcttgactaatgaaagtagacaaatgagtcttgattctctgaaacagaatgaatatggacatgcatgtcagtaaaatccaataacttccctcatttagaagccaatgaaatgtttcttaagtgactactgttccaagtttttatacagatttaaaacctgtcctttggacccagcttttagcaatttcatactaaatattgaccaatgaattgattctagaatagtccattgaagatgtagtagagagctctaaaataattgcagtggaaaatcatgtcacattctagaattaaaaagttatctctagtcactttaaaatggtcctttcctttagaataattggtacagatatttttacttccatctgcaatgcctagattatttccaagtaaacattttctttttcttttcctttcacttatcatgtttgatttttaatcaccatcaaccttacacctccacaactcttaacagatcatagtccctttctcagcagtacagaacagggagatgagacaaccaggagggcagtggagggcagagagtgggagaactccctgtagagccactgttgaaacactttgcagtatctgctgtagcaaaatcagcaatccaaaaatattgccccttattgttatttcattgtataataaagcgatctgcttttcgctaccaattatcagtgatatgtaggcgatacttctattttctatttcacattaggagtgctgctcttaaatgctagtaaatattttacaggatgagtatcttactcaaagttcgtgggaccggaagtgtttgggatttcagatttttttttagattttggaatatttgcatatacataatgagatatcttggggatgggacttaagtctaagcacaaagttcatttatgtttcatgtgcacatagcctgaaggtaattttatacaatgtcttaaaacaattttgtgcatgaaacaaagtttgtgtacattgaaccctgagtaagcaagggtgtctatctcagccacccatgtggataatctgggattgtttggcatcaccatcattcctgactcagaattcatatgctaccgataagcagtcacctcagcctcccaagtatctgggactacaggcaagcgccaccatgcccggctaatttttgtatttgtatatatggggttttgccatgttgcccaggatggtctcaaactcctggactcaagcaatccgcccaccttagcctcccaaaatgctgggattacaagtatgaaccacatgcgcccagccaaatggaaacattttgaatcctgcttccagtacataaaacaggttgttttattcattggttgctctgaactacatgtcagcaggataccattactatgtgaatgaaatgtattcaactcttgaacatttttctccccaggggtatgggtattatgttcacacataagtcacatttttaacccttttaggaggagccaaatgtcaactccaactcttgaagaagagcctgctagcaatcctgctacttgggattttgtggatccaacccaaagagtcagctgttcttgttccaggtaggtaataaaaaaggcaaaatagtaatggatcgaatgatggcgcatcttgttgattcatctcctggcctcacagatcagttcttcctgattctccattctcctccagtagagaagaaaaagattagtttttttcttatatgcagatgatacagttttattgtcaggactcagagtttgttagacaatcggccctgttaacatattgctcccacaacttttttctggttagcagcttcaaaactaaaggcatcagtttgacaagacagttcttagccctttaaatgactttatttaactactcttaattttaaagtagagatacattaaaaacagatgggcttgagtcaatagaatttggattaaagagactttctgtagataatttgttttgttgctagcagtggtgttttttgatcgagacaggtatttggtcacaactgctaaaagctaaaactgttgcagtaatgataccttgcttattcatttagttctttggatacgtcctcagattgctttttttgtagaaaatttttgcattcttcatggatattccattgacttaccactctttgttgtagtaaagaatcttaccgtcataggttttcattagggttcttaaattctttaactgggcataagtcttaacccccagctcatttgacagttagaagaagtggtgatgatttttcaccacgactgggctattttgagtagccctgcttctgaaatatacactttcaaatttgatactgttcaatgttgataaaaagttcaggtgagataagcatatttagaagatggccattcatgtctctggtgagatcagggtttcttaatgtagcatgagtgacttggcttcaggctgaggaggtagtccatacgccccctgcatatatgcagactgctgcgtgtgtacacttagggaacagctttgacacgttttcctcttctcccctgccccttgaattgattctttatcgagctctgccttggtagcctcttgttgagagatgtaaggataagcctaatgaaactcattattgatttttcagggaggatgtttttgaagaagttgcttgctcattaagggttccctctctgagcatgtgagagcctctctctggtgttagtaggtgaatacctactttactcttgtctctaggctcttgtgaattgtgtgacaaaaagtattttcccagtaactttgacttatggacagctcacagccaagttaaggcccgcctttagcacatacataggatataaactgtagtgtatttaacttttctttcatcttattttccctgctctttccttagcccagattttttcacttaaaaagataacgtatttactgacttttacacatttttattagctacctggaattatttttgtaacacgttaagtgtaaataaacaaataatgctttgctttttgttttctggaattattgttgtatttctttgccaaatgcatatatcttcaggtcttttttttataaccatatgcataccaaggcaccattccattgactttccaacttctgtcccaacctgactttcacatagtcttgtattttgggggatgcctttaagaaaaatccttaggctgggtgcagtggctcacgcctgtaatcctagcactttgggaggccaaggcaggcagatcacgaggtcaagagttcgagaccagcctgaccaacatggtgaaaccccatttctacttaaaaaaaaaacaaaaacacaaattagccagccatggtggtgcgtgtctgtaatcccagctgctcaggaggctgaggcaggagaattgcttgaacccgggaggcggaggttgcagtgagccgagatcgcaccactgtactccagcctagacagagcgagactccatctcaaaaaaaaaaaaaaagaaaaatccttaatttttgccatgtatgcttccctgcaaacctggaaccctattgtggtcatttttatcacaattttctcttcccagcctacagacttgttagatgtaatctgtcactggatttcacactgacttcctttgaaatgcctattgtaatccttctcctttccttgttcttttagtcatgatctatttctacatgcttgggccctgcctcaggtttcttcctaccaccagtcacccatatagtgtgccgacttcgtctgattttcccactgcctgcatcaggttcttttcctgctgagacgcactgtgattctctcctacctactgtgcattcctcattctaacctttttgcaatgtagctgaatcattaaatacagttgaaaaaacttactttatgattagattatccactttgcaaaaaatctttactttgaagagggtatcataaagtgtctctcaaagaactagtgcgggtaaatgctctctgagaaaaaaagtctaaaagacttttaaattttaggttttaaagtaagtaccttcataagatattgagatactttctgatgagacgttcacatgttactgtggtaccatgctcattgagcttaaagacaagaagttcaggagtgtttgtttttatttttttagagtagcaaagactttggcaagagtatttgcagattatctgctgcaggattaccaaacccattatggtacagaccactccttccactctttaatggccttatggagcagggcagccatcctgctgtcccactaaaccatcccattatgccccacaaatccgttttactgctcactagggcatcatttagggcaatgcagcagtaatttaatgccaccctagtggcctcagagagttactactacaccggcaggagacctcatatttttccccgggaatgatttatatattgggaggtactggctgacatgcagtataactttgttgtacagattaaaccttggcatcatgtagtgggctcttactgagccatttttcacacccatgcttgccaagaagtgtgttaagatgtgagccgacttggtttttctgcttagatggttcaggtgcatttgtgtatgtgtggtgttaacttctgtcattttaacgtgtgtctgtaagatccaaagttgtcttttatcccttcttgcctagatatagtggcacataaagtttctagtatatttatcctattaaatgttcttaggattgaaacttactgttttagttccacactttgaggcagagtagttgcgtagttattttattcccaatttacagcactacaagccattataagccattctatattacagttagtagagtgttataaaatagaaattggaagctttgttgtttcttggcagagaatctcatgactctactctcatggttttaagatgcagtatgaataggttatctgaggccctcaccaaatctaaaagatttgggtttttttgaatcagtgatttgtagggattagcaatgtaccttacatcttttgctgtgcccatttcttatctgcttaacttgtatgtgattgattcttcatttttcattggggtgtattgtgttttttagttatataagtataattaaaaacttagagcccttttatatgtattagtacatctaatgtatgctttaaaaggcaaaattttgtcagagaatctcttttcttaatgttataatgatgtaattgtttactctcattttaggcataagcttttaaaacgttgtgcagtcgggcccaatcgacctcccacagtatctcaaccagggttcagtgcaggaccatcatcatcttcatctttaccacctcctgcttcttctaagcacaaaacagcagaaagacaggaaaaaggagacaagctgcaaaagagacccttaataccatttcaccataggccctctgtggccgaagaattatgcatggagcaagatacaccaggacagaaactagggttggcagggatagactcctccttagaggtgtctagcagtaggaaatatgataagcaaatggccgtgccttccagaaatacaagcaagcaaatgaatctgaatcctatggattcacctcattcccctatatcccctctgccaccaacactcagccctcagccacgaggtcaggaaacagagagtttggacccaccatcggtccctgtgaatccagccctttatggaaatggactagaactccagcagttgtctactctggatgacagaactgtcctcgtaggccaaagactgcctctcatggcagaggtcagcgagacagccttatattgtgggattaggccctcgaacccggagtcatcagaaaagtggtggcatagttatcgtctcccacccagtgatgatgctgagttcaggcctccagagctccagggtgagagatgtgatgccaaaatggaggtaaactcagagagcactgcattgcaaaggtaagacagctctctgcaccacccacccgtccaccggaagggcatgggctccctccccatctctacctgctaaactttcagattcaaaattgaagtaggcttttctttgtccttcttgactccggatatggaaaatgtttaatggtcaaatgctttgtcctacttataggttagcacacatgtcatttgacacatgggcatataaagaactctttatgccatttaagtacactccaaatatattaatacatttttgccctactgtttgttaattaaagaatatagctttataagactttccatactgctgtcagtgccttctttgtatgttgacatttttgaggaaggctttgcctgcattcaggtgtatgtatcatgtatctagtataatatttatagctcttttgagccacccattctaaaactttacatagatgatctcatttaatcttcactgtaccatattattacgttaattttataactgagaaactagggccatgcagttagtaaatgacacagatggaatttgaaactaggcagtctgtcctgagaacctgtgctcttaagtggaattgatggacccagagacaaaaacatatattcttgacaaagtatgctaatttttatttaatcatgaatataaactgtaaaagcaaatcactatatcggtgaatttttagttgtttttacaaaaagtttaaactttgtaaatgctttaaggcataaatgctcttttttttttttttttttttgtcttttagactcttagcacaacctaacaaacggtttaaaatctggcaagacaaacagccccagttgcagccactccacttccttgacccattgcctctatcacaacaacctggagacagtttgggagaagtgaatgacccatatacctttgaagatggtgacataaaatacatctttacagccaacaagaaatgcaaacaagggacggagaaagattccctgaaaaagaataaggtaccatttaacagagagagagtccagcatggtgtgggtttctatctatgtcagtacaacatgtgtgggaagactttggaggcagaacgtttgagatagtcttgcctgattgctctgtccccatattcatgctcttggtactattgtattgaacagcgtattgttcctttttatgtcatggctcacctttgtttaaaagtcagccgaacataaatgaagcctcatattttccaggctatagcttgtacagtgcatgttttctctcatatgctaattcttgttggcctatgctccctatttcttttaaaatattattccgaactacccaaaatgtaaaggaaaaaatgtttgtaacagtaggtatacacaatttatcgagcgcttcttatccttactgtgctgagcgctgtacctatatattctctgggttaatatcaactctacccatagactatcagtattaattttactggtttcatcatcataaaaatgagtactggttgtgtctgctgtctttaatttcaaattttcagacattctaaaatatgggccattgaaataggtattcttgagaatcaaggaaataaaacaattataagaggccggtatagttaggggaatgctttttagattgttttatacagatctccctagacccagaaagccaaatctataatttagcatctaaaatgttgttaaaggcagcttttaacaccatggcaggtctgtaatcaaatgccaccagtactgcttaggcataaaacactgattcactcagaataccccataggattgaggggaaagtggggagctcatggttctgttgaaattccagagaaaggacctatcttttacttcctttggttgcatagaccatggtttatcatacttgtgctcataacaagttccattctaccctctaattctttgtgttctccctcatatttcacactttgggttggtgttcatgtgttttgtttggctgaatttattatacagtcagaggatggatttggtaccaaggatgtcactacaccaggtcattccacgccggtgcctgatgggaaaaatgccatgtctattttcagttctgctactaaaacaggtgtgtacaatgattatttgcctcacttggattgttgctaaaatgaaatgcaaaggagatgcttctcaatgtaaaattttattcttattgtaataagaatttcatctcatctttaatatatttttcatagtttgtttttcagttcctttcaaaactgataaacatatttggaaataattgtctctaaatttaactaaaaccatagggaaaaactcacaggcaggtcatgttcattgagatccgtgtcctctccctactcctttgcgcttggtggagttgtttattctgtgtcttttgcctcctttcctacagatgtccggcaggataatgctgctggcagagctggctccagtagccttacacaggtaacagatttggcaccttccctgcatgacttagacaacatctttgataattctgatgacgacgaacttggggtgagtttgccgtagctacataaacaaaaatttcgctacatgaaaggactttatatcagtgttgtagtatttctttatagtttggtgtcctgaatttgggggctcttatttcaggttctgaatgttctttataaatgtctgtatactggaatctagtcatgctgtataaaaaaagtttgtatacttggaaaagattgtaaaggttattagcgtagtgtatccacctcgagttttgttcattgaaggatctttttcattagtgtattccagttgtacatattaaaatctctcacatttattgtaataaattcttctaaatatcacaggactactagaaatgtattacattgtcccttaggtttgatttttaaagtaatgcccacataactttttattcatctaataagtcagaggttaggtatgcaaatatgatttatactttttaagatcatggcatcattgtaggggaatagaatttatatacatagaagttaaatactacaaggcagcatacaattaaaatgacagagaagaataattattataattctttggagatcagcagaactaagagtcaggaaatgtgtgtcctcatcctcctaaccaactctgtacctttgggcaaatacaagtgcctgttttttctgggagatctagagatgagtaagataggctctgttttcaaaaaggtcagcttattagtttacttttctttcattcattcacttatctacctccctattcatctgttttacatacatttgttaattgtttgaaggttaattcctttgtggtggtactaaggctagtcattgaggttagaaatatgattaaattaccacccttatacttgagacactcacagacataaggagaaatggcacataaagttataatgtacttattgctgtgagtacaataatagacctgaatctaaagttgctggacattcagatacgacgtgaccaagtgatggggagcagtgtttaagttaaggcttgaaagttaagtaggaaacatttctaaagcccaaactttaaaataaaatgtatctaacagatattatataccattactgttataagtacttagaagatgaggagatcataatggtctggaagaatggattgtacttgaaatatggaaagaaggggtcattgagaggaagggggagggacattagtttaagtgtggaatgagccttgattaaacaacaaaaacgaactagattagctttcagggataaggaacagaccattggtctgtttttttggatgattagagactgataggtctaggaaagttttggattttaaactgtactaatatgtgttcctctgagggctgctgagtatagaactgaactggcagaagggctatttttttttccagtctgatatgccgaaagcaggaatcctctaatctggtaacttttgttggattggaacactagaatctgaatttatacagtggccacatgaaggaaaaggacatgaaaatgtgaaaaactctggtagaagaaatgactcatttcttcattgctgatccaggcattgaatttgactatccactggaggccaagtgctgcctgggtttggttttaaagatacagagggttaggataggtgctttggcaatggtgatgggaatccaatatgaaaagaaaaggaggtacaagtcaaaggaggagaaagaaaggaacagagcaagcattttggagtggcctgcctgatctgttcatgaccaccatcctggtaattgtttctgctctgggccactgaacttattctttgtataaattatgaattactattaagcttaatgaagaaatgtttaactgttgggaatatacttttagtaatattaacatgaaaaggagaattggacattttcaatcaaattttcatttctctgagtgtttttgctttactctgatttttagtctggcatttaatcacatgagcggtttaccttagaatatattgctaattcatcttactactcgtaaatggagttgggaggctgttggctgagttgtcatctcatgtgtctttgaatttaattttaattttacatttcaatgttgtgacattgtataagtataaataaataaaaggccttctatttgtaaaaatcattttttgctttattttatattttattttaattcatcaccagttcatttaatgttaaagataatcttgcccagtaatgcacttggtttgtttttgaataacagatcagagaaaaaccttctgaatatttcaataattttacacaataaggttatttttggtgaagataaatagtaactataaaaataggtacagaagatacatagtttgttgtgataaatgcaaaaaaaaaaaaagaattggagggcttgagattatgccttttagctgcttgcttccaagtataagggaaaccagaccaattgtcagttactactggaggcaccaccctaatgtaacactgtgtccctgaaaattgacttgggagggaagaattgcttaaggtctgcaagctctcctttgatggcgcaatctgccctcacaagatccatgaaaaaaattcactgtttcttacacttgataagcttgtaaccatctcctttgtttcactatctgttggtatttctagaggttcacctggtaaacgcttctaccaagaggcatctaccaataggcatacattaggaaatatttgaatgctgccctacttatatacacgtcactctgttttaataacaccgtctgttcttaggctgtatcacctgctctgcgctcatcaaaaatgcctgcagttgggacagaagaccgacctcttgggaaggatggaagagctgctgttccttatccaccaagtaggtagagaaacttgactgagccattgtggctcactgcctgtaacttagatataatattctcatacttagtggtgctttatctttatctgaaatttcccttccttttgacagaattctaactgtgaattaaaacctatataaattggtgttctgagatggcaggcagctaatcatatacagaaaccatcttaatttgaattcctttcctttgttttccagttaagaattagctttttatagcttaaaatgtagaaaaacatgttttaggtttgtttttctaatagtcctttcctagtagaataaatgctgcacaagtgatttttcaaactgatactctattataagactgtgtaaaatgtttctgtttttataaatataattcactcaaggatattggatatttgatttcagtggtccttttcaagatgcatactaaagtttttgtgtttccttttgagatcaactagttttaccatatatgctgacaaagagatgaacctcttttttttgagtatattctttgccctaagaaaccaaattattctacaagaggaaaaaaaagggtagcttatgtggatactctgaagcagaaacataattccattgcaaatcattctttaacaccttctcattaacttcagctggtaatgagaacaaattgaggggaaaaaccaccatgtcatagggatgagtcaaaaagctttatgaacctataaatgtagtgctgatttactcaaatctagaagttgggaagtatacagagattggattttgacagctttagtggatccatagctttttaaaatatgcaaagctttctcaagcatgacatgggtgaaaatgaataatgatagccagcccgttgctgtagtttttttagttaaacatttttcttgttttattactctgcactgcagaatttcacaaacatggaacttcacagattaaaagaaacagtattaaaatagatatgtgcaggtcagatgagtgagtttttcctcttttttgaatccattgatcctttaccctttttgacatgacgtgatgcgtagtgatgtgaaatgttagaatgtctgataactcagccaaggcttttcactcgcagacatcctgctagttagcagcattgccaagtgaagtatattgtgtgctctatcctttctctcatttctatccaaaaaagaattatttcaaaaagaagctactcaaaattcaaaattttatgataaagtgcacgttataaaaacgaatcaatatgaaatgtagcacagaatattaacaccaggaaaacccagatatgcaagaatacagaggatcattttaatgtgtacaaagcatatatataaatatgtgttcgtgagagcatatgtatttgtgggatggggtgggggagtgaggggaacacacagtatttcctcccaagaaatgacaatgaaaatagcctggcaagatattttaatctcagcaatagatttttgggcattgcagtgggaagacaaatgtattataaaagttaatgtctagcctgtaatcccagcactttgggagcccaaggtgagcagattacttgaggtcaggagttggagaccaacctggccaacgtggtgaaaccccatctctacttaaaatacaaaacttggcaccacatggtggtgtgcacctctaatcccagctactcgggaggctgaggcaggagaatcacttgaacccaggaggcggaggttgcagtgagccgagatagcaccactgcactccagcctcggcgacagagcaagactccatctcaaaaaacagaaacaaaacaaaattaatgtctaaacaacactgtccagtagaaacacaagggaagccacaaatgagagccacatgtgcaatttcacattttctagtggctatttaaaaaaagaaattaattttaataatatacagtattttatttaagtatccaaaatattatttttacatgtaattagtataaaattattgcagtatttcactttttttataaaaatgtaatatataatggttgtacatattttacttttttttttggtatgaagttttgggaatacagtgtatgttttacatatgcaacccatctctatttggtcaagccccattttgggtgctcagtagccacgtgtggccagtggatattgtgttggaaagcataggttcctcattattcatttgtgaatgtaatgctgaagacagcaacaaacagtgacaaataggtttactttaatatcaagtttatgttaaggtagtattgtgttatagtaaaaacatgtttttattaggttttattattaaccactttcttacaaattttcgcatttgaaagcacatcagtttaaagtatgagtctttgaatagacaaaaggaaagagttggattttggggttggttcatttgtttattttccaagagtccttacggtttggaagggacttgggcatgtgctctggggtgaggagaacactaagaaatcaacaatgctgctttgttggaggtcttccatcctgtgcatgaatacataaagtgctgggcaggagcaggtgggtgtcttatgagttcccgctgaagtgcagagataggcaggatgggagtaagcagagcgctgtgggcagcacagctcacctccagtccgtcctggtggctgtttccacccttgctttagccgttttctgggaagaaaattgaagagacaaatcatgtttctattttggaggaccaaagtgtttcttggagtctgtgtgttctttctgctttacccactttgagtccgattccctttggtcatctcaaaatttctttagggtcatatattttcagaaagtcccaaaacttgacagtggttccatctttttccaatccaggtttgggagggagaattaatttgtactgagttcatcatttgctgaatgtttagatgtttgcagcaaagtgttcacttctgagcatacattatctcaatatgcacaaaaaatatgaagtagatatttttcccattttacggattaggaaattgaagtgagacagactgagtcttccttaagaatatctgatagtaacaatgataaagaccactttataaagtgactctcttggaggtagaatttcatccctgcttttttgtgtgttctctgtttacctttgctaaaattaacagggtggctgaggctttgaaaactgagatatatgcgtgcgttcaggaagatcaaagaagtcagctaacactaagtgggtggaaatgcctttattatgtttcttacaggaaatgtaaaaacaaatttaatagaactatttttttttttttgcaaaatcttgtgtcataggatacttataagaaaggctatgtttaagctcatccttttaacttaaagagaatttatacaatttctgtacttcacaaagagctacactggctattaagatttatggcaatgtgactttgaagattttatgaagcagaattatgttttaaaatataactcaaattatattacagttttgtagtagctgttcttcggcttgagaggaggaatagggactaaaggttaaaggtgatggatttatttcaagcgtagatgaactttttttttttttgagacagagtctttctctttcaccgaggctggattgcagtggcgagatctcggctcactgcaatctctgccacctcagttgaagagattcttgtgcctcagcctcctgccagcatgcctggctaatttttgtatttatttaatagagacaggatttcgccatattgcccagattggtctcgaactcctgacctcaaatgatctgcctgccttggcctcctaaagtactgggattataggtgtgagctatcccacccggcctccagtgtagactaactttatattaaagatcttggctttgttttaaagaaaacttactgatctggttcctgctacattttaagtcctgtttttccacctcagagtgtatcggttatgtagcctctcaaatagttttctgccagtttcttgtttggcttggctcatgtttctacttctataaatttttaaggtgccttgaagatcaacttgggatttttagttttttcttcttcttttttttagaagcagcaggtacttttttgtataatgaaatcagatacagattcctattatagaaaataagtagcagtggagcatcgctaatggaaatgaatgttggaattaacaaccctgctgattggcctctccctctccttattttacaaataactccacaggccaagagaggctaaatgatttaggattatacagttgtttcacttagaaacacggtaaagattatgtaattcagaagttctcaccttttcttctgcctccatatgctgaggtgtttgaaagctttcctctcccctcacaaacaaagcaaagcaagtaggcccattgagagtcatccatctagccctgccttccctgttagatgaaggaaccaaggccccaaggggggaagtgacctgaccacagcagatctaagtccccagcacctggactgggtagccgtgagcacagcacggtacagttgcccagtgttaatttctgattcggagctaggagtcagatcttagtgattcagtggttattattggtctgtttaaatcttgaagttgttggaaagagcaataggataggaaactgggacattaaatcactgatttaaaaacctgtggctccaaacttaaaaaatttgctgcataggccaccccctagtggccaaattttacaactacaacttttcaataggtctactttttaagaatcagtgccttaatgaactactgtagtgataattttttactacaggtgtattaaaggaaactttttttttaaagaaggagttcagaaccgctgttctaagtatttcttaaaagaaactttgaagtttcattttaatatctgtctggaaaaaatatggaactgtttccccaaaagagcagctgtgagtttccccaaaagagcagctgtaagtgtagtggatttgtcaaactagctgagtaatcagctccaaacaatttttattttttgtaatattttatacatacttgaaagcagggatagaactttagtagtggtaactatctaattgcttccactttctgtttaattcctctccttagacttttcagggaatcagttgttggaagaaacatacaagttatgtagactttgtttacttaattaatgtgaagccagaccataaagcatcaagaagttagtgataaagaccaagaaaagtccaggcacagtggctcacacctgccatcccagcgcttggggagtacgaggcaggcgggccacttgagcccaggagttcgagaccagcctgggcaacatggtgaaaccctgtttctaccaaaaatacaaaaattagctgggcatggtggcacgtgcctatagtcccagctacttgggaggctgaggcacaagaattgcttgaacgaggaaggcagaggttacagtgagtcaagatcaggccactgcactccagcctgggtgatacagtgatactttgtctcacgaaacaaaacaaaacaagacccagaaaaagataattctctgctgatggccttcttcttagtcacttccattattaatattcttttgtgaactgatgtgatcatttaattagcactatttttggtgccaaagagtgcgcctggctataagctaggactttttagaagcccttcctattaaacaaattttttttatttcttatttttagcagttgcagacttgcaaaggatgtttcccactccaccatctttggaacagcatcctgcattttctcctgtgatgaattataaagatgggatcagctcagagacagtgacagcattaggcatgatggagagccctatggtcagtatggtttcaacacaactcacagaattcaaaatggaagtggaagatggattaggaagtcccaagcccgaggaaattaaggtagttgtcaatatattaacatttccagggcagagcagtttccaagtggattcacatacatctgctttaaaatggtattgtctgtgtgccatatatacataagttcctaagaatccttttaattagaacatgaggcacaccagcaggcatattaaatagtgtcttttgattgatttaacatttctgcattagcattttctaatgatcataggagagaaatactgaaatacgatcattttggttgctgtttttatgatagcactatgccactgtggtgtgttctacagagtttaccaatattaacactgaccccactttgttgtcacaggacttttcatatgtgcacaaagttccatcctttcaaccttttgtgggatcctccatgtttgctccactgaagatgttgccgagccattgtttgctacctctgaagatacctgatgcctgtctgtttcggccttcatgggcaattcctcctaaaattgaacaactgcccatgccccctgcagccactttcattagagatggctacaagtatgtatagggattgtgtcatttacttgccatatttgatgcaatttttatcttaactaaatgtttgttaaaaatgatgacaaggtccgggcgcggtggctcatgcctgtaatcccagcactttgggaggtggaggcgggcagatcacttgaggtcaggagtttgagaccagcctggccaacatggtgaaaccccgtctctactaaaaatacaaaaaattagctgggcttggtggcaggagtctgtaatcctagctactcgggaggctgaggcaggagaatcgcttgaacccgggaggtggaggttgcagtgagccaagatcgcgccactgccctccagcctgggcgacagagtgagactctgtctcagaaagaaaaaaaagaaagaaaaaatgatgacaagtagcatatcatttgaaactttcctttattggtcgttcatgtttttgtgcaaattattttgtgctggaaaatgtgcattattttctaaatgaaattttgtatgcagacagtccctgacttacagtggatttactcaggagtttttgactttttgatgatgtaaaagtaatacacgttcaggacatgctgtactttgagaacccatacaaccgatctgttttttactttcagtacagtatttgataaattacacgagatagtcagcactttattgtaaaacaggctttgagttagatgatttccccaatggtaggccaatgtaagtgttctgaatatgttgaagataggctagggccgggtgcggtggctcaaaccgtaatcccaacacttttgggaggccgaggtggatggattgcttgagctcaggagtttgagaccagcctgggcaaatggcgaaaccctgtctctacaaaaaatacaaaaatttagttgggcatgatggtgtgtgtctgtgacccagctgcttgggaggctgaggcaggagaatcacttgaactcacgaggcggaggttgcagtgagccaagattgcactactgcactccagcctggtcgacagagcaagaccctgtcacaaaaacaaacagataggctaaacaatgatggaatcagttttccctgtgatgaataatttcttaataaataaagtgatttgattgatagaaaaggccacaaattcagatttctgctgtggtcaggtaagcaatatatagatgaaatggacagggtaaatgcaaaagagttggtactactgatgctcagcaccattgtgctgagcttaaggaaccaataaaacaaatttgtggtccagcctcagcctctgggctgcaagtttgtgaccttctgtaaaatcatcctgatgaagttaattttaatgtcgtaacaagacttcctgcttgtgtatataaagtcagtgtcagaaagaaaaacggtgacagaaaagtacagaggaatcctagacttaggaagctacacttgcagtattaataagactgaaattcctgccttgcaaaaattatatgcatgaccttaaatgaccattttacgtgggtcttccctttaaaatggagtaatcctgctctgcctcccgcacaggacttccacaatgcttcaacgactaatgactgtagaagtaccgtggaaataacaatgcaccagcagtataaagagtgtgctgaaaagcaccctgagcgcctggctggtgtgctgctgctgtgctccgattgtactctagcttactcagctagatcctggcacaacacacctagaacaccttggcgcataaggggttagcttagcacatacagttgccaataaatgacatagcagttttaagaacccattcagcagtttaatctctttcatacatacaggtttccccaaaaaggtcacatgcaagcttttgctgtgtaatcgtttaaatcatttaggtcattatttagatctattacatctttcatttgccatcccaaagattctttgtattcttaactggctctattatacaactttatgtgatgaaggttttgtttttgtttttgtttttgttttttgggggggttttttggagacagggtctcgctctgtcacctgggctggagtacagtggcacaatcacagctcactgcagccttgacctcctgggctcaagtgatcctcccacatcagcctcctgagtagctgggactacaggcacgtgccaccacacccagctaatttttatgaaattttgttgtagagtttgtgtctccctgtgttgccgacactggtcctgaactcctgggttcaagtgtttctcctgcctcggcctcctaaagtgttgggattataggcatgagctactgcacctggcatgtaggtgattcctgtctgcactgtccactatggcagtcatcagcttcctgctgcaggtgttgaccacttgaaatgtggctagtgagaccaagactgaattgttttatgttaattaatttaaatttaggacatggggactggtggctaccttattggacagtatgtttccagcatatgtgtaatcctgctgtggtctctgctcgccatcaccctggactcctcctttgtcacatgcaatacccctgcaatcatttgcttcatgtctgccatacttgcttatgagccaccttttgtttctctttttcacttttgactatccagcttctagcgtagggttgctactcagttcatttttattaaatgggaaaaatcagattacaagataaaccattcttactacccagggagcaatttaattctttaggttttcagttagtactcatagttccttttctgatctgaactgcgtaataattttagggttttgttgaacaggagaatttgaaaggagtccagttagagtaaagatcgttattacacacttaactattttggtctctaagagagcagtgattgccaatcaagttttctgggtcatttttttttttttatctgtactcaaagataccactgtgcctcagatttaatatttctttacagtgcctgatttggacttttaggctggtagtttaggcatagctaattaaaaatcacaaggaaattatttgaagagacatttctttatgacgtgcttctttcacattataagtaactgaatatgtagtttattggaggagcattagtttaagtacagtattaatatatataaaaggatattaaaaaattttaaaaatattcttttgataccttctaagtaggaagaatggactcatatgctaatatacatatacatctaagaaagtacagttgtcccttggtatccttgggggattgattccaggaccccctcggataccaaaatctgaagatgctcaagtaccctatataaaatggcagagtatttccttgtaatttacacaaatccctctgtataccttaagtcatctctggattacttgtaatgcctaatacaatgtaaatgctatataaatgttgtactttactgttttgatttgtgttttttaactgttgttttttttttaattgtatttttattttgattttccatctgtatatggctgaatccacagatgtggaacttgtggctatagagggccaactgtatatcaagaaaatgttttatgataatgaaacagcagaaccttgcagacagtgttttctgcctagctgttccaaaaagaagtcactgcttatgagaaagtagataacatagcccagtcagtcttgggcaactaaaataattacactatatgcaatgcataccatattgaaaagtgaaaaatgaagtgcttaccaccccacagaaagctgctggaagctggaaactctgatacagtatgtgtacttctgtgcaaccacctaattaatactgaggcctcttagccgcatatgtaatatttctatcagttgtagtatagtactggtaaatgggctacctaaaatataattccctcatggtcactcattactataaaaatgtaagcctagatagggctgcattttgaaaattagaaaaatgttaaattttcatgtgtatttgattataactactttgatatgatatatagattatagcctcagagaacaagtacactggcagactttgaatttcaaaaaaaaaatgacaaaaatgtaattgcaaattagatggaaatttcatcctatggtcctctagctaatttagtgtctgcacttatggttgaagttccatttagtagttaacttttcaaattacattgaccaaacccagtaccatgttttcttataaaaatagtaaaagttccttcaagaggttaggatgaggatgcttatatgtggaataagtagaaggaaagtgctgtgttgaattattcttcataccttactttcttcttctctacacactgcactgacctttgtatcttcttttttttttttaagagaaaattaaatataccagtgtatcccagtgatagcagaaacaaatgataagaaatacacagtacatggctggggtgatcatgtgtctagttcagcatctgtgacatgctgcccttcctcacttggtgccttctctttttgtagtaacgtgcctagtgttgggagcctagcagatccagactatctgaacacaccacagatgaacacacccgtgacgttgaacagcgctgccccagccagcaatagtggggcaggagtcctaccatctccagcaacccctcgcttctctgtccccacaccacgaacccccaggaccccaagaactcccagaggtgggggcactgccagtggtcaagggtctgttaagtatgatagcaccgatcaaggatcaccagcctccaccccctctactacacggcccctcaactctgtggagcccgccaccatgcagccaattcccgaagcccacagcctctatgttaccctgattctctccgattccgtgatgaatatctttaaagacagaaactttgacagctgttgcatctgtgcctgcaacatgaacatcaaaggggcggatgtcgggctttacatccccgattcttccaatgaggaccagtaccgctgtacctgtgggtttagtgcgattatgaaccgcaaacttggctacaattcaggactcttccttgaagatgagttggatatttttgggaagaattctgatattggtcaggctgcagagaggcgcttaatgatgtgtcagtccaccttccttcctcaggtggaaggaaccaaaaaaccccaggagccacccataagccttctcctcctcctccagaatcaacacacacaaccttttgcttcactgaatttcctggactacatttcctctaacaatcgccaaactcttccctgtgtaagctggagttatgaccgggtgcaagcagataataatgattactggacggaatgctttaatgcgttggagcaggggcggcagtatgtggataaccccactggtggaaaagtggacgaagctctggtgagaagtgccactgtgcactcttggcctcacagcaatggtaggtgtcccagaacacaaatttactttgaggagtatcttggtatgatcataacttaaaagctttctttactgtatttgacaaaaaattttaatttcatgtctttcgggggaaaaaaaagaacctaaagtgagagctgtattgattttatcctaaacttatggactgggagaatgttttatattgaaatgcctttggagaagagtaattgttttctgaaattttcctcttgtaactcataagtaagcagtctatgttgggaacctgtgaccgctgagtatcagagtcgtcaggagcttacagactgataatttgcacactcttgcatgcttaaatccaccattcttccagatcaagtttccaaggaacctcttccatgaagccttctagccatttccagagtctcttctcccttctctgttttccccctttgttgtatcacttataacaaaatcacattttactttgcattgtggttactggggcatataactggttgtattattaaaagctccagtgaagttgggctgtaagagtgccaagcaacttgctgtttccttttcttactcattcactgcctaaactgcaatgcatcatgggggataaaatggttactgaaagaaacaaggcacttaccctcatggactttctaatctattctggaagtggacatcaattaaataattacacaagcacgcatattattacaacccattttataagtgataaaagcatgggatagacggggcactctaggctgaaggtcagagaagacttcgttgtagaagtagtaacatttgctcagagatctcaatgatgagtacacattaactgaggaaggagaatggggagcgaggcatgtgtcccagacaggaggtgctgcaagtgggaaggcccttggttgtatggagcttggggcctttagaaactgacgcgaggttagaagcatgcaggggctagattacagtgactctttagaggcatgctaggggttgggtcttcctgcaaaaagcaatacaaagtcattgaaaggttttaagaagaagcactgatgtcagatttgtgtagttaaaaaggaaaaataacaatgtgcactggctataattctgggtatggattagaaagtggcaggaatggatttggggagacaaggaggttagtgaggaagacctagtaagaaacaatagcttgccttagtgtccttgtgaagaaggtggagaagaaatattattgcaggactcaatagtgagttgagttttggggataagggaaagagagatgttgaggagtcccagatttgttacttgtatacctggatagtcagtggtgttcaaagataagactatatctggagagaaagtttataaattgagttgtggaagtttggaagttttaaagatcccttttgatatatccaggtagaggtatcaagtagactcttgggccttttgctcaggggagagggagtggttggcatataggtgataacttcaattaagggggcacagatgagctcattgaggaggaggagaaaagtatagacgagaagaggacctggtagagcttagctacattctgacgggtataggtgaggcagagaagcgtgagcctatcaagcagagaaggaagaaccatagagggggcttttggaagccaggggtagccagtgtttcaagaaagaggaagtgattgacaggcattaaaatgcaagtgaagattttaagataaggattaaacatgtcttctgaccgtggtgagagctgtttctgtagagtggtgggagcagaggccagactggaagggttgtgtgaatgatgtgcgaacccggcttctgaacaactctcagtcttgcagggaagaaagttatataagcttcttaaatacagtttgaaatctgaagtaattaaaagtatgtccagaggtcagtagagtatggggagtgatgggtattttctgactaggccaatcaaggaagctttcatggaggtagagatgactaagaaagcattaaagggttatgctcatttgtataactgcttaggttcaagcacagtgccttatacttaagcagacccttaatcagtttctactgaatgaatttatgaagtgaagaaaatgcagcctttcccctaaagaaatgtggatgatcagcttgggtgagtccttttactagataggccttcggacagaaaagcagtctgtgtgcatgaatcagtggtgtcgtctttcaggatgaaaaataagacattttattgcaggggaggtctgggtttcaaattttaagatgcctaaaagtaccagataatgtaaatgaatgtgatgggagacatttgcaaaaggcagtgccttaagctgtcttttcaaaactcactttctattttgcaggcacaggaatagggttcataagaaacgtgcttgcttttagtttcctcaaatctgtggttctcttggtctgtgatttcctgcttttgatagagccattaatacaagaagtattcactgttgttgtttactatatgtaaaaagaagcactggctgaagataaaaggcaatgaaaactgcatcagactcaggacagacagcagggaaggggccatgaggtgcctgagagggacagctgctcctcagctccagcaagtggtggttatgcaggaatatgggtctcccagttcaagggaagctggcaatctagatttgtgtgtgaaatttcctggagtgatttgttccaaagtttaacaaaatattctgtggaccaccactttgcaacctgtgttttactgatttagggacacgtttgaaaatgtcttaagaatccttaatcatcctgtgtttcaaatttagttggcagataaatcttagatttctttccatgccccttccctcatcagctagaagggtaagagggaggcagagtcttcaggaatccagctgtgcagattcacaccacatcacctccagcgtcattagctctttctgcagacctttttaagaatctgatttgcatgatgaaccctccatcctgagaaaaaaatacgtatgtccaagcgtgcttgcacagttttgcatggagttcagacaactttcaaattttaggttagaaatccctccccagggcgactgctgggactaaagtcatctgcatttagaaggcagtgaatcccatccgtgcctgcagcggacttcggtccttgagggcttcagctgtgtttccctgtgcctctggctgcactgaagattggccttctcttcatgcattctgtattttgtgaaaatatttttacaattaggagcatttaaagagtttttaaaagcttttatttaagttccattttttcctacttatcatataaacaaaacattgatatttgcaaataaaagtaataattaagaaacttttgcagctgtcttatgaaaatccttggaaacagatttccatggttttaaaaagtcgcacctatccatttttccacttttaaacaattcttccattaaacttttttatatagagtaatccatttccccttttattattgttgatactaaattatcaattattttctctaatttagtagaagaatatctttcctcctgactcctaagtcaaatattttagaatctactacagctaataacgtcattgttctgaatataactgaggctcgaggtgatggtgaggaagaggagggtgctagcccccttatcttctctgtttcttctcacttctcttccagtgctggacatcagcatgctctcctcccaggatgtggttcgtatgctgttgtccctgcagccctttctccaagatgccatccaaaagaagcgcacgggcaggacctgggagaacatccagcatgtgcagggaccactcacttggcagcagttccataaaatggcaggacggggaacctacggtagggtctttgtcctgtttaaaattccttctgacttcagtgctgttcagtgaagagcagcgttagttactgtcaagtccttgcgtcactaacaaaataggggagtctttttctttgaccatttagttttataatctctttgttttcctaaagttacttttggagtcaagtttcctaccacccttggcataatccaggtcagtgaggaagctaatccctaaaaagtgcattttttagattctcctcattttcccaatcctcactgcattttcatctggatggacttctgggccagttctgtctacttcatcatagtcagaatcataatgcttatcttgaaggaaatgatgtagtgctgcttggaaagttaattttaacttgttctagtctgccctctgatcttactgaacctttataaacaaattctgacttacttaattaagagtcctcatcagtgaccatttaattagatgatttcaaaaatacttttaagaatgtcttgtgaacatggagtgacatttcagatgccagaattaagaccagtgcaccaggaatttcaaaattgtaaggttgtgggaaaaactctctagcacctttctacactacaatgtcattttaggttcggaagaatctcctgagccgttgcccatccccactctgctggtaggctatgacaaggatttcctcaccatctcgccattctccttgccgttttgggagaggctcttgttggacccatatgggggccaccgtgatgttgcctatattgtggtgtgtccagaaaatgaggccttgctcgaaggagccaaaactttcttcagggacttgagtgctgtatacgaggtgaggaagttactgtgaaaattgctttttatgacttggatcctctgattgtttatagtgatgactaaatttcaagacaaatgtcttgaaagtaaatctcagagaaaatttgcaaacaggtggatgaagaagagaattgaattggccaatttttctggaagcaaattgctttcccatctttgctttatatttgttagatttagaaaacgttcccctcccattcttaccacacgtcttaaaatcccatcagttctctcttctccatttatgtgctaaaagttgaagaatattgctcaccaggggaaagtgtggctatgtagaagatgagctttaccaaaagagcacatctactctttgtatttatttactggatggattgagggacagggtgagtaggtgagagttcctgacaacagtgtaaaaatgtgtcttttgcaaatttctgaattgaaacataagtttaatgaataatgtccctgttgtgttttaacatgacatcttaatactgaaactttgatactgattaaaaatataattcctataataatgtaaaaaccaggcagataattttacatctttagtatatgaattcctgttgctttaaaaaaaatagaatcatgtctgtctttgaagaataagtgccacatttcttatgccaaagtatatatgcactaagttctttgtatctgatacatctaatgtctttgtattcagcaaaatgaaattaatatctgtaaaatatttagtactatgataggcatgtaaacattatgaaagtggtttttaaataagattccaagctgaattgcaaaatattccaaaacaggacattcatgatctataaatgtatgagtaggcacggaatagtaaatttacgttgttgctacaaagaaatgaggagatgctaacatgatgtaatgacatcaattaagtcactgccttggatacattcatttctgaacagtgtctggtcagggcatatataatactattaaatcataattaacagaaaatttgtgtaagcagttttaaagcccagccatttccttgaatggaaccttcaacataagttacaaaatgtaaaaagcactgccagatctttttaagagggtacagacagacactcttttaaatttttcttaatgacttcactagggttgcttattcggcagtaattgatacctccttaggaagagtatacactagaggattttgtcggggcttagtaagccttcacttcatctactctagtaagggataataatacgggctctcctgctggtgaacaggtagtttactttttgcaggtttattatattccctgccataagcacccatttagcgtcatggagattaatagcagaatctccttgtcctatttactttaaaaaaaaaaaaggcgatcagcatactcactgcttcagtggcccctgctattggtgatctccaaatgtctgtaacagaacagatggcccataaaattttaatgttatcttatgggaaaatattatgagtagggattacttaggagattttagtgggcatatgtctcagttagcaacagtaggcaggaatctgctaattctttgtccgttagcaatcaggtagtgttcagcagcctcctcttgtacaggaggaattggcttgagtgaagaaacatttttttttttagagagcctagtccaagttttagagagacagatagcaatttaagggtacattacaattacctgaaaggaccaacttgtaatgttggtttgattgcatgtgataaccctaaaagaaaaaggaaaatgcttccatatgtatgttaaagaatctcccttgctaaccattggtactgaatgaaggaatggctcctgttataactaatgatcttgtctatgatatcagatgtgtaggcttgggcagcacaagcccatctgcaaagtgctacgtgacgggatcatgcgcgtgggaaaaactgtggcacagaagctgacagatgagcttgtgagtgagtggtttaaccagccttggagcggcgaggagaatgacaatcattccagactcaaactttatgcgcaagtttgccgccatcacctaggtaaatgggaatttatttggcaaagtagaattggagaagtaaaatagcaaatccgtcccatcccttcttttatagatgcaacattatatttcttttgtctcaagtaatgctgtatttgttaaggtccagtttggtgttctgggcagtttaatgctaatttctatatggacatatattttttaaaaactattcaaagttgcctaatcatgtctaattactgcacattttgaaaacttagcagcatgacttggtattagctgcttagttttaacccatattctgaagagaatcttagaagcttgtaaacctaggagcataatgtcccatgatgactgtggaatatatagcttctcattttttagggcaggcacatggaatcagtctgaaaggagactatcacaagtgattgattttctcttttcaaacaagcctctactgtagaatttataagttgctccatgtgcatctccatgtttgcagaatacataagcatgactgtggagatagtattttgggtattgtaatcagagtattgcagcctgaaagcataatgtttttacaagtgaccattctagattctggttcagtccgacactgcagaatatcactaaagtcacctctttgcatgtattctttcagcaccttatttagccactctgcagcttgatagcagcctattgataccacctaaataccagaccccaccagcagcagcacagggacaagctacgccagggaatgctgggcccttagctccaaatggatcagcagctcccccagctggcagtgcatttaatcccacctcgaatagtagttctacaaatcctgcagcaagtagttctgcatctggttcctctgtgccaccggtctcatcgtctgcctctgctcctggtattagccagataagcactacctcttcttcaggattcagtggtagtgttggagggcagaaccccagcactgggggcatttctgcggatagaacgcaagggaacataggctgtggtggagacactgaccctgggcagagctcttctcagccctcacaggatggacaagagaggtatgttattcactaattgagatgagtggcttcagctcagaccctttctctcttcttcttctgcaccttttctcccttgacctcatgattctgtgaatcctatgaagtgctctatttctcttctcaaaagaaaggggcaatggtcgatctaaagctgcagtgttaaaaatttgagacttcttataaattattatgaattataaactttattattaaacttacttactatcaacttaattagtaacaactttgtacaacataaccacagaaaagaaaggggagttgaaaaagatacctcccattttagaggagtacattgccattttccatctgccctcgatgctctctggcttggtttgcctgtattttggtaaggtgataaatgttactcttacctttaatctgtaaacattctttagggagcctgtgtgctctagaattgagcccttttgtttttcatgttcgtgtaatttatatttattttgtgcatctcacaagtgactctctctccagtgttacagaaagggagagaataggaattcccacggagcctgactctgcagacagccatgcccaccctccagctgttgtcatttacatggtggacccgttcacgtatgctgcagaggaggactccacttctgggaacttttggctgttgagcttgatgcgctgctacacagaaatgctggataatttacctgagcatatgagaaattctttcattctccaggttactgtttgcaagtttattatttacttttgatgttgttatttttgttgttatgaaaataaatacaggcctatgatttttcttaaaaaatggaagtacaggttaattatcccctaaccaaaatactaggaaccagagtgttttggatttccgattttggaatatttgcatatatataatgggagacctttgcagtgggcccaagtctaaacataaaatttatttatgtttcatatacaccttacacacataacctgaaggtaattttatacaatatttttggtcatgttgtgctttatacaaagttttgattaaattttgactgcaatacatcacatgaggtctgataacggaattttccacttgtggcgttttattggcattccaaaagttttgggttttggtgcattttggatttcagattttttgattagggatattcaacctgtacatgaaagtataaaagaaaaatagtcataattccgtcttttacattcaaccaccataaccattttggtgtatttctagcttgtttctctatttttgtttacacagttgagatcatacttttaatataacttattttctacctaatgttattcattaacacattttcatattatttaaattcttacaagcaacatttttaatgactgcatattttccatagtcattcctatatctccacttctttactgttataaataaagccataggacacgtttatgtataatcttatttttcacatttcaggtcatttttaacatggattcttagatgctgacaaatattgccaaattccattccaaaagaggttacacttatttcctttcatcagtgaatgagtatgcttattttcactgcacctttgacagctttatagtgtaatgattttttaaaaaattctatatagatgaaaaacaatgcttcggatgtttgggtttcgttttaatgtcactttaactgaagctatcttgtaaaattaaaagattgaaattaaagttatcagagtacattgctgatagttttccattgttttgaagtctgtatcctaaatgattaggtaataattccaaaaaatgccatacacactgtgtaattataaaaagaaatataataaaattttggggccatggtaatacctgtaataaattgagatcttacccctaaagtgggaacatggtagtttctaagtgacagtataacttgaccaacataatcgtacatcttttgaaattgctggtgatagagaattttatgtcagcggaaggaattaggatttaattatattatgtgtggcacagatatattttaaggctgaggttacctctccccattgtggtaaggaattcatgccgtttcctttttcagcttgcttgttagtgtgttagatctcagtttctaggtttttggtttttgttttttttttgtatttgtgtctttagattgtgccttgccagtacatgctgcagacaatgaaggatgagcaagttttctacattcaatacttgaagtccatggcattttcagtgtactgccagtgcaggcgaccactgcctacacagatccacattaaatccctcacgggatttgggcctgcagccagcattgagatgaccctcaagaaccctgaggtaggtattggcaggacagaaacttagaaaatttatactaaaatgcaagctagaagaggtattttatctaacccagagattggctggttgcttagttggtcttctacattgatataagagttgctaggctggatgtgttggctcacacctgtagtcttagcactttcggaggctgaggtggaaggattgcttaagcctaggagtttgagaccacactgggcaacatagcaagaccccatctctacaaattttcttttaaaaattatccaggtgtgatgtgtgccggtagtcctggctgtttgggaggctgaggtggaaggatcacttgagcccaggagtttgagatggcagtgagctgtgatcacataaccacttccgcctggagagcaagaccctgtctcaggggggaataaaaacgagttggcaggtttctttaactcttaggtttaaatagaggagatacttctctgaactttaaaacatttttgagaagagaggcaagcaaattcttactgttttttttatgtaggactttaggcaataataaatgtatcccttttagtttttaatgttttaatttcctaaatttattttctttatttttctaagctaatctgtgtcttagatcagaaatcctttgcgttttccagctctggtctgtatcctgggacaacagttgtagttgtgtttactctgcaggggtccctcgttttgtgatgcacatacttagaggaagttgatttctcctttccttgcctcagtgcttccgtatataaatgaatgcattttcactccatcttttaaaacctacttcctacagatatgtgtggatctcaaagggaattttacaacaccaaagctaaacatgttttaaacaaaagttttacacttcctttgtttttctaatcaccttatcttgaagataggtataaaaagcaatgttcagaattttcaaagccttcaaaaatcagttcccacaattttattgcatgaaaagtatcccattagtaaaagccagcatacacctctttaccataagagagctccttaaaacaccaattgctatttttagttggtaatgttgttctgaacaactctatgaaatgcttgcacttttataagtaaaatgcttgggagtgaaaaatgatgcaagtagttaacactgtgtttgttgtaacttggtgcaggtcagcttagtcccaagggagaaaagctgctcagccaatgacctacattcactccagtgttatataaaatttctattttaggcagttttagtttagtttattctttgagtttgaatttttcacttctatgagcaattcatctgttttctctgttaaatttttctagaatttcaaaaataaatgtctctacttgttttttattttgtttccagaaattatgaattattgcctttctaaaggttattatgctcaggcagaacaccatcaggagctcataagataaagtgaggtttagattaaaataaatggcaaaaagacttcgagtaatatcgtttttctccattttgcttggaacaggaagagagaagtaaatgattttactttattaaaaacaaaagaaccaaatgttataaatatttgctgaagtttatacattttaatctgcattaaggtaatggttagttggtcaatgctgcctctgcctcagtctgcagcgagaacattgtgttttcatttggtaaatacagttgagcatctacggtgtgccaggtgctgtattaggtgctaaggatgcaggggtgaacaaaacaggcccctgcctccatgcaattctcattctctgggtggcacagttttatgcaagttatcacatgtgaaagaatttatagtttttattatgcaagttttcaaataaatccaattgctgttatcttttgtttttcatggaatatctcgcatctcagaacacagtttgggaatcatattttatttagtgttttcagatgctatctattatatctaagatatttcacatttagccattcgttttataaaaaactccaggcaaactcagctggacttttcttgctttaataacagctttattgagatacaattcacatatcacgaaattctttttaaaaattttacagttcaggccgggcgcggtggctcatgcctataatcccaacactttgggaggctgaggctggcgggtcacctgaggtcaggagttcgagaccagcttggccagcatggcaaaatcccgtctccactaaaaataaaaaaattagccaggcgtggtggcggatgcctataatcccagctacttgggaagctgaggcgggagaattgcttgaatccatgaggtggaggttgcagtgagccaagatcacgccactgcactccagtctcggcgacagagtgagactctgtctccaaaaaaaaaaaaaaaaagaaaaaaaattgtacagttcagtggtttttagtatttccacacagttgtacagtcttcactactatctaattttagaacattttcatcaaccctcaaagaaacacaatattcattagcacacactactcattccccactccagtccttggcaaccactggtctacttgctgtctctatggagctgcctgttctggacatttcttatagatggaatcacacaatatatgatttttttttcttttttagacagggtctaattatattgctcacgctggtcttgaactcctggcctcaagcagtcttccccccaatttttttatttttatttttgaggcaaggtctcgctctgtcacccagggtggtgtgcagtggcaagatcacggttacttgcagcttcgacctccctgggcttaagtgatcctcctgcctgagccactggattagctgggactacaggcatgtgccaccgtgcctcgctaaatttttgtaattttttgataggggttttgctatgttgcccaggctggtcttgagctccttggctcaagcattctgcctgactcagcctcccaaagtgctgggattacaggcgtgaaccacctcgcctggccatatgcgatcttttatgtctggcttcttccagttagcataatgattttgaggttcatccatgtcataacatgtaccagtacttcatttcttttcctggctaaataatacttcatcgtatggctgtaccacattttgtctatccattcattagttgatggacatttaggttgtttccactttttggcacttgtgaataatgctgctatgaatatgtacaaggtttttgtgtggacataatatttctttctcttgataaatacctaagagtgcagtttctggtcatgtggagagtgaattgatgagtgttagattagctttgcaactttgagcaagtcattgaatatttctcagcctgagttttgaatccctatgatgaatgaatgagttgggttatattattttcaaagtctcttttagctttaaaattgtgtcattctgttactgccatgcctaatgctgtgtagttcaggggtcagcaactatggatttgggctgtatctggcctgcagcctgtacttgaatgaccagctaggtaagaatgattattacttttgtgtttttgagacagggtcttactctgtcgcccaggctgaagtgcagtggcatgaacctgggtcactgcagcctcgaccttccaggctcaggcagtcagcctcccaagtagctgggactacaggcatgcaccatcatgcctggctaattttattttattttttgtagagagggagtctcactgtgttggccaggctggtcttgaactcctgggctccagtgatcctcccacttcagcctcccaaagtgttgggattacaggcatgagccaacacacttagccagtgagtacatttttacaaaaaggagaatgtgtgacagccataaaaatctaaacttaattctctggttttcttttttgtagaagttagctgacccctgttgtagtttattaaatagtaagatgtgtattatgatggctgtaaaaaatatgacaattaaaacattttcacagttgatctaaaatatttatatttggtaacaactgttgatttgatttttaaaattatatacacagacacacatattaaactatatatgtactcaaaagtactcaatcataagtgtactgctgaatgaattttcagtaattaaaaaaatatcatttaacaagtgcaagaagcaaatacataactggtatccagagcccctcttgtggcctttccaatcccttaaagatagtcactattctgacttctgacagtgtagttttgcctgtctttgaccttgatataaattgaatcatctactttgtattctttcacattcggcttcttttattcattgttgagattcatctgttttgttgcttatagttttttcattctcattgctgtttaatattctgattctgttaactatatcacaatttattatctctttcactgttgatgagtatttagataactttctgtttggagctattgtgattaatactatcgtgaatattcttatacctgttttttggtaaacatatatgtgcattttgttggttcaaagggagtatatgtttgttcagcttaagcagcaatgtataaaaattcttgttgctccatattcttaccaatattttctctttttttattttcgacatactggtggttgtgtagcattatctcattgtagtttcaatttcccacttgcctaacaactaatgaagttgggccaatgcagtttctaaaatagtaatttcttttaataaggaaatactggcttgattgagtttcccagcttacatgatttaaacaatcattttgttatgtgtcctcagtactatttatgtgtctctagtactggagagagagagagagaaacgatttactaccattactccctgtgggtcccctcagtgtcgttctggattttgttgtaatcattaagttgtatggctttgtactgatattgattttggttttgatttcagcggcccagcccaatccagctttactcccctccctttatattggccccaatcaaagacaagcagacagagctgggagagacgtttggtgaggcgagccagaaatacaatgtgctcttcgtgggctattgtctgtctcacgaccagcgctggcttttggcttcctgcactgacctccatggggaattattagagacctgcgttgtaaatattgctttaccaaacaggtgagaagacttgatgtttatggtgcatgtaaattaatgctgtaccgttcctcaaatatgaatatttccagttttctatgtaaatgaagtgggtacagcatggataggttctttggaatttctagtgtttgtcttataagtgataaataactctgatttatctagggaccccttccccttccccatttctttatttgttaggtcacggaggagtaaagtatctgcacgtaaaattggactacagaagttatgggagtggtgcatagggattgtccaaatgacatctctaccctggagagttgtaatcgggcgacttgggcgtcttggccatggggagcttaaaggtgagaaatttttgaagaagtatttgcagaagacagaggaaaagggctcagctattgtcattaactgagctaagggagaaaatgtttaaatttgtaagaattaaacagattctattttatgattcttttatatgtacaggataaaccagttttaaactcttctttggcaacaaaataaatatccaaataaaatcttaaattttgagccccaatatataaaacaaaaagagggttttattaatataaaaatgatagtaaattcacatttcgaacatttatttatatattgaatcagggagaagaactagtcagttttaagacaaaaattttatatcagtgattataggtgacagttgaagtcatataaaaacagccttcaatttgtttggtggttgatgatgagttttgtgtttctttagtttttttggtggcacaacagcaaagaaatcctgtttcatgaggacaagtagttgccagtagaggcagtctttattcacattgccactgtctgatgttcttgagcctggaagcttacaagagcagatttttgaagttcagtccccaactaccactgcttatattctttgtcataaatttaacagtcaggaagcactttaactgtaacacaacacaactgaccaccagcagctgccttgcctggtgctgagcccagctcatttactatcccaatgtagctacttgtacagttttatgtgagtagtatgaattagcctagattatttttaaagccttattaagtaatgacagatttgtaagaagttcaatatatgcattcagatgggagaagttttttccctaagatctgcacaaaagaaagacttaatgtcacagattagcttggtggcttcctgggtgcaaatacattagagcagagtcagcaaagtttctttgtaaatggccagatagtaaatattttcagctttgcaggccagatggttgctgttgtgactattcagttctgccgttgtaacgtcaaagcggctctagacaagtgtggatggctgtgttttaataaaactttatttacaaaaacaaatgggaggcaggatttggcctgtggatcatagtttgctggtccctgcattagaccatgtactttttttttttataggaaattcacatcaggtatttgtagaatccctaaacaaaaatcactggtacagatataacttgcactgtaggaatgcctaagtgtacctcgcttcctacaatgcaggttaaatctggtatcaaattttcagggtttaacagcagtttatataaatattacatcatatgtattaagtaaatgttttctttggcatttacaaattttttaagtaataagttgtactgtagactaatagacccttttcattttttaaaggaatatcataatgaatcttgtatcaagagcctggaggtctaatacattaggggattcatcattttatttctgtcagaattttctatcttcctccccagtctgcttttttagtcaatcttatttcttaaaggctttgagctattcttaacccttggggaaagttagactataataggaaagaagagggaggataaaaatatagagtaatagtctagtcacttggtattttggaaaattattaaggccatctccttcctttgtatgatttttgtaagggcacattcttcttccttatctcttagtggagaggaatgtgtgactggaggagcccatcaaaagattgaaagaaaatgtatgttcaggaataaaaacacaggaagaacctagtgtacaggaaatctgtttactaatctacagctccttcctttgaggagccaagatctgtgccacattgcatctccatgggacagtgtatgacaggagccttaggtttcagagtcagctttgtgaatttctgtttcttatctccagagtctttatgatgaaatacacactgccttttctttcgtacttggtttgaaatatgaagctcacatctgtgatttcccatagttttaaaacaaacattcttcatgttcctggccacttttatttcagccacttcagtttggggttcattgggaatatggaaacagttttccattcacttgctctttaaggggagaaatggcagcttatttgggggaaaaaaagtgtggaggtagagcagcctgcactggtgtggcattttatgagcaagatgggatccgaaagcaggggtgatgcataggaatggcgcatacttcgtgtgtgtaagggaggtcagaagaggggaccaagtgctttccacttctcagagtaacataatcctccacagtgctccagttaggtataatgcttttgtttggaggcaataaacattagaaaggaaatttatgccaacatttcaatctccactattagtatggcatcatttggagcacttcactcacactcgttgtgagctcttttgggtgttctaagaactatttctcttcatttctgctgctgtttgactttcatggaaataactaacctacaacaataaacaaaactcaggtttacctccacctgccagtgctttcctccagagcagagtactgaaagaatcggaccttgagaaggaggagaaaggatagggcagctaacactgctgtcatcatggaaaagcactctaagtgcctaaatctggtctaggtagattagactggattagtgctggactctcaaaggtcatttcagacatgacttcagccacagaatagtaggcctttgttcctttgttaatgaagtgtaatagaagtcgagtaacattctctatagcaaggaggggaacatatgtaaagccataattccctttagggcccaaccttggaaattcaattaccgggcagaactgctaaaaagctcaaatctcccatcagtatgaatttctaaagactgtgtatgactgcgatatttgatttcagattggagtatcctccttggagaatgttcactacagacaatcagcaaaaagctcaaggatgtgtgccggatgtgtggaatctctgccgcagactctccttctatccttagtgcctgcctggttgccatggagccccaggggtcctttgtagtgatgccaggtaaatttcttcttgtcattgtcattaattacatatcacatcaattcagtccactcaaacttaagtccgcagacaagggtagaattgtcttcattatatttctataagggaagattgtatttggggcttaaagatggaaaacattcgataccttccatgcggagtggtttgtgattttatcatgtttgttgaccatagctcgggggagagactaagttctgaatatcattgagatctcatagagtcatggctaatgactgttacctgaccccagtttgttgttagtatatgaagatcaccctccaaagaactatgaaagtagacaccagaatgatgcatatttgaatatccttttgaagacatgcatttggcagaatctctcagcagcctcgaagggatatttctatagtctctctgatacggttgaagatgaatgggaaggcaaacaaggataaagcagttagcacagtacctggtacacagtaagctctcaatagatgtaggtgtcatttgtggatggccaaaacgtggccacagaatttcttaagaatctggctggtttttgaaaaccagtaactgagcgattttatatttttataacctatctttaccatccagatatttcttgaatcaaatgggggaccttccccacttattccttataaaagtcaacagtattgtggtgtgagaatggggttacttgtcatcaatccagtgagagacagatgtcctcattagactataggttacctctgttgccgctaccacttgggcagttacgtaacttctttgtgcttttgtcctcatctataaatggggatcatagttcctaccttcagatgctgtgatgatcaaatgcgatgacttgaatgaagagtttagcacaaatgctggcatgtagtaagcattcattaagtgttataacatgtattgattttatggtcctatctctataggattgttaaccgtttagaacagtactttataaattgtgaacaaccagaggaggaaagaaagtagggtgtttatttttagaaatacttcttacgtaagtaattaaaacatttagtggacttggtccaattttatcttaaccttttcagtatgaaatgaaacttgggttattatagacagctatgtgctctgagtcagtttctttgaagatatttaaacaattggactcaattttgaatgtgtatttatcatggcattttcatcagactcataccactccagatcaggccctctgaaaacctcatttctggggttgttcattgattgatataattctatttttttctttaaagatgctgtcacaatgggctctgtttttggccgaagtactgcactgaacatgcagtcatctcagctcaacacccctcaagatgcttcttgtacacacatcttggtgttcccaacatcatcaaccatccaggtggctccagccaactaccccaatgaagatgggtttagccccaacaatggtgagtagaagacctgtatggatagtgctcaccttcatgcagggcagagccggagtatggaatcactgggctgccgcatggcttttctgtgttgtaataaacaacccaggaactataaagaggggatagaaggtttgagaatctatttggtcttaaagctttgatttatctgcacaattaacaagaccaaataaatattttccttgtttgggcaattaactttcttccatttttcattaaaggcaaaaaataatacctgcgtggcactgttctgtacttaggtgccactctttcaataaatatttgctgatgtgatttgaaatgtgtgaagtactaagcaatatgaagagagcaccttcctttagctagtctatggcaatctaatttgctatagagaaacccttatttgattattcttaatggaaatttttgaatagctgttaaggtatttgtttaaaaaaatgattatttataaactataaaacactcaacacagcatccatttgcattgtttttgaagaaattataacacctaccagtgtttatttatggtaaatgggatgaggaaaaggataccaaattttatatctggtatgattacaatagaataacaaatatatgagaaaataaaagaatcatagaaaaaaatgatcatggtgattgggttctaggtgatggttttcactttttatacttttctttacaaattttctgctgtgagtgtaccttacttttataatgttggggaggatttcttaatgaaaatgctgggccaggcacggtggcttatgcctgtaatcctagcactttgggaggctgaggcaggcggatcccttgaggtcaggaatttgagactagcctggccaacgtggtgaaaccccatctctatgaaaaatacaaaaattagccagaaatcacttgaacccaggaggcagaggttgcagtgagccgagatcgtgccactgcactccagcctgggcaacagagggagactccatctcaaaaaaaaaaaaagagagaaaacattgtgctttgatttgcttttggaataggtctccattttcagggcaagttcacactcattaacatgcattcattcagcctctggtgttttagatgctaagtggatacatagatggagtctactgtgtttttgaatggtgtcaattttaatgattaaattgttgctttagctcttttaccatacttttatgtgtctttggaggctatgcagagtgtaggtttttatgttatattctttattgcattctgttaatactgtacataaggagatcattggagagagtacaaaatgaaagaataatttgtaatagcttgcactcagtaggtcctaactgaatctaagttattaacagtgtgtgtccataatagccatatgccaacaaaacatgacataggttaggttggattattatgatattgatatgtggactatctttttaatttttgtgctttttttccccccttccctctagatgatatgtttgttgaccttccattcccagatgatatggacaatgatattggcatattaatgactgggaacctccattcctctcccaactcttccccagtaccctccccaggctctccttctggaattggtgtgggctctcacttccagcatagtcgggtaaggatgatttggagtacgttgtttaagacaaccatagcctttaggaagataatccactggacatctgatcatcttgttcctacttgcacagttcttgatggtctgggtccttggtacaagagaaataagtgtgggaaactgactatggttccattttgaatagaaggcaggaatttgaaataaatatgttattatttctgatgaataagttttatcagaagaatagtcctattacagatgcaagggtttttaatgcattgttttcttagcaaaaattagttctagttgcttgctgcttcccagttttttaatggttttattttttgccaaaatagtggcttttaagagattagtacaacaaccgtacttactcaacatgcagagtaattgtgctgattgaagaacacgttggtgatggcttgttctgaaaggagcctgccgtgctctttgcgtgtcctggcttagtcattttgcagccttcttctttctagccgacctgcaggaatggcaagagccgccaggagattgattttacagatgtgtccaggttaacgccagagtattaaggaaaaaaccagagcttacaactggtttcatctttaaatatctcagggatattggaggtggatgaacaacagaagatttaagagttagagggttctgccacagcttgtggtaactttgcttcagttagatgattcctgctgcatcactgtattgtactgtttatttaaaatgttatgagactggggagttaagactttgaaaaatagctatgtctggtatcttagactgaacaagcataagcagcctgctcacactcatttatttagacacaaagatggacataaaggacttcagttttcatcggggggggggggggacttttattcccagcactgaatttattagacgctggagagaaaaaaggtttatagcttagattagtcacagagcaggtaagaccagaggagggcatctcagactgttcccatgttatacctgcccctattaccctcttctggaaggaaggggttttaagggtctttgtttcctttgcagtacttaccagttaatgataatttgttcatgggaaacggttgtgataggaacgaaaaacacaaatgttacattgtctatttttttaaagttgggtttaatttgaattctggaggcaagtagcatagcagctaagaatgcatgccccacagtctgttaaagacaactttgaattgcagctctgggcctacgggctttgtgaccttggacaagctaacttcacctctcttagcctgagttaccttatctgtgaaatggaataatagcaactacctcccagtacctgtttttgtaattcagtttatgcattaacaaagaattggttattgaagttgtaatgttagttgtgtaagaaacagaggtatgctgtatttctccctttttttggagccttaagcactaaagtctttaattcaatgccatgatttagacagtgctgttctgaagctagccaggtggcctttttcaatcctgagcacctgcagccaggtgacctccaagaggctttcagcatttcctttttctgaaccattaaacattctttgatatccagttaagacattacagcagggaagagaatgcgttcaaagtggcagtaaattttttatttttttaaccaactcagaattgatacagtttgatgtagtagctgcagattattttttccttccaaacagaaggttttttttttttttttttttttttttgagacagagtctcactctgttgctcaagctagagtgcagtggcatgatcttggctcactgcaacctttgcctcctgggttcaagggattctcctgcctcagcctcctgagtagctgggattacaggcgtgcactactgtgcctggctaatttttgtatttttagtagagtggggtttcaccatgttcgccaggcaggtctcgaaattctgacctcaagtgatctgtccgcctcagcctcacaaagtgctgggattacaggtgtgagccaccgcacccagcataaacagagacttttaaaaacaaatgcattacttattgcttgcatgaaaggtacattttcaattgatgaagctagctaaaagaattaaaagataagaaaagtgtcagttgcagcaaaacatagcctcttccaggagtctcttattaaggggaatgctgcaaatgaaaacatggcttctctgtgagcagatcttgcactactggcagctcaggaacttttgtgctgtgcacatactggtgtcacattgtcctggtcaggctggtgcgcttgtgtgtctttggctggttgctggtgaaagagcacctgcgtgtggtagagccttctgctgtcagagattgtaatctttccattttagtttgttacatcataatgccatgaaatagatcttacatcccttagaaaagaaacccaagcaaataaatctgtacttacttgactgaggctgtcagttttgctggtatcttctctatgtgtgcagcaaagacgatgctggccccgcttacctttctcagtcacctgttgttttctgtgagatgctgccacaaaggggatcactcactgcagtgtgcagagtgaactgatgaaagttcatttttcaagctttaagataaatgctgatcatgtttttgggatttttgtttttcagagccagggtgagcgtcttctttctagagaagcaccagaggagctaaagcagcagcccctggcccttgggtattttgtatcaactgccaaagctgagaatcttccccagtggttttggtcatcgtgtccccaggctcaaaaccagtgccctctcttcttaaaggttggtttggtgtcatattagaagtttgcaaggaatgagtgatttacgcttaaatttaattttggttagaaatttcagttttagtcaccataatcttattctgttccttttttctcttgtatctacttatactctgaggaaattttaattacagttgtaggtggagagtagaatttaggaggacccaaaaccatgtcacaaagaaatgaatcactgtagcccaaggaggaaacagtggggcccagagggtaaatctaggatggatgcatggggttcaatgtgatggtctttctccaagtctatattgcatcactatcagtaaagttaagcctgtgtcgaaggtataataaccagccatcctcttcttcccctgccagggactcttcacattcttcattagagaagagtaagagtcagctaaaaacatcgcacatttacacttgctccttcctttatatttcttggaaccttttaatcccaattttaagggttcaaaacaaaagatcccctacttgcagtttatgttaaaaacagcaatacctagaatgaaatccatctcttgcccacagattggcaaaaatacaaagatttggcagcatactgtgttggccagatgtggggagcaggccctggtgttggtgggattgctgaatgatatagccctacacacttccctttcagggcagcaatcccacctctaaggaatagcccaaaggttctttgccaaaacagaaaatgacatatgtccaagactagaaagaacctaagtgtcatcagtgagggactgattgaatcaactgtggtgcatccagacagtgaaatattaatcatctacaacaaaatggagaccatttctatgtaatcattctgtggagtagagattaccatggagtaatctataagatatgcatattcacacacatatacacgtacacacatagctgtgtatattttcagaaagaaacgatggaaattaaaccaaaaacttattagacagtgaagcaatgttcttttcctaatgactttaacatactattataaaatcaaagaaggtttataaaaatgcatgtgttctttattttgaattagaattatcaatatgagcatagatttatttttcctctctaaaaaagtatacacatttttttagctctgtctgctgaaaaagcttagcagcaataaacacctctgttgccacgaatgtggttcctgcacaccgttgtcatttaaaggaactgtggttctttgaagagatgactgattccagatatgcagcaggaaatattcacaatgaacctgaggcatcttgtcacacctaaaaggaagaaagttaccaaagattattatggtccagcagggcctcaggagccatcttagggggcagctctgttgtccagggataggatgggacagtgtgatcattaaaaaaaatgatgacagtgatagaatgaaacaaatccttggttcataattgtgttggaaaacaaacaaaaaatcagtcatcatttgttgctagagcatcaactcagtctgaaaaataaaaaaataaagagaaagaagcatttatatgttgcctctcctttacatgtaaagtaataccaaaaccattaggtgaaaagttgatgaggaactttatgatggatgtagtgtcctggtatcacctgaacccagtgatgaatcatgtgacttcaagtgggacagtagacatttcatgcctttaatcatttgtcatgtacagatcatgttggctcatgattttagtaaaccaattataaaaagacatttttgagataatggagcattatcttcctcattatcctacagatggggtgataatattaaggaatcattgttaatttttctgtgataattactgttatgtttaaaggtccttatgtgagacatctactgactttttacaagcaaaataatacaatatttgtttttttgtggggagggttttttgggggttggtttgtttgtttcttttttttggagacagagtcttgctctgttgcccaggctggagcacagtggtgcaatcacagctcactgcatcctcatcctcccaggctcaagcaatcttccagcttcagccttctgagtagctgggactacaggcacacaccaccatgcccagctatttttttttaatgttttatagagatggtaatatttgtgtttaattcagaaaaagaaaatgaaaacagaaaagtggtgaatattgataattgttgcatcttggcgatatcaattcatgggaccttattatatattatagtatttttgtgtgtgctagactatttccattgaagaaacaaaatgtagtagacaaaaaaagcccaaaaagtttgctttttttttgtttttttccaactctaggataagaagttatttgggattaccttgggggttactgagcaggttaaaatttgtagactcacagaaaccctgacttctacggacttttgggagcatctgcttctggcagacatggcctccctcacttctgcactgtgattgtctagaccagagaggtaactctctttgttttttcaccaggcttcgctgcatcaccacatttcagtagcacagacagacgaacttctgcctgccaggaattctcagcgggttccacaccctcttgactccaaaaccacgtcggatgttttaaggtagataccaacctaggcatcatagcagtgcaatttgaaacaatattcctttactgttgtctttccaaggtgttttaatctaagtgtggtattcatagaagctgccgtttgtgcagtgatacagtatctgatgagtcagtgagagctgcagtccctcatagctgcatgggacaggcggtgtaatacattggattcagttaggcagtgataggcatttatagttgcctttgcttcctgttcagagcaggcacttcatggtgatgaagagaggtcagatcttgggggtggatagttagaagacagtgtctggaactcttaaagcacctcacattgaaaacactttttatgcttcctgagatagattatgtatttttgtttgtttattcgagatggagtctcgctctgtcacccaggctggagtgcagaggcgtgatctcagctcactgcaaactccgcctcctgggttcatgccattctcctgcctcagcctcccaagtagctgggactacaggcacccgccagaatgcccggctaattttttgtatttttagtagagacgggatttcaccgtgttagccaggatgatctcgatctgacctcatgatctgcctgcctcagcctcccagagtgctgagattacaggcatgagccaccgattatgtgtttttttaaaaatggactagaacataaatgacatagttgagaagtgcattccagaagtgtgtattaatcaagccacaggcattcttcatctaccttgagaaaatatacaggccttttctaatgttttctaactcttaaatggttaggaaatgataggaaactatatattatagattaatgtataattatagttatggataaaaataaagaacctgatcaacataaatttggcttccaggccccctagagcaggggtccccaacccccgtccatgccttgttaggaaccaggccccacagcatgcggtaagtagcaagtgagcgagcattacagcctgtgctccgcctcctgtcaggcaatgacattagattctcataggggcacaaaccctattgtgaaccgcacatgcaagggatctaggttgtgtactctttatgagactcctaatgatttaaggtggaacagtttcatcctgaaaccatcccccaccacgtggaaaaattgtcttccacgaaactggtccctggtgccaaaaaaggttggagactgctgccctagaggaacactgtccaatagaaatacaatgtgaacctcaaatctaattaaaatttttctgttagccacattaaaatagtaaaaagaaactggttaattttagtaatatattttatttaactcaatatactcaaaatgttatttcaacatgtaacaatataaaaatattcatgaaatattttacatacttttctttttttcgttttctttttcttttttttttggagacggagtcctgctctgtcacccaggctggagtgcagtggcatgatctcactgcaacctccgcccacaggttcaagcaattctcctgcctcagcctcccaagtagctgggattacaggcatgcaccaccacgcctgactaatttttgtatttttaatagagatggggtttcaccatgttggccacctggtcttgaactcctgacctcaggtgatccacccccacctcggcctcccaaagttgctgggattccaggcgtgagccactgcacctggcccctaagtgtttgggctccagtgcctactttacctgcagtccacgcaagttcctactggcctcactggcggagctcaatggccatgtgtggctgctggctactgtactggatagtccatatctagaaggaaggaggaacatgagacaaaggatgagggaaagagcctggggcaagttaaggaatgcctttgagacctccttcctgctaagatctggaatgtattagaatctgagaaccagccttccctcttgaggctcacgcccctgctctgtgtgttctctttggcaggtttgttttggagcagtacaacgctctgtcctggctcacgtgcaatccggccacccaggaccgtacttcctgccttcccgtccactttgtggtgctcactcagttgtacaatgccatcatgaatatactttaattggaaaagcacttgttctctctggctcagttccttctccctgcaacctcagtccaaggaacctgctacactctgcaaataacccacatccttttcttcagaccactctccacagtcctgcactgtgattccttctcagcaggcacatgtcaattctgcagtgttcattaccagagtgactccttgacacttctctcatggacctggaaacttccataagtggtgactttcagccagtgcggtggtgtgtgtagccccaaccactggtccccaggaagtggtggtggttgatggcttttcagcgggaaacagaagagacagtgtccttttgcacaagagtctgtgttttcagcctctgtatacaattgagggcagtctagccctttggatgaaatcctcttagttactggtgtatggcctgtgggttacctgaactccataatctgggactttttaaaaataagaaccagctcaagtacatggtttcatactggggtttctgtctccctagtgttcccatccagattagcatgagtgctttggttgacttcaaacctgtgtgtcaatgcagaaggtctggagacagcttcattttgtttatttattttaatttgttttgtcatatggtttttgtgactttatttttttaattcacaaggaccaggtacagtagctgaaacccaattcagatccaccataggattctttgactacatacctctgtcctagaagccggaaaaggagtaaaaacacattggggagatcatgcctaaaagtaatatattcaaaaccacccagcagtaggttttgttaacaacaaactggattttaaaagttctgccatgttaagtggccagcatttcatgaaggataacatttttatacagaaggcagtcaagctcaactcagagccatggaggcaagtaccttaattagttttatatagtcacaacggaaatatattttctagtgaattcttattggaagccaggtctctcctctcattagatcaaaagggacttatgtacatacaacaattgaaagtgtttgctcatgaaatcagttataaatatggtgaattttttctggaccataggaatattatttcaaagaaatattacaacttaaccattaaattagtacttgaagttgagcctttgtggtgggactttttaaaaaaatgcctttttaaagcattaatggctaattgaagtattttatgactcctcattcctggcccagagggttgtctttgaaaccctgtttctaacccttgtgttgtgtgtttctgtctgaggacagtgggtgtgtactggcctcccgggagccactgtgaccaggcctttgagctcttgtcatctgtggagagaatcatgcaaattttaaaagttcttccaagagacttccatgtcctggttattaacaaaaaaggaaaaatgtaataattgatatgattttgtaaaagtatttttcttgaaataatctaaagtttaaaacattatattaaaaaaaaagttgtgtggtgggaatgtgaaagcagagaaataacttgtaaatggataattttgttctctgtaccaccagttgaagggggggttgactttcgcaatgtataggataaaaaatctgatatatcaaaccatttgtatctaatgtgtacagtgtaaaattgactttaaaaatattgcagtgctattttttcttaatcagaaaggaaaattctcaaggccttttgaagagcataagaagatgaagattgtaaacttgtataaaattatcttggtgagaagacaaattgtaaagtagatatttgtaatcttttaccactttggggttgcttttttcccggaattcatcagaactttgaattttttttttaaatgggctgtttttaatgcaggggcttttcttccctagaaacccaattctaagcagaaaaagaaaaaaaacacaaaaaataaaaaacccctacaaaaaaactttaaaaaaaatggcagcaaagggtagttttcatctggtgtcttttatttaagttttttaagttaagaaaagctggtgacatatttatacgtttttgtgcaaaaataaatgaatggcaatagattttaaaaaatcttattatgtacttctgtgtgaaaaagtctgtataatatttcccttaaatatgcattattttacttgtgagttttttactgaattaatctgaaatgtacaagccctggatttgctacagagtgagaagttattttatttttttttatttttaattttggaaattctgcagaaatcagaactcttaccatggtttgaacaaaaaaaggggaaatggggaggggaaaagggtgggattgtccagcatgcttgtatgtatatttcagaaccttttttaaatgtaaaagctgtacatttctgggaagttctgaatttcttttgtttccttttttccttcaagcattttgcagtgagcttcttttatatatagcaaacaatttgaaagaatacaaaaatatgtgaagttcatttaaaaaaataactacagtatagcgctggtacagtacactaaaagactttgataaaaagaaacaataataaaaggcctccattttaaatgtcattcatatataccttgtggatgagagctatatacttttacacacttttttagaggaataaattattgaattactgaagctttgagtggcttttttcccttcctctcctgcctttgtataaaattatctacacctgtttgagaggtgcatgtatatggattgaatagccctagattagtagccaggcctctaccttccagtcagtgcaatggatgtagaattttaccaccctgatcacccccctaacagctgttctgaaatggtattctcatgctccagggcacaagtacactcccccatcagtttttacatgctaacacacacaacaccgaatcaactgctgtgagtcgatgagctctaatggtgtctctcagctgtaagattgtggtcaattctagcacaaatgacaagtctgtatcttatattccaccgcctttctctacacagtctcagccagtttctttatgatgtctcttagaaatgacagatacatctctctctgctgttttcctgattcacaggctggtgacgggagtttggcatctgatacaccacacgcaagtccctgttggctgcacaccatctaccatgctgttcccttcttgggtccatcagctaggaaaagccacatgttctagcaggagttgcgagggtatatttcgtatactgcccttgcaaaatctctcattaaaaatggttaaaccccaggacttggcagagcttacaataaacatttgaataattggaaaggccttgcttttaatctgccttcatcattttagaaatatacgttgttctgaacctaacattatcagaatccagagataaagctattgagacaactcaaccttctgttacttcatctgcaaatgagggatgaggatgattgcatgagaaatgctttgcaaactaaaaggcttgtatccatgttacagctgcactgttgaagaaagactgagaaaagtgaggccaactttttggttaaaaaataatagtgatctcatccagttactgccttacatatataacttttatatagtcctgcagcagctaaataatcagaactaggaggtacttttacaagcattcagtagcttcaatgcttagctcatacgttgggtggtactatattcaacaattagtgttggctttatagtaggaatgtcattttcataagtgcccccacctgtaccaattcagcaaccgcagctaaatctctttgaggtaggataaatgaatgcatttaaatgtcttccaagttagatgtagataagccatcagccttcagcagtttgcatcacccagattctgctcttcacaccagttcattccctccaaccatgtgattatgtagtttttggttttactgttcaggaagtcatgagcaaaggtatttgttaccaactgggcatcaaagaaccactaaaaatctttataaaagtacagttcgtcaatgagtttttaaaagcaaacctcgtaagacatactgcagaagcataagccacatattgaaaacagtctttgccgcttgtcatttacagtcaagccagtataaaaaggaaatcgtgctttggaattcaccgcacgcccaaatcctatcaagatgcaattttcacttattaccgtgttattttggtgttaaacgattctcttgtttatattcccttgacaaaaaggtcactttagcagtaattatttcatgtcattaatacctaatgagacaccactagaaaattctgttgtgccaggtaattatagagggttgtaatgtttgccctgggcatcctgctctgcctggaaccagatttaccagtcttcctccactttgcttacaattccagggtcacgtttaaaaaagattttttgacacttaactgcttctagctagaacgctaaatcatgaagcagttaagaaatagaagttgatgagaaagtttaatctccaggaagaaggttggacataaccaaagtattgatttttctctgtaaaggctatttcctcaatgaattcaagttcccaggtgatgggaagacccgaagacagacattcctgttagtcccactttttctttgttttctttcaaacaagcagggaagtgaggaaagcacaggttcagttttaataatctgctaacatggcacttgtctgggctgttacccatatgggtcaaaccatgtctgtcctggagtgtgcttgaaattcacccagtgatcacagcatgcagacacgttgaaattggcagcatctctgagcatttctctggctcctgctgcctagtgtatacctcttttgccttgctgttgggtgaggcatgtttcaatctacttgttttataagactagacaatattcagtaaaatgggccaccccagagcttagaacagaagctctgggaaaaaaaatatctaatacgaggaagtattcgttgtgggggaatgtcaatttaaataatttaacatgtaaaatagtaattgtcttaatttaggctataacgtttttcagtaagcattttcacgttagcttctcataaatcttagtttgttcacttagaggtcttgatgttcttattaatttcgatacattatttacatatataatttcctgtctgcttcctttgaagtatgtgattttttttttaattgtagaggagacacagtttctgtaattatacatacaccagtgttttttgttgttgctatttcttgtattactgcaaagcttaggaggttttctctcttaggtctaggggtcaagatcacgtttgcttgataagatgaaccaatgaacttccctgtcattttccgtgagcccaaagagtttatctttcatgacaccaactttctattgggctgagactgaataaaggactgaagtaggcactcacgaaatgtttgtcaaatactgatactgttgaaagagtagaattagttgcacctcaaaaatctgaaataatttaccagtaaattcatcagatcctgatgccttttggggaagcggtttacaaaacaggaatttttttttttttcgtttttggttgatttggggtttccatttcttttgttgattttgttaatttagatttttacaggaaaaaaatgagtttttcaaatgtattacttaatgcaatggtgcagaatacccccttaattttgaaactttttggtgatgtatgctcttttccatttctagcaatattaatgcttttattccacctcgattgatttttctagcagtttgattttttttttttagtttttgtttgatttttccaaagaaacagctcatggacttaacaattctgctgtttgtaccttggctttgtcttcttattctttttcctagtttccttgagagttatgtttcattttgcttgaattttaattgcctgcttagttaatttattttcacttttgatgatataggcattatagcctgggggcttctggatgtgttggccctcctcaaattatatgcagaattcttcatgtgcatttttttttagggagacagtctttgtatcagattctcagagatgtcaaaccctaaaagggataaaattgcttttatcgtttgagatgtcaaacgctaaaagggatgaaatctggcactagatttaagttgattacatcctacaagtcttgatgcttaatgttttcatttttatttttatactcttggttctttatttcttttttgatccgtttttgttaaggaaaattctcttaaagtctctcacgctgtaatattctcctatgctacaacataatcttgcattctctgaaatcttcaaaacaaggtgtgtcctatttcatgggcagtgttgcctaatataaatagaatgtgaaccatacatgtaatttaatattttctagaagccacatttaaaaagtaaaaataaacaggtgaaattaattttaatatattttatttaaccaaatatatccaaattcttattccatgtcaacctaaaatcaatatgaaaattatcagtgaactatgtagcattcttatttttgcagtaagtctttgaaatctgtatgtagttaacatttacagcacgtctacatttggatgctaaattttcaatagttgaggaaaaatgtagttctatcaaaaaaaaagggatttagcagaaaaaatgcactgcttccgtttttaaattaaatttaaattaattagacttaataaaattaaaagattagtttctcagtcacactcaccgtatttcaaaatgatcaacagccacatggggtagtggtgatcctatgggccagtacagctggggtgtaagatttggtagcaactaattgtgtcttgagtatattgtttttgtttgttttctacaccccattcggacctcaacctctgtcccaggcaggcagtaggagttaaaatttcctgctggaagtttggtcttcctttgtacttccttactggtgcataaaggtttaatgatgtttatgtattatataatttatctctgtataatcaccctttgttctgcataatgctctttgctttaaattatccttttaataccgcccctctttcctttgattagaattccagtgttatatctttggcccaccacttattttcaacctttgtcattttgtgtcaggtgtacttcatacaaactcttgtattttatttcttaagagaacaatactatttttatttgaatagggtaatttttgcctttgcatttcctgtttcatgttatactttgacttgtcagccaatttttataaatacacatacagatttatttgcttcctttaactcttcagttttgccttttttgtgtatggactctgccatttgcctttttttttttaacgtgttttggaaagaaacctccattacctaattccatcagtgatgacctttacacagtccacagacatccaccatgctcctctcattccgtagattccattctaataaaaacagcaccttggatccacccgttccaaccccgttctcattctctcgggatttaatggatgtgaactcaaactgtgtggggttcatttcctaggccacagggtaacacctgctagtcagagccaaattatttcatccttttccttggacactgcccttcagttttaggcaactcccttagtcacaggcttcttccccaacaaatgtggaagtcaatgttactcagggactgtcttaccgttaggcactcccagctgctgttacacataaatgtaacatgtttgcagaaggaatttgatgattctgttaacaggatatgtgcccctaaggtgccaggccccaagctaggggataaagagatacatgaacccccgactgtagtcctatctttaaggtggaaatcagtctaggaggtcagcatctatgacacaagggactgtcctctaaagctatgcgagcaatgggcgatgtgtgagccctacgggtcctctgggatgtccccagcagcctgttgctatgacaggacacacgcacctcccatgtccagtctgtcagcataaccaagccatccatttcggctactgtcttgctgacacctttaattcctcacccattgcttattctgcatctgtcttggcaaagtctcaatccttgatctccgggagctggttagtgttcagattcccaggctaccccagatcctgatccagttggtggggggcagggcccacagatctgcatttaattccctccctccccaggcgacttggatccaggaactggtggcccacacttcgagaaacatctgtccaagtcagcttaacttctgctaggacagtgtggataggcaggcaggtggtaaagcagacaggacatccggctgccattattgtgttaaaattcagcatggcccttctatagtttccagagacaatcagcccttcccccatgactcccacgtctgtagctgtagattcagtatctccatcttcccacaagatgcctcgacctggaagctcagggtcactccagacatagccctgaacctcttccttcaaactcttcttctcctcctgctcatcaaccctgaagtctgtgtcatcttgaatatctctctctcttctcccctcatccccatgttttgtcattctcagattctccattctaaaagtcatcggatcttctctggaaccaggcatgggggaaccacaagaaataaggcaggcatcatccctggcctggggcagcgcatagtctagtgagagcaggtgcagcctagtgggggatctgggatagggtgaagacagagtgcttacactctgggaaaagctttctggaaaagtggtattttcagaagctccgcagagccaataggaggcagctgtcagaggtggggtgtgttccaggtggaggatacagcatatgcagaaacgtgaggccacaggagccccctgcaggtcagcccgacacgtctgagagaaatgaggactcacgaaggcattttaagcaagttaatgatcagattgacctttagaagaactatcatggctgggggaggtggttcacacctgtaatcccaggactttgggaggccaaggcaggtagatcacctgaggtcagaagttcaagaccagcctggccaacatggtgaaacctcgtgtctacccaaaaatacaaaaattagcagggcgtggtggcaggtgcctgtagtcccagcttcttggctgaggcacgagaatcacttgaacctgagaggtggaggttgcagtgagccaagattgtgccactgcactccagcctgggaaacagagtgagagcctgtctcaaaaaaagaaaaaagaaagaaagaaaaaaaaacaactattatggctatcggaagggggtaaaaatggaagctagaataatggtgggccacaccctggtatggatagtgaagagggagagagggctattgaaaaacaatcaacagaaagtggttattgaccaagtagggtgtgcggtttcagaagtgggttgtggacgcgggaggtttctggcctcagcagttagacagctgtcctcaaaatggctatgggaacaaggcagccactggtgaccttgctgagaatgatttcagcggggaggacggggcagaggccagactgcagtgcatgcaggaacaaagcagagagaaagcaggtagccagagtaggacatggaggtgtcaggggggctgattggtttgctttttaatttgctgaggcctggagcacacgtcagtgccagaacagggaaggacgtgagtgacagatgggtccaaggaggagggacccggaagcttgatggagagagagccttggttgatggctttgttcctttccttgtgaaggaggatgccaaggagtgttaaatggaagtggtgggtgggtctcaggatgtgcagtagccttggtgcagatcagggatgagaaccga

SEQ ID NO: 1712 - DNA, 530 bp, Homo sapiens
tgagcatttgtcctgtgctttcacattctttctgcatggagaaagtaatgtatgcacaagtgtggagattgcccagcaccagccaatttatttgatcaatgaggagcatatacacatggctcagtcttcacctgcaccatttcaagtactggtaagtccttatggcttaaatgggacgctaacaggccaagcatacaagatgtcagacccagccactcgtaagttgattgaggaatggcagtatttctacccgatggtgctaaaaaagaaagaagaatcgaaagaggaagacgagttgggatatgatgatgatttccctgtggcagttgaagtaattgttggtggtgttcggatggtttacccttcagcatttgttttgatctctcagaatgacatcccggttcctcagagtgttgccagtgctggaggccacattgcagttgggcagcaagggcttggtagtgtgaaggacccaagtaactgtgggatgcctctgacccctcccacctctccagaacaggctatcctag

SEQ ID NO: 1713 - protein, 137 aa, Homo sapiens
  VARIANT (1)...(137): Xaa = Any Amino Acid
MAQSSPAPFQVLVSPYQGTLTGQAYKMSDPATRKLIEEWQYFYPMVLKKKEESKEEDELGYDDDFPVAVEVIVGGVRMVYPSAFVLISQNDIPVPQSVASAGGHIAVGQQGLGSVKDPSNCGMPLTPPTSPEQAILX

SEQ ID NO: 1714 - DNA, 6167 bp, Homo sapiens
tgagcatttgtcctgtgctttcacattctttctgcatggagaaagtaatgtatgcacaagtgtggagattgcccagcaccagccaatttatttgatcaatgaggagcatatacacatggctcagtcttcacctgcaccatttcaagtactggtaagtccttatggcttaaatgggacgctaacaggccaagcatacaagatgtcagacccagccactcgtaagttgattgaggaatggcagtatttctacccgatggtgctaaaaaagaaagaagaatcgaaagaggaagacgagttgggatatgatgatgatttccctgtggcagttgaagtaattgttggtggtgttcggatggtttacccttcagcatttgttttgatctctcagaatgacatcccggttcctcagagtgttgccagtgctggaggccacattgcagttgggcagcaagggcttggtagtgtgaaggacccaagtaactgtgggatgcctctgacccctcccacctctccagaacaggctatcctaggtgagagtggaggtatgcagagtgctgccagtcacctggtttcccaagatggagggatgataacgatgcacagtccaaagagatcggggaagattcctccaaaactccacaatcatatggtccatcgagtctggaaggaatgcatcctcaacagaacccagtccaagaggagccaaatgtcaactccaactcttgaagaagagcctgctagcaatcctgctacttgggattttgtggatccaacccaaagagtcagctgttcttgttccaggcataagcttttaaaacgttgtgcagtcgggcccaatcgacctcccacagtatctcaaccagggttcagtgcaggaccatcatcatcttcatctttaccacctcctgcttcttctaagcacaaaacagcagaaagacaggaaaaaggagacaagctgcaaaagagacccttaataccatttcaccataggccctctgtggccgaagaattatgcatggagcaagatacaccaggacagaaactagggttggcagggatagactcctccttagaggtgtctagcagtaggaaatatgataagcaaatggccgtgccttccagaaatacaagcaagcaaatgaatctgaatcctatggattcacctcattcccctatatcccctctgccaccaacactcagccctcagccacgaggtcaggaaacagagagtttggacccaccatcggtccctgtgaatccagccctttatggaaatggactagaactccagcagttgtctactctggatgacagaactgtcctcgtaggccaaagactgcctctcatggcagaggtcagcgagacagccttatattgtgggattaggccctcgaacccggagtcatcagaaaagtggtggcatagttatcgtctcccacccagtgatgatgctgagttcaggcctccagagctccagggtgagagatgtgatgccaaaatggaggtaaactcagagagcactgcattgcaaagactcttagcacaacctaacaaacggtttaaaatctggcaagacaaacagccccagttgcagccactccacttccttgacccattgcctctatcacaacaacctggagacagtttgggagaagtgaatgacccatatacctttgaagatggtgacataaaatacatctttacagccaacaagaaatgcaaacaagggacggagaaagattccctgaaaaagaataagtcagaggatggatttggtaccaaggatgtcactacaccaggtcattccacgccggtgcctgatgggaaaaatgccatgtctattttcagttctgctactaaaacagatgtccggcaggataatgctgctggcagagctggctccagtagccttacacaggtaacagatttggcaccttccctgcatgacttagacaacatctttgataattctgatgacgacgaacttggggctgtatcacctgctctgcgctcatcaaaaatgcctgcagttgggacagaagaccgacctcttgggaaggatggaagagctgctgttccttatccaccaacagttgcagacttgcaaaggatgtttcccactccaccatctttggaacagcatcctgcattttctcctgtgatgaattataaagatgggatcagctcagagacagtgacagcattaggcatgatggagagccctatggtcagtatggtttcaacacaactcacagaattcaaaatggaagtggaagatggattaggaagtcccaagcccgaggaaattaaggacttttcatatgtgcacaaagttccatcctttcaaccttttgtgggatcctccatgtttgctccactgaagatgttgccgagccattgtttgctacctctgaagatacctgatgcctgtctgtttcggccttcatgggcaattcctcctaaaattgaacaactgcccatgccccctgcagccactttcattagagatggctacaataacgtgcctagtgttgggagcctagcagatccagactatctgaacacaccacagatgaacacacccgtgacgttgaacagcgctgccccagccagcaatagtggggcaggagtcctaccatctccagcaacccctcgcttctctgtccccacaccacgaacccccaggaccccaagaactcccagaggtgggggcactgccagtggtcaagggtctgttaagtatgatagcaccgatcaaggatcaccagcctccaccccctctactacacggcccctcaactctgtggagcccgccaccatgcagccaattcccgaagcccacagcctctatgttaccctgattctctccgattccgtgatgaatatctttaaagacagaaactttgacagctgttgcatctgtgcctgcaacatgaacatcaaaggggcggatgtcgggctttacatccccgattcttccaatgaggaccagtaccgctgtacctgtgggtttagtgcgattatgaaccgcaaacttggctacaattcaggactcttccttgaagatgagttggatatttttgggaagaattctgatattggtcaggctgcagagaggcgcttaatgatgtgtcagtccaccttccttcctcaggtggaaggaaccaaaaaaccccaggagccacccataagccttctcctcctcctccagaatcaacacacacaaccttttgcttcactgaatttcctggactacatttcctctaacaatcgccaaactcttccctgtgtaagctggagttatgaccgggtgcaagcagataataatgattactggacggaatgctttaatgcgttggagcaggggcggcagtatgtggataaccccactggtggaaaagtggacgaagctctggtgagaagtgccactgtgcactcttggcctcacagcaatgtgctggacatcagcatgctctcctcccaggatgtggttcgtatgctgttgtccctgcagccctttctccaagatgccatccaaaagaagcgcacgggcaggacctgggagaacatccagcatgtgcagggaccactcacttggcagcagttccataaaatggcaggacggggaacctacggttcggaagaatctcctgagccgttgcccatccccactctgctggtaggctatgacaaggatttcctcaccatctcgccattctccttgccgttttgggagaggctcttgttggacccatatgggggccaccgtgatgttgcctatattgtggtgtgtccagaaaatgaggccttgctcgaaggagccaaaactttcttcagggacttgagtgctgtatacgagatgtgtaggcttgggcagcacaagcccatctgcaaagtgctacgtgacgggatcatgcgcgtgggaaaaactgtggcacagaagctgacagatgagcttgtgagtgagtggtttaaccagccttggagcggcgaggagaatgacaatcattccagactcaaactttatgcgcaagtttgccgccatcacctagcaccttatttagccactctgcagcttgatagcagcctattgataccacctaaataccagaccccaccagcagcagcacagggacaagctacgccagggaatgctgggcccttagctccaaatggatcagcagctcccccagctggcagtgcatttaatcccacctcgaatagtagttctacaaatcctgcagcaagtagttctgcatctggttcctctgtgccaccggtctcatcgtctgcctctgctcctggtattagccagataagcactacctcttcttcaggattcagtggtagtgttggagggcagaaccccagcactgggggcatttctgcggatagaacgcaagggaacataggctgtggtggagacactgaccctgggcagagctcttctcagccctcacaggatggacaagagagtgttacagaaagggagagaataggaattcccacggagcctgactctgcagacagccatgcccaccctccagctgttgtcatttacatggtggacccgttcacgtatgctgcagaggaggactccacttctgggaacttttggctgttgagcttgatgcgctgctacacagaaatgctggataatttacctgagcatatgagaaattctttcattctccagattgtgccttgccagtacatgctgcagacaatgaaggatgagcaagttttctacattcaatacttgaagtccatggcattttcagtgtactgccagtgcaggcgaccactgcctacacagatccacattaaatccctcacgggatttgggcctgcagccagcattgagatgaccctcaagaaccctgagcggcccagcccaatccagctttactcccctccctttatattggccccaatcaaagacaagcagacagagctgggagagacgtttggtgaggcgagccagaaatacaatgtgctcttcgtgggctattgtctgtctcacgaccagcgctggcttttggcttcctgcactgacctccatggggaattattagagacctgcgttgtaaatattgctttaccaaacaggtcacggaggagtaaagtatctgcacgtaaaattggactacagaagttatgggagtggtgcatagggattgtccaaatgacatctctaccctggagagttgtaatcgggcgacttgggcgtcttggccatggggagcttaaagattggagtatcctccttggagaatgttcactacagacaatcagcaaaaagctcaaggatgtgtgccggatgtgtggaatctctgccgcagactctccttctatccttagtgcctgcctggttgccatggagccccaggggtcctttgtagtgatgccagatgctgtcacaatgggctctgtttttggccgaagtactgcactgaacatgcagtcatctcagctcaacacccctcaagatgcttcttgtacacacatcttggtgttcccaacatcatcaaccatccaggtggctccagccaactaccccaatgaagatgggtttagccccaacaatgatgatatgtttgttgaccttccattcccagatgatatggacaatgatattggcatattaatgactgggaacctccattcctctcccaactcttccccagtaccctccccaggctctccttctggaattggtgtgggctctcacttccagcatagtcggagccagggtgagcgtcttctttctagagaagcaccagaggagctaaagcagcagcccctggcccttgggtattttgtatcaactgccaaagctgagaatcttccccagtggttttggtcatcgtgtccccaggctcaaaaccagtgccctctcttcttaaaggcttcgctgcatcaccacatttcagtagcacagacagacgaacttctgcctgccaggaattctcagcgggttccacaccctcttgactccaaaaccacgtcggatgttttaaggtttgttttggagcagtacaacgctctgtcctggctcacgtgcaatccggccacccaggaccgtacttcctgccttcccgtccactttgtggtgctcactcagttgtacaatgccatcatgaatatactttaattggaaaagcact

SEQ ID NO: 1715 - protein, 1998 aa, Homo sapiens
MAQSSPAPFQVLVSPYQGTLTGQAYKMSDPATRKLIEEWQYFYPMVLKKKEESKEEDELGYDDDFPVAVEVIVGGVRMVYPSAFVLISQNDIPVPQSVASAGGHIAVGQQGLGSVKDPSNCGMPLTPPTSPEQAILGESGGMQSAASHLVSQDGGMITMHSPKRSGKIPPKLHNHMVHRVWKECILNRTQSKRSQMSTPTLEEEPNPATWDFVDPTQRVSCSCSRHKLLKRCAVGPNRPPTVSQPGFSAGPSSSSSLPPPASSKHKTAERQEKGDKLQKRPLIPFHHRPSVAEELCMEQDTPGQKLGLAGIDSSLEVSSSRKYDKQMAVPSRNTSKQMNLNPMDSPHSPISPLPPTLSPQPRGQETESLDPPSVPVNPALYGNGLELQQLSTLDDRTVLVGQRLPLMAEVSETALYCGIRPSNPESSEKWWHSYRLPPSDDAEFRPPELQGERCDAKMEVNSESTALQRLLAQPNKRFKIWQDKQPQLQPLHFLDPLPLSQQPGDSLGEVNDPYTFEDGDIKYIFTANKKCKQGTEKDSLKKNKSEDGFGTKDVTTPGHSTPVPDGKNAMSIFSSATKTDVRQDNAAGRAGSSSLTQVTDLAPSLHDLDNIFDNSDDDELGAVSPALRSSKMPAVGTEDRPLGKDGRAAVPYPPTVADLQRMFPTPPSLEQHPAFSPVMNYKDGISSETVTALGMMESPMVSMVSTQLTEFKMEVEDGLGSPKPEEIKDFSYVHKVPSFQPFVGSSMFAPLKMLPSHCLLPLKIPDACLFRPSWAIPPKIEQLPMPPAATFIRDGYNNVPSVGSLADPDYLNTPQMNTPVTLNSAAPNSGAGVLPSPATPRFSVPTPRTPRTPRTPRGGGTASGQGSVKYDSTDQGSPASTPSTWLNSVEPATMQPIPEAHSLYVTLILSDSVMNIFKDRNFDSCCICACNMNIKGADVGIPDSSNEDQYRCTCGFSAIMNRKLGYNSGLFLEDELDIFGKNSDIGQAAERRLMMCQSTFLPQVEGTKKPQEPPISLLLLLQNQHTQPFASLNFLDYISSNNRQTLPCVSWSYDRVQADNNDYWTECFNALEQGRQYVDNPTGGKVDEALVRSATVHSWPHSNVLDISMLSSQDVVRMLLSLQPFLQDAIQKKRTGRTWENIQHVQGPLTWQQFHKMAGRGTYGSEESPEPLPIPTLLVGYDKDFLTISPFSLPFWERLLLDPYGGHRDVAYIVVCPENEALLEGAKTFFRDLSAVYEMCRLGQHKPICKVLRDGIMRVGKTVAQKLTDELVSEWFNQPWSGEENDNHSRLKLYAQVCRHHLAPYLATLQLDSSLLIPPKYQTPPAAAQGQATPGNAGPLAPNGSAAPPAGSAFNPTSNSSSTNPAASSSASGSSVPPVSSSASAPGISQISTTSSSGFSGSVGGQNPSTGGISADRTQGNIGCGGDTDPGQSSSQPSQDGQESVTERERIGIPTEPDSADSHAHPPAVVIYMVDPFTYAAEEDSTSGNFWLLSLMRCYTEMLDNLPEHMRNSFILQIVPCQYMLQTMKDEQVFYIQYLKSMAFSVYCQCRRPLPTQIHIKSLTGFGPAASIEMTLKNPERPSPIQKPPFILAPIKDKQTELGETFGEASQKYNVLFVGYCLSHDQRWLLASCTDLHGELLETCVVNIALPNRSRRSKVSARKIGLQKLWEWCIGIVQMTSLPWRVVIGRLGRLGHGELKDWSILLGECSLQTISKKLKDVCRMCGISAADSPSILSACLVAMEPQGSFVVMPDAVTMGSVFGRSTALNMQSSQLNTPQDASCTHILVFPTSSTIQVAPANYPNEDGFSPNNDDMFVDLPFPDDMDNDIGILMTGNLHSSPNSSPVPSPGSPSGIGVGSHFQHSRSQGERLLSREAPEELKQQPLALGYFVSTAKAENLPQWFWSSCPQAQNQCPLFLKASLHHHVAQTDELLPARNSQRVPHPLDSKTTSDVLRFVLEQYNALSWLTCNPATQDRTSCLPVHFVVLTQLYNAIMNIL

SEQ ID NO: 1716 - DNA, 102580 bp, Mus musculus
  misc_feature (1)...(102580): n = A, C, G or T/U
agggatgggggccggctgttagcaaaggagactgagtcccagtagccggtgctacaggaagcttctggcgccgaacccacatcatagtgagtgagactctgcgctacatccctgacagatactactggctgggcaaactcagatacgcccacacctctgtgctcccatatgtcctccataattacagacatatccctcagttcttgtgaggttgggaagagctggtttctacagcgcaacatagttttgttgttcctgctgttggcactgtgaggactggtgtgaatttattcttttgaactctcaggggtacacaggtgtgtatgatgagtcctgttttacaaaggaggcatgaggatttcagagagggtaactgacttacccacagtcacacagcaggaagtatcagacatggaatctagtccccagtccaagtctctctgctcttctccgggtgagcattgggtatggggaaggtgaaatgaaattgttgtaaaagagatgttcattggaaatttaaatgacagctgtgctatagaaattatttaatctcaatcaggggctcctaccccgcctttgatcactcggttcctggatgaaagacacacaacttattattattaataattattaattattattattattataagacttaatcagcactagagctgggcaggtatctatcctctatgtctacatccctgacaatcatgccacagtataacttgccatgctccatctggactgcttttaactccaattggccagtcctcatggccatgatttcaagattttatatatatacacatatatacatatacacatacatacatatatatataaacatatatataaatttttaaaaggtttatttatttatgtagctgtcttcaggagagggcatcagataccattccannnnnnnnnnnnnnnnnnnnnnnnnnnnnnnnnnnnnnnnnnnnnnnnnnnnnnnnnnnnnnnnnnnnnnnnnnnnnnnnnnnnnnnnnnnnnnnnnnnnnnnnnnnnnnnnnnnnnnnnnnnnnnnnnnnnnnnnnnnnnnnnnnnnnnnnnnnnnnnnnnnnnnnnnnnnnnnnnnnnnnnnnnnnnnnnnnnnnnnnnnnnnnnnnnnnnnnnnnnnnnnnnnnnnnnnnnnnnnnnnnnnnnnnnnnnnnnnnnnnnnnnnnnnnnnnnnnnnnnnnnnnnnnnnnnnnnnnnnnnnnnnnnnnnnnnnnnnnnnnnnnnnnnnnnnnnnnnnnnnnnnnnnnnnnnnnnnnnnnnnnnnnnnnnnnnnnnnnnnnnnnnnnnnnnnnnnnncctccttcctcctcctcgttctcctcttcctcctcttctccttctgccttttcttcctcctcctccttctcttcctcttcttcttcctccctccctcccccccctgttttcctcagactccaagcccagaaacccaggccccacctatctcaattctgcccagctataggctgcagcatctttacacaccaataattggggggggggtggcaaggacacatagtgtctcttgggtctatgtgcagagtctctcctccttggggacaaccagattttgggggccagtagttagcattataaaacatagcaaaagaccaaacctcaacatatctgtatcctatgtaggggaggtgggacccacacagagaagggaggctgtgtagaccatagagtaatagttatgcaaacagaagggcctgagtttagtcctcgtttagtcctggaacccatggggaaagctgaatgagaccctaatctcagcactgggggttggagacagaaggattcctggaactgtctgttgagccagccttgctgaatgggtggccctgggttcagtgagggatgttccctgtcccaaaataaagcagagagcgacatttggagaaacaccgccattgacggctgacttgtacacgtgtgtgtacttgtgcatgctctctctctccttctctctctctctctctctctctctctctctctctctctcacacacacacacacacacacacacacatatgctaaataactatttaaaataacattaaccatcacacagggtctcaccagcactaccagggttcttggtggtcccatgcattgggacaaaaagcatcagcagcaacaacaacaaaccacataggaaacacagagttcgtttgaaattcccttctgtcttctagagcagtggttctcaaccttcctaatgctgcaacccattaattcagtgcctcttgttgtgttgacctccagccataaaattattttcattgctacttcataactgcaattttgctactgttatgaattgcagtgtaaatatctgtgttttccagcctcgagtgacccccatgaaagggtcgttgcaccccaaagagttgagaccacaggttgagaaccattgttctagacccttctagaatatctccttgctgcttgcctttccttggttgggaagcccaccccctcagggctggttctggtgctcagggtcctgaatccatcccagaaccacagtggctggagctgcagggaccaccctgagttgttgatgtttttaattcctgagatgtcagcgaagccaacctgggggtcctaggtgcccccaagtttcaaatgctagaaggagagggaaaggggggccaagaggtagggagcaaggcaggagggcaagaagggcgcaataaagttaaggtgagcaagcttattaatgcacaggaacagaaggccatgaacggagtggttttctggacatgtggtaaccatatttcgcagcccagcttggggacacgggattcataaagagcattccgttttcttttaatgcctttaaaacacctttctgagttgcagccgtctctgggggaggctatatttagttgtgtgttttaataacagcagttcatgaaaaataataaaaatcaaagtctatgaatctgggacccagagaagctgcctgtacctgccctttgcttagaggctaagagtcaccccagagtcaccccaagaaggcttaagctggccaattctgagagggtcttgggtgtggtcccgttcctcatttccatttattaaggacatcttagtacatcaaatgcagagtcaacaaaaggccctgagtatccccccaaaattgtaataggtatgttttaaattaaaaaaaaaattctcatgtaataactgcattttcttaatccggcacatgtgtgagagtgtgtgcgtgcatggcatgcctatggagttcagaggatgatcgtcatgtgtgtcatcttccacctagtgtgagatgaggtccctttgttctccgttgcttcattcccagtaactctctcttgtccgtctccctagggttattggcacataccactgtgcctagttatagatggagtcaggggatttgaactcaggtcttcgagtttctgcagcaagcccctctgccccctaagccctatagttgcatctatttccatagcatggcattttaatagatgtgtgtagaagcaacaccttctggtggtctagtggttaagattcaacgctatcaagacgtgtgtgaaacatgttctaatcccagctgggtagattcacatgtccaggcctgctgcttccggctacttttgaacaaaactgagcactcttctcagagactgagtcgctccccaaaccggaaagattcactctctgctctttaaggaaaagctgatcaatccgtatatcaatctgttttcttgttccgtgactaaagacctggtggaggcgacctcagatgggcaggcaggaaggggtgtgtttgacgcttggtctgtgggtgcagttcatcatggtggggaagccatggtggcaggagcgcaagactgctggtctcatcacaccgacagccaggaagccgagagagagatagatgcagagacccagcccctggaatgattcttaccacattcatggtgggccttccaacctcaatcaaatctttttgacagttaactcataggtgtgccccatgtgtgtgcggcaggtgattccaaatccatccaacctgacaattccttgccttttgtcccttcccgtgccttggtgacagcctccatagtcatgacggtgactttcattgtgtgaatatcagtatagatatacccacatgtggttaacactgtcattagttaagaatagccagtaactttgaaaaaaccaaatgatgaccatcccatctgggaattcatcccatattcagttaccaaactcagacactttagtggatactaagaagtgcatgctgaaaggagcctgatatggctgtctcctgagagccatatctgtctcctgccagaaccttacaaacacaggggtggatgctcacagccaaccattggactgaacatggggtccacaatagaggagttagagaaaggaccaaaggagatgaaggggattgcaaccccacaagaagaacaacaatatcaaccaaccagtcccccaggagctcccagggacttggccatcaacagaggagtacacatggctccagctgcatatgtagcagaggatggccttgccaggcatcagtcagaggagaggtccttggtcctatgaaggctcaatagatgccccagtgtaggggaactgagggcagggaggtgggagtgggtgggtgggtggaggaacaccctcatagaagtagggagagggagaatgggataggggggcttggagggggggcaaccaggaaaggggctaacatttgaaatgtaaataaagaaaatatccaataaaaaaacccaaaatgacaactcactactcaatataaaagatgtcttcttggggctcagtggttaagagcgcctgctgttcttgcaggggaccaagtttaggttcccagtacccatgtctggtgacttacacctgtcagtcactccaggacacccaatgtcctcttctgctctctggggacatggcactcccatgcttgtgcacagacacacaaataataaatataaatatttatttaaaagatattctctacctgggcaccactttttctctccctttcccagaagcagcaattgctgtcacctccccatgggccagggacatcatcttggctaaagtaattgtgtcattgagatttttattgtttgtttgttttgagacagtttctttgtgtagcccctggctttnnnnnnnnnnnnnnnnnnnnnnnnnnnnnnnnnnnnnnnnnnnnnnnnnnnnnnnnnnnnnnnnnnnnnnnnnnnnnnnnnnnnnnnnnnnnnnnnnnnnnnnnnnnnnnnnnnnnnnnnnnnnnnnnnnnnnnnnnnnnnnnnnnnnnnnnnnnnnnnnnnnnnnnnnnnnnnnnnnnnnnnnnnnnnnnnnnnnnnnnnnnnnnnnnnnnnnnnnnnnnnnnnnnnnnnnnnnnnnnnnnnnnnnnnnnnnnnnnnnnnnnnnnnnnnnnnnnnnnnnnnnnnnnnnnnagtgaattctaagacagccaaggttatgtatagaggccctgtctcagaaacaacagaaaattaaaaaggttgcaacacacttagaaattgaagttgtactaacattgagtgccacagcagggaaccttatttggagatagggtctcagatgtgatggagttaaaatgaaatcatccgttccctcggagaaagggcgaggtgggtcttgctgtgtgcagaaggaaagtgtggagaagggattacagatgctaggttgagcagcatcccatgaggaggaggggagaacgaggaggcagtaggtgttggagtttctattgctgcacaaatcactatgaccaagaagcaagctggggaggaaccggtttattcagcttacacttccacattgctattcatcaccaaaggaagtcaggacatgagctcacacagggcaggaacttggaggctggagctgatgcagagcaggtcatggagggatgctgcttactggcttgctcccctggcttactcagcctgttttcttatagaacccaggacggccacacacacaatccctcccccccatcactaattgagaaaatgccttacagctggagctcatggaagcatttcctcaatggaggctcctttctctgtgatacctccagcctgtgtcgagttgacacacaaagccagccattagagtgtttgagtgcagggctgccagtgacaaacaaagatcgcaggctgtttccctgccactgtccctacagacggggacgatgtacatgacagtctttggtcctctgcttgtctctgtgttctggtgtatcttggaggttttcctgtgaccattctctagtatctagtccctagtcaaccatcttggcttctttgccaggtcctgtgttctatctacacggacccctgtccttggtcagcattgtgggttgaatgagaatggcccccatggattcatatatttgtttagtcccggttggaataaacgtggccttggaggaggtatgtctctgggatccagctctgaggtttcaaaagcccagggtagacttggtctccccactcctcccctccctctcttctcctctcccctccctcctgcctttccttccccctcctccacctgtggaccaggatgaagctctcaggtacttcttcatcatcctgcctgcctatctgccgacattctcgccccatgatcgttaaggactaaacctctgaaactgtaaacaagtcaccaatcaaatgctttctctttaccagggttgccttggtcacggtgtctcttcacagcaatagagcaatgactgagacagttgttcccagtgttaccctggaaaatgcacttaaaccagccacagacccttccatagctctgtgatgaccctttctctctactaccacagctcctggaacaccgacccagcttcttccgtggcccctgctccactgtcctctgcccttcagagcctggtttatggaggaggggactatttcactatttacccctggctggcctggaactcaccctgtacaccaggctggcccccagttcacagagatcctcctggctctgtctcccaagtgctgggattaaagacatgaccactataccagggcccatctatatttctttctgtgctagaataacaaattattccatgagagagttagtgtctctaggtctccagtgattaagaccgagattaagttgtcttcaggatcatgccccttctgtgcatgcctggcccacagtctggggctgccatgcctgtcttaggtgacatccagtctcatctctatcttcccgctgaaggtcacttgtcggtaagtagacctaaggccacccagatcatccaagctgatgtcatgtttccatgcttgtgacaaggtcaaggaccctttcccacaggtactagaagaccaggagaggggcatcttttaggaagggccatccccccccccctttttttttttagattttatttattttatgtatatgggtacactgtagctgtcttcagacacaacagaagagggcatcggatcccatttacagatggttgtatatatgtatacacacacacatacacacacacacacacacacacacacacacacacacacacacacacgggagagtgtgtgcatgcatatgtatgtggaaaccagaagacaaacccagatgtcatcctcaggaatatggccaatctcctttgagacaaggtccctcctatcctggagctcactagatagtccaggtctccagcaaaccccaaggatacacctttctctgccttctgcctccttagcactggggctccaagcacgagctaccaccgctgctacctctgatcccagcaagaactttcctgaaggtgcctctccctctgggcaccagcggtaaattctgtgtgcttggtgcagctctgcagctctgttggacacgtgagctccttgcatctggagctcatagaggaagatgctggttagggctttgtgcttgagctggtcttggagctcagggatggagtgggttcagagacaaagatggctacccgctccggccaatcaaatatgcagtaacagacagtgaggcgggcgtaatttaaaaagaaccaatgagaacggaaggacgggaaatgaaccttttcatacgcaaccttcagaaaaacataataatgcagacagtttgcaaaactatttgattaaaagttcctaaaggccgggcggtggtggcgcacgcctttaatcccagcacttgggaggcagaggcagccggatttttgagttcgaggtcagcctggtttacaaagtgagttcctagacagccagggctatacagagaaaccctgtttcggaaaaaaaaaaaaaaaaaaaaaaaaaacccagttcctaaagacctgggggggaccccaacctaggactgtgccggcgaggaatgaagacacatgtccacgtagagacaggcacgaacacagacgttctcagcaatgttactatcaatagccatggggtacatccacccagatgccttagacagatggttggatacacaaacatactggagtccgacatttgacacttgtgtgtgtgtgtgtgtgtgtggggaggggtaacgagtgaaggatgattcatgcagagacatggattaaccttgaaaacaatatgtgaagagaaaaatcagccaagaaagtaacacatccatagagatgccagatagattctaggttcctagaaggcgggaagttggtgactggtcttttgcttgtatataatggtttctgactgtgtggggtgtttcttgtggtctctctttcattctcttcttctccttctccttcatttttgtttgttttgtttgcctgttttctttctaaagagaacaaaaggactgggggctgggttggtggggaggcaggaaggagctggtgggacggggaagccatgatcaaaatatattatctgggggctggtgagatggctcagtgggtatgagcacccgactgctcttccgaaggtccagagttcaaatcctagcaaccacatggtggctcacaaccatccgtaacaagatctgactccctcttctggtgtgtctgaagacagctacagtgtacttacatataataataaataaatctttaaaaatatctatataaattatctgaaaaaaatggtttagccttggctgtcctggaactagctctgtagaccagactggccttaactcagagatctgcctgcctctgtctcctgagcgctgggattaaaggcgagcgccatcactgcctagctgcatttttttttttcaataaaaaatgttctaagattggttctctcctcccactacgaagaaccaaggttggggggttggggggagggaaatctcaggctgtcaggcttgcccacaagtgcctttatctgacgagccatcttgccaactggagttgtccactttaagtgggcaaattgtgtggcacctggactgtatctcaataaagctgccaacagtaacaagaaaggatatggggagatggagcaaaatgtcttttagaagaagaaaatctatttgagcagtggtggcgcacacctttaatctcagcacttgggaggcagaggcgggagggtttctgagttcaacgcctttacacaataaataaacctttataattttatttttgtaacgggggttctctgtgcagccctagctatcctggaactcggagatccgcttgcctttacctttaaaacaattttttttttctaggctctctgctctttcccagaagcctgtcatcccgagggggttggacatcagcgcctcctgccttccttgcggggatttagaggccccaagacctggcggagaaaacgcgagcgctcgggcctttcccccgtccccgccaaccccgccttgtgggtgggactttccccggagagagtctcccgtgaggccacacccacttccggatggaacgcggcgggggccacgtgactcgctaaaaatggcggcgcccagtgtggcggcgtgaaagttgtgggaagtcgctgtcgccggggtcgtgagtctgaaaagcgaagggaacctgagagccatgtcgcgtctgatcgtgaagaacctcccgaatggggtgagcgggagccggggatggggcccggaagtggaagcagaggtccgggaatggagggtgaaggatggaggggttctaagtcagggacaggactggggaggtccggaatccaaggaggcggcaccctgtcctgagggctcagcaagccgcaaagtggcttccgagcattctgaggatccttccatgttgtgctgggcagtttgggtcagtttgacccagaccggagtcacttacggagagggaacttcattggatgttattgcgtccatatgcctgtggaccagcctgtggtgctctgaggagtgatgggtgtgggaggttccagccccctgtgggtgctgtcacgcctcggcaagtgtccctgggctgtgtacagatgttggcggggcaagtaagtctgcgtcggttcttgcctcgacttccctggatggcggactgtgatggagacccataagccaaatcaatggtcttcctccccaaattgctttggtttttttgtttgtttttaaaagatttatttttttattatgtgtaagtacactgtagctgtcttcagacacaccagaagagggcgtcagatcccattacagatggttgtgagccaccatgtggttgctgggatttgaagtcaagacctttggaagagcagtcagtgctcttaactgctgagccatctctccagcccacgccccccaaattgctttgtatccttgatgtgtgtcacaacagggaacagactagagaatgcttactggttcaccatcacagagcaagattagacttcaaagccaagtgtggtggtgcatacacctgttgtcagctttccataggcagagggtggcgagttcaaggccagcctgggttacatagcaagatgatgtggctaaaaataaataaattaattaaatttgttttgttgttgttgggaccatgtgccccccagaacagcagtcctcaaccttccaaatgctgtgcccccctttaatacagttcctcctgttgtgaccccctagtcatgaagttattttgttgctactgcataactgtaattttctcattatgaatataacgtaaatatctggtatgtgggatatcatatgcatcccccccaaaagggagacccaagatgatctcccctatttgggattttgtttgttgttttgggggatgcttttttaaaaaaacagactcttaaatctgtagccctggctgaccttgaacacctgcttctgcctccccaccatacctagcctcatctcagggtttctgtccttttctgacacgggatctcatttagtagccctggctgtcctggaacttaacatttatgtagaccaggctggccccaaactaaagaaatctgcctgcctctgcctccagagtgctaggattaaaggtgtgcttgaccacgcctggccttatcaccaggttttaaaacacacctgaaaaaatatctcttttgaaatatctgggtgcaatgggacacccctgctggggctgggaagtgaggcaggcagatctctagtttgaggcccaatggggctgcactccccattgtaattgttctacagtgcaaccccaggtgctggggaccagggtgtgggcatctttaatgggctccattattcgctggctcccaaggtaagcaaacgtttacacagcttcccttgtctttgtttatttggacaagcctctgttgggtatcttgtttgttgtggcagcctcaggatggaagttgtaattgatgtcttcctcaacggggacagggcaagaaagagaagagaccaattgaggtgccttgaagttccatttccttattaaagaactgaatggcctgctcaggggtgctcagcgggtgtcaggctctgagccaggacctggccacccttaaaaaagtcaaggtctgtcacctgctcatctcaggattccctccaggccctctaggttatttgtctcttggctccagggacccttctccctcctctctctcattatatccttctgctctagatgaaggaggagcgattccggcagctgtttgccgcctttggcacactgaccgactgcagcctcaagttcaccaaagacggcaagttccgaaagttcggcttcataggtttcaagtcggaggaggaggcccaggcagcactgaaccatttccaccggagctttattgacacgacccggatcaccgtgagtctgagcgagtctcatcctgcccaccgtagagtttgccttacctcaggactacccaggctttcaagtgcttgagcatcgttgcctgagagtcggcccactgctcactgggccctccccgagtttctgaattattaaagtactttttaactcttcactcttttacgttgtttgacctttgtaccctgaccacgagtgataagtgtgatagaactggtaggcgcagttacttctacaggggcatccatccctaggagaaagcagtttgctgaccagcaacagcctagaccatctgggcatggcttgtgggagtgccctcccaaaggctgcctcagaggatgtagtggagttaccagaacagagggatgaatcagttcatgtgtggtcccaggcgttcttccacactcctctggtcacccaactgtccctggtaccctgggcttgttttctgctgtaactgaacttgccttgtggtaaatagtcacctgacttgtggccattgctccctgttgccctgtactaggcaggggctgactcccaggggacaatagcatttcctgtcacgttcttctggatggcctgggagacagaattagtcttctgtaaatggcagcatgactttttggggggcagtgtctaggctgggaatgaaagtgattcgctttaaagcagatagcaggtcagcgaccactgcactctgggaaacccatactcctgtgctgaaggggatgcacacgtgcctagggacctcagcagctgtggaagccagctctctttcccatgcaggtcgaattctgcaagtcctttggagacccatcgaagccccgagcttggagcaagcatgcccagaagtcaagtcagcccaagcagccgtcgcaagactccgttccctcagacactaaaaaggtatgtaggcagtacccccagccctgtgcccagtgatggcagggtggtctctggctgggaaggagttgggagtatatttaggatggttttggaaggtgggtacgcccagcatcggcgtgagcccgtctgccttctactttcaggacaagaagaaaaaagggcccagtgacctggagaaggtgagtattctgtgggtagagagggaggagggtgagtgttgtgtggctgaagaaggaggaggcctgtgagcactgagagggaggagggctggaacaccgagcctcctgaagcgctgcctcatctccctcctcctgtccctcctcctgcctcttccacctgccacagctgaaggaagatgccaagttccaggagttcctgtcaattcatcagaagaggacccaagtggccacgtgggcaaacgacgctttggaggccaagctcccaaaagcaaaaaccaaggcatcaagtgactatctgaacttcgactccgactccaactctgactctgggcaggagagtgaggaggagccagccagagaggaccctgaaggtgagtgtgagtcccgggagtgctgtgccttctggcctttgcctggccttggcctgatgggcacaagtaccatatacttggcacagacatacaaaggacaatttgtgtgacactttctggtgacatgggctaagaaaagtgccaaggaccagcctgggcttggagaggggttcccgagagaaggggtatcagggagcggagaaacaaacgactcagtcaaattacaagttacaaactgacagcctatgttctgcccaagatagctttccagattgttctatgttctgctttctctgatctccagatagcttttttatcaagacaactttttttgcaattctaaaatctcatctcttgcaaatcaaagcccagttttttatatatatcaatttgctcattacccgaggttcccttttgattatcccatgaatcagcctctcagaatcccagcctcccatgatcccagccccctgattcttagagacagccagcacaagcacgggcaataagatagctgggtgataccctgctctggaattaccattcctaccacacttgggcctgggcctgggcctagacctgggcctaaactccctatgtcccaggctgactctaaactcaggaacctgcctacctttgtatctgcctacctttatatcttcctgacaagctggctcatagtgcagctgcccctgttgctttagatctgtgaagctccttacacaattcatattgctccttacacaatccatgtatatatataatacatatatatgtatacacacacatatgttggtttttcaagagcatccttatgtttttgcacagttgagaaactatatattttcaagctcatgttttcagagatgtttcccacagccttaagggctgtcctgaaggtcacagcattctaccattttgctgagacatagaaacaccctcgcctcccagactcatgctgtctctgattatcatggagtccttaaccttgacagagaggatattcttccaaggaggaagatgaaaatatatatattattatacaacaaccatcaacactcatgagagtccatgccctgctggctctgttccaggggcaggaaccatgtcatctgtcccttacacatggtcaagcaggactcggaaggaaagggccaccaggtgctaccctctagccattgaatgggcagcctactcattggtgtgtctccccccaggcagatctggtcacctgactcagccagtagtcaccaagcatatacagtatgccaagcacagctgtagggactggggacacagcagtgagaaaagaccccaagaatctctgcacctgtgcagggggcatcctggtgagagcagagtggcaaggcaggtagttcccagtggggcatgtgtggtgacaggtgtggcaaggagataggacagggcctgggaaagctttctggaagggctcctgctgctctagggggtagtagtatggtgttgtgctttcatgggccctgctgtggcttgtaagcagccaatcagagcacagaatgtagactgtaagctgcgggccagagtgaggaccgttgtggtttacaggtgaggagttggattgacacagctcagtctggtagtctactgagccgaggactgtgtgactgagggtggagaagcagagaaagtgggaaacagctaggagagtctcaaaggaaaggacagcacagtggctagagatgtggcccggtttcaggagatgggagaggggaattcaaactccaccccgaaacccctggagggtgctgaacagagccaccgcctcacagtgtgctaggagtgcgcactgcagtgtaagggatggccgtcttcctcagtcagccttccctggtaactcccttccagcttcctctcatccatcccttgtcatccaagtatgacacaccaggtgccctttgtatttgtgtgcaaactacactgttcaccagggatagcaagggtaaaaggacactgggtgacaggtgtacagtgcacacacatacacacacacacacacacacacacatacacacacccatacctggtgtctggcactcatgggttttcctgaacggatggattatagcaccctctgccataatcaaaaggggtaactgtgttgtgcaggatttttaatgattgtttaaagatgaacctaaaaaagggatcttgggttgctagggagactgattcagtctttaagtacatttaatcctctaccacaagatctgaggtcagtgcccagcacccacatgatgactcacagttgcccataactccagcgccctcttctggcctctatgggcactgtactcacgtgcacacatccacacacagacacacccataaatcttatgggggagggagggctggaaagggccaggatggtgaaagggatccacagatctccatgtgccctgggatagagagacatgcacagtccagcgttcccagtccaccacccggcactgcctgtcagagaactggctggagctgcttatgtgtgagggccttggccatggtgggtgtgctgtctctgctcactaaggtcactgagctctgtttccccagaggaacaaggcctgcagccaaaggcagctgtgcagaaggagctgtcagacatggactacttgaaatccaagatggtgcgggctgaggtgtcctctgaggatgaggacgaagaggacagtgaagacgaggcggtgaactgtgaagaagggagtgaggaagaggaagaggagggctcccctgcctccccagccaagcaaggaggtgtgagccggggagccgtgcctggggtcctgaggccccaggaagctgctggcaaggtctgtctgtctgcctgtctatctatctgtgtctgtacctctgtgtgactgtgtctgtgagggctgaggatacactgggcttgggttacatagtgtccctgtagccccttgcctagaggattgcctggaagggaaggccacttacttgcccataggtgtcctcacaccataggtccctgtgggccccgggaagccgtctgctgctggagtcgtgggttatcaatgaactgggcgggtcctgccttatacttagcagcaagatagatatatagatagatggatagatggatggatggatggatggatggatggatggatggatggacgagctgcatgctgggtaatatccctcacaagtcaatgattgacgttacagtcctctgcacaggtgaggaagcaggtgaggcagcttcacccacggtgacggctgggaagtggtggggccaaggctcggagcctgaagctcagattgcacagatagctgagaccttgatggtccctctctcccaccaggaggtcctctctgctgcagagacaagacacttagagactcgggtgggaccacagcccttggggttcctgtgctgaacgaagctggggtacacagcagtccagaacagactttgccagggaaagaattctagtcaggacaggtttgggcttcaaaggagaaatcaagggcagaggcccttggaagttgttggtactccagaatagcagatcctgatcccagcatctttgtggaattgtactctcagctggacactggacaaggcctgcctcagtggtacctctaggttccttcctggggccagggctggtgtctcaccaggtttcgcatgcagctgcctcctccagctctgtccaggctcagctcacagcagacagggattctcctggcattctccagctcccccggcagctggtgccccttccagctccagggtgtcccagccaccaccacctgccacgtgagcgtcaggtactcaccatctttgtgattcctcaggtagagaagccagtcagccagaaggaacccactaccccctacaccgtgaagctccggggagccccgttcaatgtcactgaggtatgaatccggaaagggagggtgggcaggccaggatcagatgaagtcaggagctggaaggagctgggctcggggctgcagacacgggaaggagaccagtggcagtgtgaggagtgcttccgttgcctcccatgggtgccaggctggaggctcgctgttaaaaagggagggggcatgggactggatagctctgtgggcagagtgcttgctgtgcaagactggggacctgagttcaagccccaggtatgtgctgtattgctgacttaacaggtagcgcgagaccagtcggcaggcacttacttcggcaagcgctctgctgctgagctgcatccctggcgtcgctgtccagtgctttacgttctaagagaaaatgctgagggaattttcacaggtctaacgaaatattaaactcgtttttaaaaaagaaaaagatagaagggaagacattttttttcattccagaaaaacgtcattgaattcctagctcctctgaagccagtggccatccgaatagtgagaaatgctcacgggaacaagacaggtgagacagaaagactaccctggcggtgctggggctgccgaccatgggcctcctggtcagccagggcctcctggtcaacaagggtctcccggccacagagcacttgatttggctgtcataaggcagagagtctggtgatgagccagcgttggagctgggggaggccagaagactgtcagagatgcagcaggagcgtagctgcgttttacagagccacaccaaggcactgtggctgcaggggacccgcagcctacaggctgtgagggctccttggcaggaagaggctgcctgggtaaagcatctgggggaagagagcgcctgtgcatcaagagcagcccagtctccatcctggggcttgtttccccctagcacccctcttgactttaccacatcctgtaccaagccggctctcctcaccttgaatcttgaagagggcagtgtggagtagtggggcttcatcccagcttagctgcttaggggctttgtcacctcagacacgtgtggacaggatcagcctcggtacctgcacactctggggtgggcctgtcccctagcagtgaggagccgaggagctgaccctcagagctgccttgcccactctgtgggaactgtggcggcattcatctgctgctaagggtggtgccctggttacgacatgttagagactgggcaggaagagagccagctgggcctgcagctggaaaacacatggcgctggctccaaagggcacaagcagggctttgaacaagctggagaagtgggctcagccatgcgggacttcagccagtgtacttccagcctagagcagatccatgggggagggtggctggggaggccagatccgatcaagagcggtccctcagctggcctgcccctgggaggctcctggcgcatggagcaggtgaagtactttatgtgtaggtggtgtccctgcagaggagagaagagcgggctggacagaaagaacagcctcatcttgcttgtgaaaaacccttgggctttgggacacattgtggcattgccatcagacagccttgtgacctgggacatgtgactttaagtatcctagggaagggacagccctgctctgctgtctcatagggtcaggctccctctcaggaaggattccaggcctggatccgagcttcagggacagaggtcctgacgatggccctgactatcctgaactgagtcacaatgtagcctgcaccccttctctagagagtgttcaggaacagggtggggttgggacaggcaggaaggcctgctgcttgctcctggggtccacatctgcacccacatggcccgctggtctgaagctgttggggtgtagggtgtgtgtgtgtgagtgtcctggaggttgacagcctatgatccttcttatccctgtcgtcactcagggtatgtcttcgtggacctcagcagtgaagaagaagtaaagaaggctctgaagtgcaaccgtgactacatgggtaagggagtatcagccgtcagtgactaccatccctatgctgacacatgtcggtgctgagatagtttagggccctggggatccagcagggagtccacagtccctccccctggagcagccacagagcgaacacagacagtcatgggcagtgtaggcagatgatgccaatgatctgagtgatgggtagagcaggagacgctgtgttgccctgtgctctgccctcctggagcagcccatgacactggccgacttgactcagaggtgggtgtgggccactgactgagaaaagtagtactgaggaaggaggggagttctgtcagtggtcaggtggtgggtaccagtggagcactgatgaggggagcgagtgctggctgaagtggggtggggcaccgaggaagagcggggcatgcaacggttcactctatcaatgccccaaggtgggttgtcatgtgccaccgttccagatcggccacagggattgtggggagactgcagaacccaggtgccgactactatggtctgggatgtctctcaagctcctcagggccttggctgcactgccaaggcgagtgaagtcccagtgggtccagctgtagcctgggacactgtgcgccgcagacatgatcacacataggggcagcaggctctgagcagcagcagagcagaggctgaggggacctcgggaggcacacagcagccctgacccctgtcttcatgcaggtggacgctatatcgaggtgttcagggaaaagcaggctcccaccgcccgtggtcccccaaagagcaccacgccctggcaaggccgaacgctcggggagaatgaggaggaggaagacctggccgactctgggaggctcttcgtacggaacctgtcctacaccagctctgaggaggacctggagaagcttttctcggcctacggtgggtgcaacctcctcctggtgctgggtgacagctgtgtccctcgtctagtggctccgctggagaaacaggacaaagcgctctannnnnnnnnnnnnnnnnnnntccgctggagaaacaggacaaagcgctctactgctgaggggctcacagcacccccttagaatataaagcagaggagagagtggtgtctccctcgggttgtccacactgctgtcccatccttcctagacactgtgtggaggcacagaggcaggtcagggaaggaggctccaggggcccgtcctgtccctaagcctccacacccaggttgtccttagaagaggcacagtagttactgcaggcatgcggcaagtgcctggaccccagccctatgtagagccttgctgccttttgtgtgataatcctgaccccacaggtaaaaacgcagccttgtgacctacaggccagtgagttttcagcctcagaaactacaacagcagcaacagtgagaatagttcccctgggccgaaaccacccagtatgcccaccactgttgtgccaggcagaccctcctgcctcctggctaacgaggccagagcagacaggagagggtttgcctagactgtgagtgtccatttgggaggaacacgatcctggcctatgttcagagtggcaagcactgcctcgtttgtatggtgatgttgcggcacttccaccgcaccgcctgtagggggcactgttggctgcactcctcgtgtgttagtacagcccaccccacacctgtcctgtgagctagggatcttgtgtcactttgtaggtgaggacaccggcctgtgttgattagtgacatgtcccaagggaaggccacacgtaggggaggtagcagagcgagtgtacagcccatacctctcctctgaggattggctcacagatgcctttagccctgggctggtaagctggttggctctcaccgtgttctcctgagggacctagcagtctgggctgctccgttgcctggccagggtcctgcacttctgttgcccagtgctctggcccacaactggctgatacttctcccatctccaggtcccctgtcagagctccactaccccattgacagcctgaccaagaagccgaagggctttgccttcgtcaccttcatgttccctgagcacgccgtgaaggcctatgctgaggtggacgggcaggtattccaggtacgcgagcttaggtgtctgcctgtgcatttcaggcctgaaagcccatggtggtctgctgtgctgtcacgtgatgaaagcttttagagggtgggatctctaaccttgcagtttgctgtttgttaatggtaacctgccacacgctggatccttacagaacatttgttgaatgaaactgtgctttttgcctcccagaatggtttcttggcaaaagatgaagctgcaagcctggtagccatggtgtgcccaagcactcaggccgtttgcctatggctgcaggcggtgggcacagcatgcctgcctgagcctcaggctgcctatggggcttatttgttttgtggtttatagatgtcattgttatcaggctagaactgcgtccacctttgtaaacctcctggtctttcaccagagggacggaaaaggacaggatgtggggtttgtggggctgtggggactgtaagcaggttccagcgctggagaggtggttcagcaattagagcgcttcctgagtgggcccacagcactcaagaagcagaagcaggtagatttctgggagttcaaagccagattggtgtacaaatggagttccaggccaatcagggtttttgtctcaaaagacaaaaaataaaaaagaaaggaaaaaaaaatgcaacatttcctatagggttgtatgtcccacgtccactccaccacagggcacggccgctctgggaggcggaatacgggagttgactgcttgctccacactgttgtcgggtggatgttgggctgtagtgaagccccaggacactgctcagggggtaggaaaggacagtctgaggtgcaggacagatggagctggttcgacaaggccagggccatctggttgtcaggctcttggacaccctggtactgctagatgccacagaagagctgagaatggagtagggacccgcgggctggatctggcccaaggctgggggaaaagggagagccccagctggccccacggtgatagtccttggcttgacgatggtggcgggcatgggcttggcttggcagtagtcatggctgggagtgcagagaggccttctatgggagactagatggtggttctgtaggtgaaggcctccatagctccccgtggcagatcccaacaagaagaggcagtctatggttttaaaacatttgttgtcatggtggaaagtgagtgagtaaaacagtaccccacttctcagggcaggcctgaggttaaataccttttacagggaggagtgtctgggaagggaagcttattggctaagctctccaggcccttaggtacctcgttaacatggagatctatcttgagcctgtgtgaccacagatcacatcctctacctgtggaggggcttggggtgttgcccctaagtgactgatggccacaaatcttttgggtgggggggctgcagctagtgacaggggcctgatgcccaggagcaggcgaagcgcctcctgcccattcagggtttctggggcttcaagccttagcccaactagggactaagccacctttcatatcccactctttcctactcttctagagtaccaaagttcagttctcaaagccgtgctgggccacaaccactggatctccagctccagggactctaacgccctcttctggcctctgaaggcagtgcacacatgtgcacatacaagctcttaggctcaggcacaggcacacacacatagacatatataatagtaaatcttttcaaaaacatgaacaatgtctgccgtatgcagcggtgtcgtcaggcctcaccacaataacaggtccctttgtcacacagatggaggataactaggtcttaaacttattcttaaactgttgggggcctacagtttgagagggtgggtccgtgaccatcaggatggggaacacaccagtagacagctgctgagagaacgcatctccatcagtaagcatgaggtggggagagagagagctaactggaaattgtgtaggcttttgaaacctcaaagctcatctccagtgactcacttcctccaaggccacacctcctccagcaaggtcacaccccctccaacaaggccacacctactccagcaaggctacacctcctccaacaaggccacacctcctccaacaaggccacacctcctccagcaaggctacacctcctccaacaaggcctctcttaatcttttccatatagttccacaaactggggaccaaatattccaatatgtgagcctctagggtcattctcatccaaactgccccaaaccacatgggtccctctgctgtcccctccaggcagacatagatctagagcacttgtgacctgaggtggcagactggggggggagggggtggagctgtgttacattctccttccatcccctccagggcaggatgctccatgtcctaccttctaccatcaagaaagaagccagccaggaggccaacgccccagggtcctcttataagaagaagaaggaagccatggacaaagccaacagttccaggtccttgtcacctctgctgagccccagtaccagggtctgctgcccttgaccccacctttcagtctccttgtgtgcctcatctatgactttcccaggcctcagtttccccatctgtgaggtggggaggacagactccctaccactgcacacggtacggggtgtaggagagagagtccctgcccagagctgagacctgccttcctcagtctgctgggccctcgtgtgctttgtccatagcagggagctggagggaggggctcgggcgtctgagagggaatcgacttgttgacccctacgtgacctccgttctgcccacactcctcagctcgcacaactggaacacgctgtttatgggaccaaatgccgtggctgacgccattgcacagaagtacaacgccaccaagagccaagtgtttgaccatgtgagtgaagagcctctctgtgggggtgatttcatggcgtctctgtcccagggcagctgtctgcacctggacagcctctgagttaccttaggccaggcctggggtggcagcatgctcgccacctgatggttggcagagaatgcctgtggtttgtttgcagcccctcccctgtcacctccccttctccccagacacaagttctgcactgtccctggacactgaacataccacataggtgataatgactatatttcagaggagcagggggaagcgggcagggttcactttcatggcataagtcagtatatctaaaatattatgattggaacatgtactcaacacgcaaacagcacgatctatttttccttaactgtctggtgctggcgtgtgttttacccttggtgggagatggaatggagtggaccacatttagagacactgttttgagcagccacagcataacctaatttaaggggacagtttcagtggctcaaatgtcagccatgcccgggacagaaggggactgctcttcggtgccctctactggagagagacacaaaggagtggtcatagcacctcagagctgctcagcaaggtgacagatatgacaggagagtctggggtaggagctggctcaggctgaggtgggtgcatcagaagaccctgcaggcaatgagctgtagaaagaacagcagggccatctccccaaggaaagccaggggagggcatcatgagccgtggggcaaggcaaagctagaaagggaccaagggctcccagatttactttgtccagaggagtgtgaagaacgatgggtgtgcacacaggcatttccctctgagccacctcctgacagcatccgggcctcttcccttcctcccacaggagaccaggggcagcgtggccgtgcgtgtggctctgggggagacccagctggtccaggaggtccgaagcttccttattgacaatggggtctgcctggactctttcagccaggtgagtctttacagcacacagtgagtctatagtcgagcagagccaggggagaatttcctgagaggctggagagatggatcctgtgggggaggggaacctgagccaagatgaagccttcagcactggtccctcagactgtcccctgcagaggacagcgtgcacttggggatgagagtccctagctcttcctgccttccacacagagggaacaggtctgtgctgccaggaaggagcctgggcattgagatgtggctcttgtcctttggaagcccattgggccaccttgggatctccagtctgggttatggttggggactgttggattccatgtgacttggggtaaatcaggagaggtgtggcctggagtcttgggctccagcccctctgcaaagctgtctggggcatggagtgagcgaacaacccccaacaacccccaacctcagcttggctgtccaagcgtatttgctaggagcccgaatggggcctctctgctgaggcaataccagtggccagtactgaagccatgctgaggtcacctttctgttgtccctccacacattcatctccccccaccccctatcccctccacccctccaggctgcagcggagcgaagtaagactgtgatcctggctaagaacctcccggcaggtactctggcggctgagatccaggagaccttcagccgcttcggcagcctgggtcgcgtgctcctgcctgaaggtggcatcacggccatcgtagagttcctagagccgctggaggcccgcaaggctttcaggcacctggcctattctaaggtatggccgctgatcctggtggggcaccagagggactccaagagttagagttgcccccaggctagcatgggcctcgctcacacaggctctgcccaaacccaccttccctcttggagcctgctgccccatggtgggcattacggctgtacctggggctgtctcctgacttttggttaaagaaaagaaaacagcagatatgagtttcccaggctgtcgtgacaaggggccgctgccagcttggtggcatgagacggaggattctgatctcacagcttgattggcagcccagtctcacccactcacctctgcccatcccattccaacctcccgactcgtgtatcaaacttacagcccagccagatagcacagtctcaccccaagatctgcctcctattgccaaggtcacagtcacaggctggggctcaaggtcaagacttgactgtgtcttggcgaggcactattccactcagtacaaggaatttctgtgtgcctggggcttgtatgcgtcatgacctgtgtcttacattagtgtctgcgggctctgctcaggtacctggttgtacagagggccctgggccctgccagtgcaggaagggctctgtacccagctggcttctcctggctctgtcagtcatctctggcccttctgtcaagcagcactcagtctccagctaggtcttagatggggacccacagccttggcaccctgtttctgcagttccaccatgtccccctgtacctggagtgggctccaattggtgtctttggcgcagccccccagaagaaagattcccagcatgagcagcctgcagagaaagccgaggtggagcaggagactggtaagggcagagtctggggtcaccatgctgtgggcagcgctgggagaagggtgggccggggtgggggagactgtcattaggccactggctgggtgtccttcattctgcctgtaggtagatttcataggcatgtcatgtgtcatttgaagagtagacccttgcagtcgtgtcactagaggtggccgagttttaatttcttggccgaaggttttagaatctttgagtgtattgactgggatttgaaggaggctttgggaaccatgtctccagcatcagtggtgtctgctggtccctctgtagcagctcgggtgtctcagtgccccctggtggtcgggagaggaaacagcagtggttccctttggctggtgcctcactgtggggagggggagggcacatctttgacattaggtataggacagctctcccttatccagattgatgttcaggagtgcctgccactctgagaaccagaagcatcggggtcacatcccagatgcagcctgggcagtggcaccagcaagtgtgaggacccactagacggctgtggtgggtcaaggtgctgtgtagattcattgtttattgttttggtctagtttgctattctcgtgtagtttggggtagtctcaggcttcctgttagctgagggtgaccttgagctacaggtgtagagaccatagtccattttctgtggtttctgtatattcaggtatacacacataggagtctattgcagcaagcaaaggggagccaagtgccagggttggcacacgtagggttcggatcctcacccaggctgtgatgtctctgctcactgagggtcatttggaggccatagttctgtgtgggttgtcacttctctctgaccctgacacactgtggttgtcgctctctggtagcgggttggaccttctggatacctcttcctagcctcagtcaggaggtggcacggtgtctctcagaccagaggtcccctcaagcctgctcacgatcttatccagagacgtttctcctcgcggtcctgcattggttgatcattagcgttgtgggttgggacctcaggctgtgggcgttctgcaagtgctgcctctcctggggctagttctccccctcagcaccccagagttcccaaagacatacaccccaggaggcccatctcacagaggctttgagtggttgctcccctgtcctgatgggtgcatccacatctctccccttttatggtgatgctgataaacatcgtaatctgcactttaatttctcacttgtcatctccatcctggctgggctatcactgcaccctggtgtccagcatctggggatgtagccctagacagagggagagcaggaccgctgcataggtaggcgccaagacagtgaaggactgtgggaagtgtgtgactcacccctctgcagagagggctgagctctggcggtgtttgtgtctgagcctctgatacacgtgaggcttgaaactggctccagggtttggtggccccagccagtgagtggttgcatggtggcacgcgaaggtgactttaggtggctgtggcttgagtctgtgtatagccagtgggaccttgagttacactcacagccgtggcactgcggggggagatgtactcgctgtccagtgcatgcgccgtctcctcctcgacatggctgagggagcgcctcccttttctgacttctggttttgtgtctgtaacatgggtgatggccaccagggtgcccaaggttactgttgtcacccacaggctgggagctaagtagcgtcccagtgcccttgtagccacatagagttgtgtgtcagccgacgcacgtgctgactggctacatccctagaacttcctgctgctccggtgagggggcaggtggaggggctgaggtggactgagtagtatcactggcgactttgggtgcagacatttctctagagctagagagttttcctgacactggtgtccagggtctgggggtggtactctgtctcttgtccccactaccaggccctgaccttgagaggttgctttccagggccatagcctgtgacctacaccaaggcaaccttagacctgggaggaggaccaggaagctgtccctggttaggccctgcccagatgcactgggctcacaccatctctctgcccctacccaaagccaccttggcctcctgtggcttttctcatcctgtctgactacatagtctactgctcagagtgtcatcccctgctccctcacccctgcccagagtgtcattccgtgccccctcacccctgcccagtgtcatcccgtgcctttcacccctgcctggaatgtcatcccgtgccccttcacccatgcctggagtgttgttctgtgccccctcactctgccctgcccattgttcccaaggtaccgccagctctcccatccctgtagggccaggacctagagtgctgcggacccagaataggatttcataggcaaggggggaggggcaggcttttctgcattgagctgagtcccgagggacaggaacagcgtgttttatctccccacaaccaagaccctcacctccagataaagggctgcgagtcaggggaggtcccacaaagctgcttgctgctgataacaggctgtcgctgtgggcctcacaggagctccagtggggaggggccggggaatcctacagcctgcttctaatgacgccccctgtggccacccgtgactggctgccattgtgctgtctgaggtggaatagtctttccctgcccctcccggtccctgcagcccaccttgctgctcaccccatcctgtgccatgcccagccctccacctctctcacccttccccctctctgctccttctcccttttctcgtcatccatttggatttcatggtgcccaggtttttgtttctcctttgtctccccatcactctctctgccttgtaccgtttttgtctttcggattaagggtacacagcttttcctcctgtggcccaggagggcccaccaagcaatctgcagtgtgcacagggcatgaggttgcagccctcttggatgcttgtggcaggctgcttccctggtcccttcttggtctttcctagaacctttattgatgccccttctagatggcgagaaggtgggaagcctgcagctctgagctcacatatgtgggcagggcatatgtgtatggctcagagtgctcagcccaaggtctgagctcgggtctgtgactccacagctacttaggaacaccgtctaagtgtggtcgccaggcctctgttccaggcacaggctgagcatgacagactcatttccatgggtgtttttggggtggacatcactatcccaggcctggccccacacatggtgagctcccctcatatctgagacacacagaccggagccagtggagaaagtgatttcacaatggggctggggctctgtaaagaggaaagcaatagagactagctgagtcctctgtaacagggaccctggggaatgcttgtgctgtgacctcatagggatccaggagatgaagaatgagcaggcgcagcatgtgcaaaggtcctgtggcaggctctggtttggcagatttggcagtcagcaaagaggccggagcagttggtgtgagctaagcagagagaagccagggatgaggcgtgagcagctgacaagcccagtggggaaggggcaggagcaggtcggggaccagcaaggaggtcacttggtcagttggtgaccagtgatagtatcccaacctgtggatgaggtcatgggcacatgtacttcagaacagcccagtgctgggttcaggagtgtgtgcatgcacgtgtaccatgtatatgtgtatgcggatgcaggagtgtatgcttcatgcctgtgcgctgtgcttggtctcattaaacatggttgtcttaggcttccagtgctgtggagagacaccatgaccatgccaactcatataaaggaaaacattttattggggctgccttagaggtttagtccgttaccattaccatcatgatgggaaatgtagcagtgtgcaggcagacatgctgttagagaaggagctatgagttctagagagttctacatcttgatactgaggtagcaggaagctgagccacattgggcatagtttatgcatatgaaacctcaaagcccaccccagcagtgacatacttcttcccacaaggccacacctcctaacagtgccatgccctgtggggccatgggggccattttctttcaaaccaccacagctgtactataaatggggtgctaaggtagggattcagcctctggccccagcaccagtgtagcctgcatatgtctcatagctccatgcaccccctttcccacttcccttccaggtccacatggaccccaggatccaggggccaggatgagtgtggggaggcgggtagccctgcttgggctgcgggaagaaggtctgccataccagcagagtatggcctgcatatcctggtgttgagggagggtgtggttggctcattgggactgttctggccaggccagctgtgaacctagaactaggtgccagccattctcaaaagtcccctagctcctgaggctggggctaggagcagctggaagctggcctgctcaggagggacctgcccatcatgatactgcctagaacctttttcagctcagccagctgctaacgcagagagtgacctccctgtgactatctgaacgtgccctgggagacacagctcagggcagagtcctgggtgcccgtgccaggagctgtcagactcctggcccctggatgctagctgaatctggactggggacaggaggaaggcagggtcagtaatgtggaagaggccagggcatggagcatgaggccagcaagctggttctttttctggccccagctgaggctgaaagccaagtgctcttacaacttacgttgtaagaaaacacttgcattttcctcctcttgaaaactctgtttctggtcacactgaggtgacctctccaagtgtcaagacattgagcagtaccaagaagggacgcccacccactccagcagaccatatacctcctgagccattgccttccctaccgttcacattgaaaatgtctttcccagccctagtgactccttacaccaacccgaggcaacctgagatttagggttcaggtgcagaagccccagaatgttctggagcccagtgttttgtggtgtggtacctcagagatgtcaacagcctcccttgtctgaggtcgaggtgactagtgtctgttgttctgcgtcttcctcaggagccgacgtccccttctccatcctgagtcactcttttcctaagctttgcctgtgcaagtacaagcagctgtgctgtggtggcattgctgggagacaaggcttgggccaggcccacagagagagtgctgagggtgtcagagaggcgatgatgtcactgatgtcactgcgtcacttccattgggcttgcgagggtggggttgtggggctgacagttacagcaggtgtgagtgaggctttcagaagagggctggggagatggacagagctgagcaccaggaagtcccgcccacatgcagaagctggtctgagagcaaagaacagcagctgtcggttggcccatgtgacctttctggtgttggcccgccagagcgtgcattgcccttgctcacatttctgacagaggtgtacccaaggctttgggtccaatcccttgggcagggctgttgagaacgatctgttttcaaccccgccccatccccattttacaattttgagagatttcaaatcggattttagtttggaagttcatcaagtacctgggtgaggagggggggggggagtgtttgtctgtgattttgaggaaaataacattttgcttaggttcacagttaaagacaataaatagttgatgtggtaatttatgttaaaattaagtcagtgtggtcaggcctgctcagcactcacagtttgtgtggtttgtgttcaatattctgttctctcttgaatgaggcctacagcaggacgtctgtgtctgcctgcctgcctgtcttacacacatctctctgtccccccttctcccaaccccctctcactccctctctctctggctccatctctctcattccatctcgctccccttctcctctgcctttctctcctccttccccctttttccttccctctctttctttctccctctgctgaagccaacagcatctcaggacccctttaatctagcaagttttgtgcttgaagtcctgagatgtctgtgagtttgcagtgtcaccatgtaacgcactgctttctttgtcgacggtcagtactagacccagaaggtgaaaaggcttcggtagaaggagcagaggcctccacaggcaaaatggaagaggaggaggaagaggaggaggaggaggaggaagagagtatcccaggatgcactttgttcattaagaacctcaacttcagcaccacagaggagacactgaagggagtgagtttggggaacaaagggatgggaacccctcagtctgcagcctcctggcagcatcacggctgcccccttgttcacctcagggccgggtcctggttcacgtaagggaccagtagtggctgctctagaaggcagcctggtgacaggggcctgtcttttgcaggtgttttccaaagtgggagctataaagagctgcaccatctccaagaagaagaataaagcaggtatttatccacatgacccagcaggagcgcagggagtgcttgagggagggggtcaggaccccaccatggcatctccgactcctctggtctccaggtgtcaccctcctgtatggtggtcagtcctgagcctacctcaggcctcctgctctttgcagactcaactgacacatcgggctcttttctagaatgttccctagtagtgagcggctttgaaacagttccatggggctgcagtatggagctgaagcctctacctcttccccttacctctgtgttctggaagtttcccaggcgtgccaagaaatggctgaccttgggctttccttcccattttccaagggaaatacccagaagaataagttctagaacattctaccgattcattaatcgtgtgccccctggccagggggcacctagacctcatgtctttccttggcccaaagggttctcctgagtccagggcaacctcctcctggcttcctgcaaggagtgagcagggccacccctatccagtccccttcagttaggcaggattggtgggcatagcacaggggctggcgcagcatgttcctgactagtaatggacagccatggtgcctgctgagtgtccatcagtcaggtcccgggagcctgctggtgtagccatgatcaccctgttactgcccactccctctgaagggagaatctgattaggaggtgagctgtccagtcaatcgtccacgagttcgtagccgaggaggcccaaggagcagccatgttgccccattgtgattcaccttaatgcctgatcctaggtcttttagcacgaaccaggtcttggtttaaaggaagggggtatgagaagggaagagaaatgagtggaggtccacccatggggtcttcccgagtggtctgctctggagctgggcccctccctgccccacccccttactctctctccctctctccctcaggagtgctcctctcaatggggtttgggtttgtggaatacaagaagccagaacaggcccagaaagccctcaagcagctccaggtaagacagggattcctgggtcaccatggtgagaccagggcccaagggagtccaagaaagagtaagggcctctctcaccctccgtggtcactttgacttgcttgtttgtttaccacgattccaaacatgctcgctctattctgcaggctctatggtgtgttctaacccacctgagccacccataagctaggctctgactgcagtccctagacgcaaagctgctgcattagcaaaatgaccccaggaaatccctgcgatatcccaggaaacgcagcgagtggggctgtatacacactcaggcccgtgtgtctattggacatgactgaaccagatgtgcttgctcctccctctgctgggaaagacgggcttcagacctggacagatgcgcaagagcatggtcacgggcgctccatggaaatcacgcctccctgggggatactgcagaaaacacaaagagggctccttaaggaggtgacaggagactagtacctgtcatgacagaagtcacctgctcagagctctgggagggagcagctagaaggtggggacagcagggactctgagacagggatgagctttgtagatgtgagaggcagagaagtcagcatgatgggcaggatggagaacaggatactgggatggaggaaggaggtgtagtcgcccagctttagccttaggtcctttggagggctagcaccagacttgaaggcagcggaagaccgagcaagctctaactggagttttgggactgtttcctgagctgctgtgaagcctgggggtaatggggaacccttgcatcccatcacaaggcatcaccctagcttggatcaaggaacaagtcgggagaggggctaagacaaaggcagattgtgatcctccacagcaagagcaggcctgtggcctgtggcccgtggcagccctagagggacctgaaccttgcttagaaaacagccacaaggccggtactcaggaggatctctgagttccggaccagcctggtctacatagcaggtcttaggctagcctgatctatatagtagaccctgtatcaagaaaaataacagtagagccccctgcattgacagtcatcaggccatgcagggcagaggccacagctcagcatgggccctgtgaggttttgtcttttgcttactagaaatccgcactgcggtcccagatcttgtctgagattcaaattaaactctgaagattgtggtccatattttctctttggtggttctcaagttggtggtgcagcatttgcatgtgtgccatgtgctctcctgtgcacaaacatgtgtgcacatcactgccagggatagggcgtccaaagccccactcgctgcgtttcctgggatatcggagggatttccaggggtcattttgctaatgcagcagctttgcagctggggactgcagttccagcctagcttacctgtggctcgggtgggttagagccttccataaagagcctatgaactagagcgagctctctgcaagccagacctgcaggctcctctccctgaatatgcctctgtggtagaaatagctccctgagtagctaggaggttcggaattcctaggagactggccctctctggccactggctgcttggctcaggactgcttttgtgttaaagccatctctgtccttggttcccaccagcccctctgcctgagacaggctgtgtgctggaaaagggcaaggatgggttagtgaccaggcctggtctttctgtgttctagggtcacactgtggacggccataagctggaagtacggatctctgaacgggccactaagtgagtcctcagatgtcttctctgtccttgggtgggtggcagctctctgtgtctgaccttggtctgaccttggtgctgattgtcctggtgtctcatggttcttaaatgccccacctctgccacctacacaccccaattcctcagccacttggggttcttcacaattaaggtttctcttgccaactttcatacccgcttccctgcccgtctgaaccagtcagtgaccatttttatcataaaaggaggagatggggctgggagtgtagcccgagggtaaagtgctggcccagaatgcttgaggccctccctcatggcgttccttccttcttatggtccttgttcaaggacagcagcaatgggctacgctgttcaggggagaagataactccattcccatcaccccaagcggaggatgggctgacttcctgtgctttcatcctggccccttctggaggccacttgcaatgaccaggaggtgttttctgtgggcaggtgacaggattggtctaggtacaagcagttggcagcccagatgacctggtgttttcccccaccccattccaggcctgccttgacatcaactcggaagaagcaggtccccaagaagcagacgacctccaagatcctggtgcggaatatccccttccaggccaaccagagggagatccgggagcttttcaggtaggtccccacactgggctgtgtgcacagcgccccctggaggctgcgaggcttcccaggtcctgactgatagtgctttaagcccacaatggggctttctaaactttgcctttggtctggcttccgtaatctcagagattatggtacaagagtgccctgacctcccttctcagaggcaggaggatgtctgggtgtgtgcctgtactttagcactgtccccagatatcaggagagatagcagttctggtggctgcagcctgtggttcccctgtgggatttaccgatatccctccatgcaggctttgctcctggagagtcatttccttcaaggtgggtcccagacactgggaccttcacctcaggtccccagaggaccctgttgtcctcatgggattaagatactggcctcagttgctctctggaaaaagccattttgggaggacagtgaatgtgacatacagaacacaggccatggtctgttagtacaggatgcagtctcggcttagggcccaggcaagtgacgagagtcaaagacagcctggctgggacaggggtaggttgtctttaacttcagggctctccttccctggccgtgacggcacacaggagcctgatgcaggagcctgggtttcgtcaggctcattctgctcgtggtttgaaaggtggtccatcagtttaaattcttttttccccaacctttttgttttatgtatgagcatgtaacttccactcacgaactgtgtgcatgcagtgcctccagaggccagaggagggcatgagatcacctgcaactggagtgaccactgagctgccatttgggtgctgggaatgaacccgggtcccctggaagagcacccagtgcttttaaccactgaggcagccatgtctcctccctctgtatgtgaactcttacagtctgatccacacaggcctcaggctgaccaccccatatgtgcatagaagagcattttcacttgggtggccctgtattgagtctcaagttaaaggagacatttctgtgatcccatgagggggcactggatcatgaggcaccccaaggcacgcgttctcagagcatgaggtggggcgtttaacctttctgtgccattcgccgaggttcagctgggattttggagaacacaggggccttgagtgcccctccaccccgcccccccccccccccccaccgtggcctgctgaggctctgcctggggaggagccatgtcaggagcgctcagcctctgcttgtcactgtctcgggtgatgtctctggtagaatgacctgtctgcgtcttgcaaggctacatgacaagtgctaagttagagagggaattatctttgtgaggcttgcgtctctcctcttgctgggaggttaagagatgggatgctgcttggggaatcggcttcaaaacccatcccttttctccctgttcttccccatcccctggggtgggggtgttcaccgctgcagtcagctcaatcagtgctgcatgctgtcccctctgatgtctgagctccggtgcctagtgatacgggtcacagtctgggacaaggggcgcttttttctttttcttttcttttttccccacataccagcatccggcacaacagtcaaaaagagagggagagtgttagctcccggctcgcctgtggtgcctctgcctctttttttttttttttttttttttttttaaagagtcccaatctcacagctgccgcttcaaaaggagttgctaagaaccgtgcgtgttgatcaggaaccacatccctccaagatgacagtgtcgcccggatccacggtgtatcggggatgacatttatccagggaaacaatagactgcaaggcaggggaaggtgctttgtttgatctgtgtattatacttcctctttagcagacagggaattagtgtctgcggaatgtacttacactcggcgtctcttcccctccgccattgttctgactgagcggtcctaaacccctgaagctggaactgtcctggacaggcactgcctcgcttttgttagcttcccagtggatagatagagagctggggccgattgcagtggtggacagcaggggtcactgtgagactttcccagggatgcgaggcccgtgcctcagctctgattctacacaaagccacccaccggccagcggaaggtcactgactgaggggaaggaaggcttcagggtttgggagaactggttgacctactgtgtcaggcaggattgggggcgcttctcatggtagatacacccggagtcacaacccacgttcctggtatgtgcctgtgtgctgggctctgtgcctggtgcctgccatgctggctggcttggaactcgcagccctgggcatgggagggcttctgctgtggccaaagtgaacttgaagctggccaaagtgaactcgaggcacagcctgctcaagactgcacatctaagctggccatgtggctttcagggctctgaccagagcttggtcttgtatatctgttttcctcccatgtttataaaaggacttgtcatccccaggttgtcttggtgaggacatcggtgaatgtgtgtttgtatgaagcactgtgctaggaccccagggaaggcacctgtgtccggagtatcctctcttctgccgctgtctgtagagggccagggaagagagaggctgtgaggctctgtgagggggcagtcgcagtggctggtgactgtggttcagcatcacccaaactgtaggagcactacctgtgtctttacccacagtgcagaatcccagaggttcttagtggcttctctcatcatctcccatcagccccaaggatgcttggaggacccgcctgcccaggcccctctaccctgtggaaggaccagcagggctgctcagagtgtctgtgcaccgtgtgtgtgtacacactgcagctcaggctgtgtagctgcagccatgggcacaagccccaagggccccccccccattgccttccttgggacggccttacccagagtctctaatttcaggaaaggcagtgtccattctgaaagctgatgcttggttttcacagggggcagggaggaaggttaggatgtttggaagccagcccacccagccttgctcagttttctcctctgttggtgtggaactgtaacttgactcctgctacctccctgttcctgcctgggggaggaatggacagacagacaggagggagggagggtcactagcatcattctcagtctggcgggcacagtttaggctgtgccgtccagtggtttctttccccccaagtgactgtagcatctttggggcctctccttcctcactttggggtggagacagggagcttgccaagccataggctcccctttggtccctgtggactcagcttggaattttggaagcctagtgtcaggagtccaaggtgggaaagagaaggcctgagtggcaggcagggaggatgcacagccacggcctcttacagccctccgcagatcccctgggcagtttctgctcacacgttttcattctcgaggtatagaaaaagcactgtcccttcgctgtctggttagggtgctcttgttccgctccccatctctgcccctcacctacaggtcctttactttgccttcctcgccatggggtgcaggccatctgtgtgagggcagattagcttcttccttgcctgtacctgagaggatgaggaacacgcctgagctgtcccaggcctacaagctatgtgcctccttcctcaaaagacaccacactgatgctacagaggatagctaacagtacatataatagaaacagcctattcctaggtggcctgagtgttttccctggtccccagccagtgaccggggagtctaggtgcatggctgttctgtgggaaggcctgctggacagtggtggcacatgcctttaagaaaggaaggaaggaaaggaaggaaggaaggaaggaaggaaggaaaaaagggaaggcccttactgttggctccttgtctgtcccagaccatccctctgcctcagtctcctctgtaaagtattccctactgttgcccaccttcccagaatgcagagcccttgggatgtgaaaattgccccacagaggcagggcctgtgtccctggagctccagaggccctgtggtccctcctaagactggctgttgcagattgtcattgtcgcctggctcaccacagcctgcggtaccattgacaaactctaggccatgcgtggcccagatatggttcatatgggctggcaggcagtggtgagctagctcctgaagtgagctgcctacagccttggatctgaagataggaaaactcatcagcctgagtcccacacagctctgccagctgccactggttatgtagtactcaccagagaagctccctgcgcggctggccgcttgctcgcaccccaccccacccacaggcaggagaggttgagcttctcctggatttgagactctgtagcccctccagcttcctctccctccttcccattctccctgcgagctccccaagtggagatacgcatgtgcccacgtgattatctacttactgaacaaaaccccactctggactgtaaggtccaatatcaccagagtcatacagtgtgcacgggagcctggtgcccagtggatacgcagaagatgctcacagagtatgcgacccacatatgcagccctactgggcagagccttaccctaaaatgctgatgaagtccaagttgggaggcacagagagggtaagcagtttgcctagggtcacacagctctgtggtgctgtagttagctcccattgtagagcccaccatcctcctgggactgtccccgaagggtggggatatccactgcctctcagattggccaggctctggctccagatagaacactggttttttttgttttttgttttgttttgttttgttttgttttgttttgttttttcttttcttttcctgcaatttcctcctcagaggtgtgagccacctgcaagggtgtgaatgggcaattcacaccaggcatccagagtccttaattacaggcctgggtctcctgtgcccagcacacctgttgtgctgactttgtggacagctcagtctgtccctgtccctgttcctgtccctgtcggcaggcagtgcccttcctctcctgcccgggactcggggccctgctgctctctgtcctggttcctggcagtattttctagaagcttcaagctctttgaactgctctgcacagagagagtgggataaagggagggggggctcatgttcccctggctctctggaaagatggatgtcatgccttgggccagtaatgtcccctacctcccagctgaacctacctgtgctcagctatacttgacagtgtaggctatatgctccttgtgacatgggccccaaggctccatctgtctgtctgtctgcctgtctgtctttgatatcatctcagagatccagtatcagcatgggatcgtgggctccaggtggacgtgtttcaatctcagaatggcaaaggtttctgaagacagacatttaacccagtgtcatgcttaagtgggcagaggtaaacagatgcagaggtttgtgtgcgtctcatgcttgagtgcccacacatccacaccttagccaacgccccacacaaaacatagatgtccccacgattcctggtcctgccaccgtcccgcgagagtggcccctcccctcagttctgtgcctctgacagcatagtgtgtgctctcagtgaggccccatgtcccacgcctgcctgtggaagtcccatgctgccccgaggtacagccatgccgtctgcctgagccacagcttgcctgcccattgctgggtctcactgtcaggaggcggtgctgtgacgcctcacccaccttttctacccagtctcatttgtgggactcttactaagtctccctatgatggctagtagttgtctgatctatacctgtgtgggggatggtgtgggtgtacgtgtgtgcacatgtgtctttgtgggaggccatttgcccacagagaccagaaaggcctggagttacaggaggttgtgagctgccatgtcagtgttagcaactgaagcccatctctatgagagcagcaagttctcagccgctgagcgcccccagccccagttgtctgatctgtaaaccaacttcccttattaacgttctaattgtctctgtcattctgtgtattctggaactgtatcccaggttccatgaccgcagcgtctccctggtcctgtggcagcttagtgcccactcgcgcatgacgtgtcactcagcggccttccctggagtctgcccctccctggcttcctgaattgggcacagtccctctggaatccattgttgtgcctggctgaggtaggggcttcattgaattagctcacccagctgatagcaatgccctgtcatctggctacactcctatagcctgtcctgtccgtgtaccttacacacttccaatctgcagtgtttgttcccacacattgaacgatgggtctggatcttattggctaaggccacttacggatctttggggggatgtagcctctcaggtacaggggttttgtgtcccctgcacctcaggttcctgtagcttgaaccagctagcagctctggataaagggtgccagccgctttaggacatacacgtggcattgaagagggccaggacagagggaagctaagacaaaaactgaggcaccatgtggctgacaggatgctgtgtcacacctggggtggaaccagtgaggttggccatgcccctcctccatccctacgaatactccctggcttccatatgcatcaaagagaaccttggccagggctacaatccagagttaagcttttgattcttgtatccagtattggcataggtgagcacccctggtaagcactcccgtgagcactcacagtagatccatatgcagtagctgtaaggttaccatttgttatgttcctgatctcactgccgtggaacaagacacagtgggcaaggtctcctgaccatagcaatgcctgcactgtgcctggggtccccttcagtcctctaccactctgggtaacggaggcttgaaatctggtagtcccacagcagaacagggtgcagggccacacagtatcccacatccttgtgtaagatgcccaaggctacccatgtgcaaatctggaaatgaccccaagttttaactagaaaatcaataccccaaacagtgacagatggcagtagtgagctgcccgtcacaggagtaagcaggcggcatctactgcagctgtctgttgggaagacttgagtagctactgagtcagtcacagctagtctggcctttggtcagtagtaagtccttggtcgagttggggacaagcagggagagagaagttaccctgacttccatatgctgcatcaactttatgcttaaatctgtgctaattgatatgaacctggtaccctggaaagttggaattccctagcctcattgcattgcgggggagttggaggggcatctttcgacccaccttggaggtaggatggagttctctggcctctcctatctcaggcatcagaggttggccgtgagcttggaaaggagtctggctttccaagcccacagggcatcacctagaaggcagaactcaggccaccgcttgagctctcagaccctgtatgggttgagtaaccccaggcagttgtttcagctagatcagagagctgatgctctccaaggcagtgaaacctattggtcatggctgcctaggatcctgtgctgggtggtggggaggctgcctgggctctgtggaaagtagcatcacaattgattagtaatgtctgctgtgactgcagaagcagccacagtttgcactggcgagacagcgttcatctgctacaagggtgttcccacttgcctgtggggaagcctgcttccccctctgtaagcagccagcactggcacacgtcttctctcttcatcctgctactggcagccattcgctatatccagggaagacacagagctcagactgaagtggggcaccctgggactgagccatggtccctctctccacagtgaatatttgcctcgctagttttctctctacacagtggctgttctggcccactctctgattgattcttgcttgcagctcacttgttgaagccagtgcagggctctgcctgcctgtctcctggcatcctgggtatgaaaggcagcaggagccacacagcttgggagatgtccctagagtgtctaaaggcccagcagcttcaggccccttctccttcacagagcttttaagtgagcaggactctgttagcctctggaaggggcaggccctcaccactgcatcacaggctggctagtcagctcccagagggataaggactgtcctggtaggtcttttggttagacatggcctccctaggcagcagattaaagaattgttgtaaaagacaccctgagccttagtcccagtatctggtaccacgcacttgttgggtccacctaagccggcaggtcatttccgctgttagcatctctggtggttgttagtctctgatttagtgcagcttcctgattaacactggtcctggctgatccgcctctggcaccctgtggctcatcattatcagtctgtgtacctggcaggggaatatggccagagcctccaagagcctctctgcagaagccacaggacaggtggcttagaggagggcagcggctgctaaagccggccagcactgaagggtcacaagcacagtgacccttcagtgctgtgggagtggccacctcagggactgtgcatgttcaacctacacaagcacacaggctctccggagtgcaccgagcacaggttctgagtcttggctctgccacctgtctccttcagggaagtcatttcagtctctgcctctcagagtccatgtccgtgggatgtcacccagtcctcagcatgacagtcagcgtaacacagttcctggcactaatgccaaggttctcagtgtaccctgggaccttgagtgtctgctctgtgggcacccagtgttgggaaggagcctgggtcagctatgatgggaggctgctgcagatagggggagggtctgagggattcctttagaactcactgaggttctgaggatgttgtggggtgccatgtgacaaaagagtctgggagctgtgacttgagcacacagctctttgtggctctctgtgtctgacgctgtgctgcagccagagggcatgcagactcctagatttcttcctctctatttctgcctttgtaaacttccttggtgtctgctgtgtctcccgcctccctgctgctcaccgctttccctttagatacattccacaacacttgttctctgagcccagtttttggggaccccccaggcttttctcccagagagaatgctcctgtctatctgttcccagcaaggatcagcctcagatgtaggtggggtgtggctcctccagggaactggccttgaacccaaagcttacctatccttactatggagtgggacatcccagaagagctttctggtgacagggcggcggatggcactgtgcacacgggttcctcctgctggagacagctgcctcgctggctttccctctgcctaccctcatgctgaggggctgaggacagcagggagggatgccagggagacctctgtgtgttggttgggggagaagctttccctgtgttaaaggggaagaaagttttgtgttaggggctgctgaccaaacatgcaaggcgcacacggtattcacgcctgtgcatagagtgaggatcgggagaaagcacacatagcggcagtcagtgctggctcattcgtacgtggcctagactccctccatgtgctgctgcggtgctgcttagagtcaaagggaagagcactgccatcagtatccccagggcagggctgctggggagggagggccttgagagcattgcctgggttactcaggtcagatccatggccagtcatctctccagttgctctgctctcttatatcttgacctttgaactcttgggccagccccctgttcgaatctccttgctgtaaatgtagctggggccattgcccccggtgggtttccacccagtccttcatataccgcacaaacattggaaatgccttcagcatccttacctgctaacaaatggaagctttgctctcaaaggctctctccccgttcttaagtgaatctcattccaaagagcgtgggaaagtgagtaaaagccacagaagcagccatagacaactgtctgcgtggcaccgccccatcctctcttctcccgcgcctctgctgtggggtcgtcattaatacactcccttcacagatgaggagacagcaaggcagagaggttaagtgactcgcctgaggtctcatagccgtcaagtggcagaaccaaggctctggggcccaggttccagtctgtactcctcccccggctccgtaggcaagtttgatggacgtaacccccaaaccggcatctcccctgctcacgtgtgctgagagcctcttgtccttccgagtgtatgcttaaaagcctcctacagtggctctgctggcacagcaggctccataggccgagtccaccttcgccggtgttcactgtttaaagtagatgggtgacacaggccactgatggagaacacacattgtcacacacgaagtgttttcctagcacaggctgggagtgaaagcttgctgagggaagaattcgagcttagggaaggggtttcagtgcaggcctcataggtgcccctccctgggaccttagcactgtacttactgccttaaatttatataaggtcctctctaacagcctagcgcgcgggagctccttttaacatagccagactgccatgccagtgcagagcagtttattcagtaggagagaagcagcatcaatgcaccgtttcttttaaagcctgagacggagctagactgttttcagagacgcctagtagcctcctctagccctggccttggggaagagctgtccatcctaccccagagctgggaactctgcccatcctttggatccacggaaaagggctgactatgtgcccactggctcctcccagggttcatctgtgccattcttacctaggtgtgaggggctggcatcgttgagggagaaacaggtcagcctggctgtgggtgacaggggaggcaggtgggtgatactcgccctgggaagcagttgagaggttctctttcttcctggggtttcagaggcagcccctcatgtattgggcaaaaagtacctcatggattccttgcactagaagattctggccgttcatcaaatatatctgggagtgaggggcaagggtaggtagcacccagtggtaaggggatcttgggccaattctcaggaccctttcaggggtcagagcatcttcccgtctcagacattcatccaggactggccggccacttggcttctggtttttggtttttggtttttctgccagcctccctccagaggccagagctgccctgtagtgtgccccggccacagcaaggaccggtgggctgcaggatcctcagcgcagtcacacacaaggaatcactcatttgtatctcattttcgagttattatcgagctgctggttgagagagtattttgacagcagctgtcagcaaggtgcaagcggctgccatcgcctgcgattggctgaagacacctatggcagagcgctgaataataccccagccccccccccccctccacccacccaccaggagaggcaggggaggagggagagcaaacatccaagaggaggagggaaaacacaggcttcattaacatgtttctgactcccactagaaacagcggccaaaaaggccccgattgtatctcatgttttatttaatttattgtatttgaggtttggggcaacaagggaggtggatgagcgaggccccttccaaacaaccatttaggcttgtcagagctcattgattgagttagcgagatttccactcctggcttccagctgccagggctgtaagccggtcaaactggggctgaccagaagcccgacatctgggagtcagggagcctagaaaggaggtgcctgtggtgagagagaccccactggtccaccagacagcttgggaaggaggtgaccatggagagggaggcctgccagtccaccagacagcctcctcatctcccctcgctgcttaattgaagctcggtggaatgtgtgcgctttggcatctctcaaaggcttctctctcccttcgtggtagggaattgcacggagcatgtttcttcccaagctccgtggacccaggcaggggataaataacgcctcaaattcgctgcccttctacccaagcagttgaaaattccctgtttgtttggtcgttgggtttgttttgtttataggcttgggggaaaaaaagccagcagtaccagaaggcagatgtgtggtgctggagaggcaggcgcgctctgccttgcattgaggacccgtgggggccgtgctccaggcagagcaccgcaaaagaatgtaatctcagcgagccagatgataggaccatgtgttgtcctcttccttcccaaatcccagccctgctcagactccccccatggggccctaagcgtcacttcctccgggtttcaccttctgcagctaggcctggtgctggcttttcctggactgcggataccatagagctcagagctatgatctcaggatgtgacatttagcagtgtccggaactgccagtgttgtcatgattccgaaggtacctactctgtgtagacaccactgtgccgcacatcctccagagcatgggacacatgaggtcggaggccggtggtgttctttggggggggggggggggcagcagtggattaatagaggtgggcttggggtggagannnnnnnnnnnnnnnnnnnntcatgtgcccagggtgtattctgcatgagtgggtggccacccaagccttgccaggagtgttgatagtcattgtggcagcccagaccatccccacaggtgccctcaggccctctgggggccaatgccacccactggaacctccgtctatcagttaccagttactttctatagctatagctagtcctgagctagccttgacttatagaggagaagacaagagcacaaagtgaaaccacaagcctgtagtaaaaaatagagccagctggcagggtgggagggagggagtgggggaggaggagaaggaagaggagagaatggaaaggagcttggtaaagatacagtaaggggaaggacaccattgtgcctaggagcctatatccaaggcaacagggataagcctgcttaaggccctgtaccttagacccagcaaccgtggagatgtgacctaaagccaggcaacagccacgagatcttatctcaagcagaaataagaaacaagtcctaatagcacaggccagctacttgaaattatcccagctacttcagaggctgaggcagaaggatcccaagttcaagacctgcctgcaaagcctagggagacaccgtctcagtgtgtaaaaagctgcagtgtggttcacagtggttcctgtgaggccccaggtccaccctgagcatccctaaaacacaaagtcaggattgaaaaaccaaactatatttgagccgaaaactataaaatgtggcaaagcagaatcaaatactctttgatgttgcttcttggagatggtgttccgttattaaacagatgggccacacagtgtcatcttaaagtctgtaaattctacagactttgtacagatagcaacaaagttctcccgtaaagtcactccctgcccatgttccctccactcctttccatccttcctccatccccagctccccgccttcctctgtataccacgtggacgttcatatcatgtcccacggtttgagcaccagagagctgacttccaatcccttggtaactcccaggcacagcaagggtaacagggtttgtccagagcagagactggctggctttttctgtgaaggtggtggtgacagtagttacagctcgaaagcattgggggtcaggaggaatggggtgcggctgttgccgtgagcttccactgttgtaaaggcagggcaagtcgaacctttttcctatggcacacagtgttcttgtgagaggtcccccaccccacgccccaccccccgccaaccattccccagtgtaaaaacggctcttcctgtggctgtgtagagacagacaacaggccttctatgtctgtctctggccacccttaatctcggtgaacagtggggacatgagagccttctctgagttctgtgttgtcctaccagaggaccactgtccttgagcatcctgtgcaaattcagaccctctctgcccatgtcactgacacccagccatgacctcctcgccacccagtgccaggatcactcatccttgcacttagggctggatttgcacctctctctctctctttctctccctctccctctccctctccccccccccacctctctctctctctctcctttgttcagtttgtgagctacaacgttggacctttggaccatgacctcagagaagccttccttggctgccctgggtggcccagccactctttccctcctcccatccatgggcctctgtgctcttaccatctctctacaccattgcttgacacatcatagaggtgcattgtgggcacccagaaaatacttgcttaaggacaaagaaactgcaaagatgggtggagtgaggtccccctaccccatctttttgaagttatcatttgagtcactggcgtgaaagtcagagagacccctgaagccctttggcagtgtcctgtcaggtgcccaccaaggatagaggtgtctgcccttcatcaagggcaaaggacagtcgctgatgaaggaaagttctgctctgcgttctgtctcagccagcactgccgcacatccatgcagagcccatccgtgtccacgtgtccacctagcacaggaggcagacccagttgcagccccaaggccttactttttgttttcttggtcttttaaggagacttggtcataggtgcctggctctgtctctggatcagaagataaagctgaaggtggatttgagaggctgtggggggcagggcctgtcattctccatttgtttgctttcagaaatggataagctacaagagtaccatgaaacttcatgttcgctctactctctgtttatacatatgtatgttagtttttgtgaccctctgaggcagaggctctagcacatgagggtgaactccatccctgcctctccccttctcagttacttaagagatctttcttataaaaacagggtgtctttaaagaccatattttgtacagttatcaaaatcaagccatttcattgtgcttgctctgtaagatgctgccagcttgagggaattatatcctgacctggcagctgagtattgcctctcatactcagctgaggtggctgtaaattaggaaggctcctccctcgtttctcagagctgaagcagctgtgacaggcaccagctctgtggttgtcctcttgatctgagttcaaatcccactgcagcctctggcagcccaggccagcgaaaagtccctattttgtaagatttgaggtgtgtgtgtgtgactaaaggcctgggaacgggactgagcgacttggttggttactgagcacggtttggaccttgggtgggtgggtgtttctgagagcctgtttcctccctttgaaataagtatcacagaggacctgaaccagcgaggcaggttctgtagccagaggctgctggcagaaggcagtttaaggtctgtctgtgctgtttcctgggtctggtgctggggcctgatccacctcagcagctcagcggactgattctgaccctccctgcctgtgctgggcagggccactccctcacccttcccccattcctggccacccccaccccaaagtcggtaatgctcaggacccaacatgctggccacagtctgctccgtgagctcactttggtggcctggcggtcagtctgtgggccagcattctccagggacatggcctgtctttcccatgtatcagttagctttccttggctgagaccactacccgagaggtcagctgtggaggaaggacctgtttgcctatagaagctgccgtcagtttagtgggcagcgggtgatgagaggacagggctctgtgctcactgcctggaacatctagtcagaggagggaatgccagggcccagctcatggtctctcctctttgtgtccaggccaggaccccacctgcacgcaggatggggccacccacattcgaggtgggccttcccacctcaattaaacctttctggaaacaccctcacagcacatccaaaggtatctcctaggagattccaaatccagtccattggacaatgaagatgaccatcacaggggagggaaggggggctggtcacaggctcccagtacctgtccccttaggaaaagacactccagactctgggtgggaaggaagatgcggtccctgcagtctttccaatttacctgttgtctccctcctatagctgtgatgctgagggcacccccgcctcccagggtccgcatgagaaggactctcattctccttccctgcagccttgcacctgctctgactctaggaactaaggggtttgtttgtttgtttgtttgtttgtttttggttttttgggggaagtggggatgtgaagccacacataacccctgtccctctcctccctccctccccaccagatcgttaaattattccacaggagccaaagctctgaggctaaattaccaccacgcgtatcatggcaactgtccccatctcagcttctgccacttgtctctgcggccacagcagcaagaaacttgctgaagagaagtcattatctgggaagtggggggccccaggacaagagctctccgccccctcctgcccccacaaactgatcagatcagcaccctgtcaggacaagcagcatgtgtgtgtgtgtgtgtgtgtgtgtgtgtgtgtgtgtgtacatgtgtaacaagtagggaggagaatggggcctttggggtaaccacatagatcgccactcactggtgcctactggctgagtgacattggtgatattcacagccgccatgttctgatgggcaaggggaaggaaggcccagtcttggctgacctgtacctttatctgttgcttgagtgactgagcatgtggccaggctgtggggaccgcagtgctgactgggacagtcacagagctagcacccaggcgggatgtgggtgcctttccagaagtgtggcctgctgggaaggcaaagtttccctgagagtggccttggccttacacctgcaaagacagggctggcaggataccaggtggcctgggacaagaggctctgtcccagatcctgtgactccagagaacctggggccacttgaaagatgttccccatggcactaaatatgactggggctagaggatgagctatctgtctttctgtctgtaggggtttctgctatgacagtcttcatgttgctttttttcaaatacaaatgacttggttttggtgatgctggggctggaccaagagcctctaagtgccaggcaaacactctgccactgagccatgtccccagcccctcactgggggattctaggcaggggctctaccactgggccatgcctccagctcccctgcaaccttgttcctgtatttgttttaagctgtctggtacctggctcttccccaccccacacacacacacacacacactgctgcatagttcaatgaggttcacatggtgggggtggtccaccatctactgccatgcctgccttccacccctgtgcactgtgtgtgttggggagaagggaagcctccccttccttctggtcactgtagagtaaagctggacctgtccactggggacgataccagtttatccctctcatacgcccccccccccagaacagcctcattaaggctcctcaggtgaagctgggaggcagggttgggaggcctaatgaggcttgctgcaaacctccctaattacaggttgactgggtcttccctggcctctcatcaggcctcataagtacctgattaaggaaaacaaatgataccaaggaggaggagacagagacacctgggcttcagggcgggagggaccgtgatcaagccatgcttccgggtggagtagagggtagggtgggcgcggactctgtgagaagccagagtaaagttttcctgttgtggaccccacaatccctgtcacatgcactcagcctcaggcaacataggaatgtccccaggaggtcagatccacagtctgccagccctgaatgaaagagccaaccagctttcccctctttcccggtcatttaaaacaagagccactgtctaggcatagaaggctggctgcttctgctctgccctcctgtgcctcccgaggccctggccacacacacctggttcccagcaggtgcgtcctaacttaacctaaccacagggagagtcaacctctactccctggggtggcggctccttgactgcagctgtcactgctgctgtcccagctagtctgtgtggcctgatgtcctccatgctccagccacaggtgtgcaggtccagtgaggtcactggtgggcgccacacaggtactcagagcctcaggtttcaccccagtcactagggaagcactccagggttctggtcaggttcatgctcatatatgtcataggtcagacctcgtcacgtggcttagctgagacttatctgagaggacttgagacacagggagaacaggtccatagtgtaccatgaaccatagtgtgtgtgtgtgtgtgtgtgtgtgtgtgtgcgtgcgtgcgcgcgggcatttatacatatgtgtacatattcatgtgtgtgcgcatgcattcatacatgtgcgtgcatgtgtgcatacttgggtgcatgtgcacaaggtagtgtgccatagtgtggatgtcagaggatcaccctgagtctattctctcctatctctgagggttctagggattgaactcagcttgtcaggcttgcccggcaaacgctttgcccctctgagccccctaccagccccacagccccagccttcgtgccctgagttggagaagtgaggcaggcaggaggtactgggatatcactgcggtttgtggtccagtttcaaagcataggccggtgggacaagtgccccacccatctcctgcaaagtgggtttctggcctccacgcatcacctgggtactgttcacgggtccagagaacatgcagcctttgcaagatgttttgttttgtgaaatgaaatggcctgcctgagaatcccaggtttgtctcagattcagcagtcttgccttcgcctcccccatgctaggattgtaggctgaggccaccattcccagctagggagagctgtccattcaaccgtttgttcatgagttcattcacacacatctgcttcactgtctgctcactgtgagctgcacacatcacacaggctcttacatttaatggttaacagatagtggtgggaggctcttgtgtagaggcaagggggccccgcctccacctgggccccatcccagttgggccagaccctccgagcctggctcgagtaaccactcttcataggagttgctggcaccacatctggtccacgcagaacttctgtctcataggagctgggatctaaccagagaaaccaagtctagttttaattagcttccaacctgccccatgagggtgtggaaagcttccattatgtccctctgaccacaccctcccctcccccagcccccaacacagacctgccagcagaatctggccatccccagctatggtcgcactgtcagttcttccaaatggaatgggagggggatgtaggctctccggcccctgctcctgtgccgctagcctagcacagctccacattgtgcctctctgtagccatggcctcttcctcaccttgccgcctctgagaaaagtgctgctaacccacctgtgagctgaacactaatggccacaaggccctcacccttctccattgactcccctgagcttcccacactcgatcccacctggccctggttgaattttattttattttattttattttattttttatttgaatcattgcctccttttgccccgtggacccgcccactgggagatggtcctctcttggcctgcttgtctctacccagatcccttggctctcggacactgatggaccacaccgttgccccctccgctttccctgtgggattgaatggagtcctgtgtcagtttgtttggccccaaataaatggtgcagctcacagattcatctcctgctctccccctctctcaaaactcactagctgtcgtgcacgctgttgtttattattgttttctttcccagactttaaaaataacagttgtcccagcctgggcgagttgccctccctgagtgctggcaggcgcgctggcatgaatcagtgctgctcactgctcgccgtctcccttgcccaccatcccccatgcctctctgggaagcctccaaggccttccttccagcctgctctccagacactggctctgtcagtgcctgcagtggcatctctactcctggcctcgggcttggccgtcactagctgcttcctcgggtgctgaaggagcacacgacaggccaaaccctattgctctggaaaagtggtcacctcccagccgccaacctggcatcccccagacttcctaccaaggcttcctcacaaccctgagcagggctgggtgggtttgaggatcctcccagtaccatggggtggggattttagagccttccagtatgatggggtaggatactagagccttccagtgccatgggtggggttctagagccttccaggatgtggggtggggtagagttctggagccttgcagtgtcatggggtgggttctggagccttgcaatgttgtcgtggggtgggttctggggcctttctgctagtgtcagttgtcagaagtgtccagaaggccagagctcctcagtgctgtcctctagagcagtttacttccttcttccacttcctcctttgcctgggagttccccaggatgtggtggtcccagctagatactcaggagctgttcaagagcacagtgtagcaactgtgtctagagtcgggggcaggggactccgtgaggcagagtaggaggtgagagacttcgcagcaagacctcaggtggggtcattgtggcttgccccagaggatcaccctggtcatgatagggtgagagagacacacaaaacagagaagctggggcaagctaagcatatgctcacccagcagtcagcatatgctttctacagaaggtgccaggtgccactgggtctgtccagccatcagcatccaggagacacagcatcagtgaatagcagagagccttcctagagtgcagtcagaacatggaggaagagaattgagctgggggaccaacaaatgccagccccttgcatatgctcacagaggccacccctaggtcatagcctactttgcactctgctcccttggctgcctagtgatcagggttaaaggtcggtctgtgtttgcttagaaagtctccacgtgaatggtaagctgtctggccagggggctccagaggccagcactcctccaggcatgcccagttcagcttgtcactcaaggctcaggaagagaggtttccttagtctcagccttcaggagagactgtcttgtacttcgtccgtcctgtaccctccctgcatgtccctagaatacccaggttatacagtgcagtgcagccaccacctctgtacaacatagctgctcactgccatgttttttccagtgttttaataaagttttatcaacagccagccatgtctgtccactggctgctttccaggtacagggagagccgagtagtcacaacaccatagccagttatgatccgacctttatagaaaatgtgtgtgcaccccaccgtaacagtggctgccaactgtcacttcctaaagccttttggaatctgccactgctaaccctgggcccttgtcaaccactctgggaaaaggaaggagggaagggggggggggagtctgcctgagcgcctgtccctccgtctagagacttggtgctagatgaaggaaggctgccaccctgtgcaactgtgagcgccaggccacagtgacagcacgtggcatccttctctctgccctttatacagtcttccttggcctaaaggttctgcttccctacagcatggggattgggaattcttttcctagagacaatgtcaggaggccatagagacctttgagtcttggggtacatcgctctgtacccttgcagagaaggcagcacccagtagccacacctcagccatgcttcagctccttcttcactgccagttggtggtggtggaagtgacctggctgtctagcattctcagtggggcatcttcccccttgcccaggaagacctgcctttctcctttccccttcctatcttcctggtcaccatccctggtcaggatccagttgccaggaggctctttgcccctaacttggctttagtatagacagtcagtagttctggagaacaactacaaagcagcttcacgcctgcatggttgccgatgatgtgcaactgtcattatgttttgagtgttggagtgcatccctaaagtgactgacagggtgtggcagggtgtgtgaggactgggaggaagggggagaggctgatacaagtccaggcactcaggagaggtgatagaagtctgatagaagactgatggaagtccagatgctctgtggggtgaccagccacagcccactgtgacctgctccaagcaggtgtgagcaggtggggctgtgcatgcattctggggagcaggcctgagcagccatgggtcagtggaaagaatattttctggctcagtgccctggcttcgcctgtgggtcccagcccctgctcacctcatgaccccttcttcccacaccctaccctggctcccagagcctgctttttttttttttttaagatttatttatttattatatgtaagtacactgtagctgtcttcagacacaccagaagagggagtcatatctcattatggatagttgtgagccaccaataaggttgctgggatttgaactctggacctttggaagaacagtcaggtgctcttactcactgagccatctcaccagcccccagagcctgcttctaatgaagaccctgagacagtttagtctgaatggtgcgttcatccttggtgtcataatccgacggattcggatgggagagggtagggcaggtcccacacggccatacacacatctggaacacctggatcgctgaggtttctcgagttggggtggaattaacagtcaaaacaaaacaaaacaaaacaaaacaaatgaaaagcaaaccctgcctggtttcaggcagaaaggaagccctggtctcttcttcattgtcatctcttcctcttcttccttccttcttctcctcctcctcttcttttttttctcactgtctctttaaatgtctgtcttccctttctgtcccttcctgtcttgtggataatgacaacagagggtgttgaactggctctgggcgtccacctctggccactgcatgcttgtaacgatttcattaacctaaattatccactttattttctcgtaatgggattagccgttctccaggcagttgaagaccagagggggagagggcctgtgtgttccattactgcaccgggtggagggcaggactgactgaatgtacaccctgggctagcgagggttccttcctgtccctctcactagaagaggaacctggggtccagatgggctcgtgtggctgagggaaagcagaggtactgggccaccatcatggtgacttgttcacaatgtcttaacattggtgggacccatgccagatgcagacctgcctgtgtcagagtgtcaggagtgactaagcgccatctggctgtctcggcacccagggagcctcacttggtgccagcgcagactcttcactggctgtgggtcgcagtagctacagccctcattgctcagtttttcgtggagatgaactgaacctgagaaacatgacgtcaggtgctgggctggtacgtgattccagacctccctgtgaggcttgggcgcctctcacatcagaatgagaccttctgagtatcaggaccagtcttccccagtctcatctgtgcctgagctgatggaattgaggccctcttgtgcctaccccggcgtcccatgtctgtagcacctgtgtcctgagagatgcccagagtaccagtgattagaacccgaggcctcacacatgctcaggtggtcaggtgctgtatgcccagccttcttaccacttctcaccatgttatgccagctggccttagactcactcagtagcccaggatagcctggaactggaagttcacctcctggttcagcttcccaagtctctgggattgtagggtgtgctaccatgtcctgtgaggtttttaaatttgggcgaagagaaaacagaacagggctttttggctaaatgagcttcagaagccgcatccatttaccctccagacatcccctctgtgtctctgtattaaaggcacagcctgcaccaagacactggccacagactgcttagacacagaggcacctgactttaccttttacacagaacagtgactcggtttgtgcgggggcagcactcagagtgcactccaagtcctctgtggctcaaaacatagctgttggtgccgtccgaggaagcgagcccattctgtgtgggggttacagcatcctttccatgtttctagcatgtgcatgtatgtagtggtcaggttgacttccagagtctccctcagtcactcgctaccttagttttttaagatacagtctctcatttttacgtggggccttctgagggtctggtcagttagtctagggatctgctgctctcctcctccacagggctggggttgcagaaccatcccttcataccagcttttaattgggttctggttcaaagcttaagtcttctttgcctaagagcacccacaagcatccccagtgcctggcgggtgtcccagcagagctcagcctgcacagagaagtacttgacaggtgcgtgtgagacccacaggacagtgagttctgaagcccaaaggcaggtgagggcagctcagtgcgtggataggctacaggtgggtctgtgactggggcagaccctatgtgacctcgtgaagcttagagttgccaagaatccttcttgtctgaacacaagaactgctgtaaggaccaggtgacaggtaggggtgggaaccagtgtcctcagaaaatgggccagcccttcaggattctttgtacaaatcagatcggaactccaacttggaggcagcactggtatccaaggtatctaacgatgccacgttaatacctggtcttgctttattgacatcagtttaatctctgactctggatcgccaggtagcaagggactcacatctcttgacagtctcttggggaatatgggacctgcctgttcagggactgacctggtagcggtggagcactgggccaccggccactcctcactggggacttctagtaaacttgatcccctctgcccacagtcacccgtggaggctcagtcaggccagggcggcctttcagcatcccctcctggagcttctaagctcacctggaactcagctccagcttagattcagagactccgtttaaccactcagacctcgatctctcatctagaaaacgcagaggccgcgcctgcccggcaagggccccatgaaaggctattgagagacgttaaacgctgccctccgctcctctcgcttgctcggaaaccaggccatttttcagccttcaagagacaaaaatgaaagggagtgttggctgatggcgactaggtaaccttttacaccggctctcaccaggccgaagcgccgagtaattggaagggctcagtgtaaaaggcactcttaaagagccagcgaggacaaagaggcagagactccattaaccaaccctgggccatcacttctgcagagcagacccagtactgccattcacacgtgcacatttgcttgcccacgcctggttggctgtgggagtggacgcatcccactaaggtgtcacacctagcccagatcatctttggagggaccacctctttcctggttggcaggaagtagttgagaaggtcattgtgtggaaacagtttcatcaacaagtatgggacaggcccctctctcctgctaccagactcagagagtagaggactcatgggtcaccttacatcaaggacagcatctgaaagagaccaaacgttctgcctgaatgtgagtgcctaagtggacagtgggtgggttgtgctcgacactcagaacacataatgttgatcagcatctagagagaggtgggggtgttcctcagtgctacgcacagctcgctagactcagctgagtgacgggaccccgctgtgtcagagtatgctttctgtctttagctgaggaagggaagacagataagctattcagatggtatcaatcttcatagtggcttagggcagagtgggcaccaggggcaggggcagattttgagctgtgaagatgacagagagggagagttgaatgagtagacacctgggtctggggctttaagtaatgggaccagctgatgctaaggccctggggttggtgcacactcaaagggaaagccactgtgggtccttaacaggtgagaagggacagggaatgattggacaagaaagataaaggtccctcagcactgagagtgtgagtctgagatgccgaatctgttatatgctgtggggtgggtgtggcctttagcttatttgcctcactagagatcagatttggttttcctgcatcccagcaaaagtgggctgtttggatgccctcccttgcccataagccaggcttgctgctaggctctctggctgcccagtgagactttcagccacacgaggactctaagggacagggaagctatcggagcagctgccagcctcacatgggccatgatgggaatggtttgcacatcctcgaattatctgcaccctcccttagagtggcattgtgggagcaagtagcaatgatcagacctctcaggcgtcgagcccttgtttgttgagtgcgaaagaacagccacttttcccacaaggcatggctccactggcttctggctacttggtagtaggcaggttgagccatggacaccgttagccaagctgcaggcctggggaccagacacccatcatgaaccctgtcacctaggtctcctccctctctgtaaagcagaggctacagtgccttgctttcaggagccatgtgagtcccatagtccaggtcttctctcatgccgcagaatgcacgggactgaatgtatcagccgctgcttgcagcgccacaccgtgtgtgtgtgtgtgtgtgtgtgtgtgtgtgtgtgtgtgtgtgtttgtgtgtgtgtgtgtgtgtgtgtgcgtgcgcgcacgcgtatagcatgatagttcgagcggggggccacatttgaagtagtttttcaccgcaagaagatactgcagtttatcctgtcacaataccgcctttcctcttccttgtattgggtggtggcacatgcctccacaatgccttgagggcaggtagggaaaggacctaagaatggatttcccacgtgaacttgaaccagtgtgtaccacatccagcccttggtggggtgcacatgggcccacctcctagcctatttccacggcccaggaccaggctctggctccagagcagttatgtcactcaattcagctgtacagggccctttcccctcccctcccttccttcctctgagcccatctacttggcaagtaatgagtctgggctagggatagtgcctgtatggggaggggacccacagagagaggacacccacctcgcaccagatacgactggcccatgtcataggtgcctcgtcccaccccacacacctgaagaaatcagaaccacccacagcaaactccagttgtcattgaaaacccaccgacctgccaccaatcctggtggtggcagcctggcggaggaggcggggccgtggtgcgggaggcgtaattggtgaacccagggtgaatgaaataattggaaaagtgaggtgtgagtttgttagggaagtgtgagcgggtgggggaggggaggagggctgtgtttaaaagcccgctctggcctctttattcacagcttctgatacagtaattgctattttgtggtttctattatctacacagtggggagcatgtgcagctccgtcccccggcctactgggctggggatgaatccctaggtgccacgtttcctcctccatccctggcccctggtggcccccagccagcctcttcccactgaccgtggccttggctcccaggaggcagggttcacatggaagtcccttcaaaggcctcttttaaaaaccggcctcacagaccaggccagcagataagaaccttcataatggctggtatttatatgtctcttatctccttggaacgaaaggtacttcattgattttattttttcttccctcccccacccttctcttttcctccttaattctctttggctatctctccgccatcctcggcattggcttcccacaaccctgcattgcacaagcacccagggccggtctctggccagccctgtacctgagcacccagggcaggagcctcccctcagaccccagtctgtcaccttcgccctttgccccatgcttttctcatctgtcagccagaggtggtgacagtattgaccccagcgagcattgttacatctgggggtggcaggtctcagagctgagcggtgggtgggggtggggggctcctttgtcgctgaggtgacagtagtagtaatggacaatgacagtgttccgaagcctccagtctacatttctagaagtgtcctcacatactggtaagttcttcctaagctctaactcttaactctcagctgctcctcagcctggctctttaccaggatcacccccctgaagctcctggggtctttaggcacgagttccttggccattcagtctagaagccccaagcctaggttgtggactctcccaaaggcccccagctcccatccccactccagttccatggtggctccagactgtcctggctcccgccaccgcactctgagatgcacatctacagaccacagcagcccggccccttccttccgcctcctcaccagcttctttctccaccttttaattattttccttgcttcctccggcccctcggctgcttaccatgcaccgagcatccacgctcacagcgcgatgtggaggggaggcattaacctcagcagccatccccaaccctgccctcctctccctctctctgtctcccttccctgctccctaccccaacacagccaggcaaaaagaaggtgcacatggtcctctcccttgcccccacaatcctgggtgggtcactaggactagctaccaccttacacacatacacatacaccacttcaccctggatttagccatatttggggaaggaagaagtcccacttctggcttgtctctgtggggaacagggcaggcttgaactaaccatcctgtggccaagcaggggacatcaccctctgctgtttcccacccagaacagggctgctttccctggatggcttgtttgtaaagcagggtggaaagacttgggtggtggactccacagcccctcttcatagtccctgcctcttccggctgtctcctgctgttggtcattctggaagtggttttggcagaacctgtgcagggcagacattgggcgccaggctgcaggcacggcacaagcaagatgagtgggggtcctttcactagaagaattgcactcgcttgcacatacatacacacacacacacacagactgggtggttctagttggttcactatgggcagtggcattgtgacaggcgtactggagatgaggggagtgtggctggagagctggagagcagtgggtgttggcaccctctgctctgtcagacaaccagcctgactgccccatgtcatctatctagccttcctacattagatgccaagccctcagacttgggctcgcaatgtccccacaggtgacctagagaaccagtgaccaatgagccatttctgtggaccaggctgggagcctgcctcagccatccccagctctccctgttcctgtcagcaccacccacgcatagagactggtagagggacccaaggccgtgtgtcgtgggacgtgcaggcctttaggtggcagaataaagcaaggttttgctggctgtttgactggtggctctccaggcttctcatctgacctgctcagactccgacccccctccaaatcagctaagagctccctctcagcaaagagtctggccagactcccctctgcctctttccttcccatcctggggaggctagccttgtcgccagctccattccctgaggcctgcacaggcgtagggatggggggagctgacagggagagctggacgtgccgattcatttttaggcttcataatgctgcgtttacacacagccctgccttcagaaatggggccagcggatgccggctcatgctggcagggctgcaggttaacgccccagatttaacttacatcattgtgtgagggcttatggcctgcactgtgttctttacccaatcggtccttggcctgaagcatcccaaaccacggtgtatggatgcatggaccccgtggccaccagagagtatagattttcaaataaaaataagacctctcttcaaatgcagagcgcattgaatatttatcagtggcagtgtgtgcgtacatatttgataaatggacattacaaagggattggggtgggggcatgcagccaagcgaccctgaggaagctcatttcctttgtcctagagtctttcaaaggttaactcaatggagaggagagggtcaaccccaagggtggtccaggccacaggtccctggttgggttttctgccccaaaacactgcctgcctggcatagcaggtatcaaaggaagctgtagaggacatgcagctcagaaggaggggttgtgtgtcttcagatccctgcacatcggggcatctccagcgcccaggttctaggttaacagcaaagatttcatggattggagtcagtcagcttaggcttggcacgtgcccggtcccggatatggaggcttgcctgggaaaggtcaggggaccccactgaccgtgcacccaagagccttgactcccatagtcatccccttgcactggctggggaaattcctggcctggcacggcctgctcaagacctatccccatggggaaagaacaagtgtcaaggtgtcccccaggtggcaggagcgacaccaaaaatttcccatcagcaccttccatcctgatggtgccctccctcccccaagtggtggccagcagggagaagaaagccacgcctgcagaggagagagggctgggtatgggggagcaggaaggcacatgaacgagccaggcagtggatgttcccgcagctagcaatctctggtaaccgacggggtccagagcccttggtgtccctcaaagcccttaggcccccagcgctcactctctgatgtctgcctttttgtctctagcacctttggggaactgaagacagtgcgcctgccgaagaagatgacagggacaggtgcccaccgcggtttcggctttgtggacttcatcaccaagcaggatgcgaaggtgagcgctacccccagagaagcacagagcccctgaggcggcaagagtgtggctgcctcgtgccttccgctctctccctgacgctgatgatttatccagtctccttggaggcagagcactgggcacggggcttggagggccaggtagtacatgctggtgtgtgcacgtgtctgtcatgaatggtgcaggtatctgcttcattgcctagacatttgtcctttcttctcagctagcagcccttccattgtcacctctcagtggcagaaggaacaatacactgcaaacactagtccttggcagccagagaaacattgtcactgagggtagctaggtccctcctagccttgccctgtacctcgatttccttgtctgtgaaatgggttaacagtagtgctccattcctgctttgtgacagacgatcctatgaggtcagctccctggcacatggcagatgttcaacacaacctgactcccttcattgctataacccagggaccctgtgagccacacctgtgacatcctgtcagcagagcggcagtgcgagacagtgtacgcacggtgtcctgagctctaggcttcccagacgggacagggagggttggggtaccagggccatcactgacagtttcctatccagacccccagacaaggctgccctgggagacatagagcctaactctgcccctgaaaaaggcctgcttaccaaagccagccccagacataggctcaccatctatgaagccagcatggcttcttccccttggggaaaccttggaaaagtgactcacccctcccagtgcctcttgggcctcacggagctgctggagggacaagctgagctggacagacgtgggcccacttctgcattacagtccagtcctcaggccagaggccatgatcctcctaatcccaagccagcccctcagcagtgactcacagaggtggcagcttctccctccatccctttcggttcttggctcctggaaccaagagaaagggcagctgaggacagagagggctctctgcccacagccccggagaccggctgtaccctcagctcccaggtgctatttcaggcctttccatccctgccgtggtgctctgccctgccctccctgccaggactcatgccctttttacccactgtgccagtaagctcatcttgatggaagtgggagtgagctgcgttccatccccacagtgatcccttgctcttgctgtttcttggggcagctccgtctgtctcctccactcccctggatctgtctgcagaaccgggttgtgtcaggagtggcagtatgagttcttttcacctgccgcatatccttgcaccatgcacacagtgtggtcacactctgaacatggagtcattctctagctatggcttggggcttggggttaccctgctgtggaaagattagagcccaaagattagggccctcattttctcccgagcctcctttttgcacttgatattttagagaagagaggcccctttagaaacaccccggcccctcgacggtctctggtcctcttggacactttctcccatcttgaccctgctccatgtagagtagccagtcactgagcacttgcaaccttgtaggctaagaggctacatgtatgtcctgggactgaggcaggaggttgcttgtacagtggaagactgtgaggccagagacccagagagacttatgtctgcccagaggggccagcaacagcccctacttcaccccaccctgctcctggtatcgggctcttggcctggccccatggtataagagtcatggtgtagcctcccacccaggcccactgacccagaacaagtgctcactccccatcctggaatgagcggctcaccctgtacctcacacattctcagggatcctgacccatcagaccccttctgagtcacatgcataacaacgtggggagcaaagccagcaggaggctccataatggccacatggagaacccaggctcccaacaatgatatgcagggcctcccaagagcgccagcatacaagtgacgtgtctactgtaggcacattgcctgtcccagtccagcacaccacgattagtggagatgagcacaaaccctccctctcctgaccttgtccaactgcacagccccagagccctgcctgcctacgggagatggatagacaagcaggtgaattctccctggtattctaggcaggaaacatcagtgctgctggaagtgcctgtgttatcccaacctctacacagaagagggaagccagtgtccgtcagctaggagactgatgtagccgggagtcaggctagcacatatcctacctacctatgaggtcacctgggctgccctgcccgtgtgccatccctggtccggtcactatagcttctctgggggtatctgaattgatcaaccctgtggacttcttttgagtgtcccctgggtgctggtggagaaatggctcaaagacttggcttagcattatacagccaggcttctccctcccatcgggcattggtttaccaaagtgctgaccctcctctaaccaaacccgcccctcacacccattcccgctatccagctgtagcaccttaccccagaaaagggctccctcggtagaaacacacacagaggccaaaaggtcccatcaagacagttctggggagcagctcttctggacccccccccccaaaaaaacagctgccttcactgctgagtgccctccagcacaccccagcacacaatgctgctctcctgtcaagacagtcaagagggggagcagcccctctgagcctcccaaaaaccagctgccttcttcagtgctgagcgccctccagtgtaccctgcgcactctatgccactctctcacctggatgggcagtggggagtcctaggcagatggatttgatgccccccccattggctaggaagtgtccaataggcactgggtttccattcaggccccaccttcgtctccctacctagcctacactggccctgaagaaagggggaaagggccaccaggaagaaagaagtagggaggagcagagagacgcccggaaaccagaatattaattgttccccacatgaggtgccttcaattctccctcctgagccacgcacgcttctttatacttttgtggttgcagctgttttagccaccgacactgttgttttaaaaggcctattttcacatagaatgttatccaattagcagagcaatgtgttggcttaaataaacactcggggggagccggcagccagagatgcgatggcggctggcgttggcaggcagagctctgctgtgataaacaaccacagctttaattgtagggtcgcaggcatctccttcctctttcccacttcaccatggcgggtggacacccagggagcgagtgacaggatgcacaagcctgagctcacactggctggagatggcggtgtggcgcagagggctcaagtgagatttgggttgtaggactggtgaagaggggcaggacagagcttctcccacctcctgcctccctcactggtacccggcacccctgctccgtgctgaatggtagcctgcagcacgtgatccgtcggatgatcagtagcacatgtgtaacacgcatccccatgatggtgtgcagggaagagtctcgaggtatcagtacagtggggtccatggggatgcccctcaaggaaacaccccttttccaaccaggcagagggcctgaatggtaggtaggttcagagtggtcaatgacatcagagctgccttcctcttcttcatgtgtgcccctgagcccaggtgactctgccccacagcagaagctggtaacactgtccttggggagtggcagggcttgaaagaacagatggcatggtgcatgtgctggggacagggaggcagctgagtcccccgggccctgaaggttccctgctgcatggaaacttgcatccgttagttgttccgtgtctgccagaatgctgccaggagctagcccaggagttggggtttcacctgtacttttctgtttgggtgttcattcatgtcgtgtgcacgcttaccccggaatttgaatggtgctactttgccaggcttctgtcaccacagcccagagatagaaattctagctaagcttacatctcaaggtagggactcaggctcagccagcacatgtaggctaagagcgtaagcaggattaggtgcagcccagtttaccaccaaggcataagcaagatcacactgagctgttctgccaactgctactcggctctccagaccatggggaccgaggcctgccaggcacctcgcagactagagcaaaagaccttgctttcagatctgtcaggcacagcgtgagtcagaggaaggtggaaacccagccatgacgcttgcacgggccgaagtgcagctgctgccctcctccggcacaggcagtccctcaagctcacactgagttgggaaagtgaaacttagagaagtctgtcaggtcaccaggcagtgcagggaccgcctgtcgccttccctgggcacctgactcctgccctctgaggtgcttcaggcctgcagaggcaggagtagagcccttccctactccactctgctgtagcacctggcatttgggtcagcgcagtgtactcggaggttaaactgactggcttgagctgatgggatgactggggtgcatctgtctgtctcagagagtcagggcacagtctacaaatgggcttgtggccctttgtcttggaaggttgcctctgcttcccagtatctgtagtggtttaaataagaacagtccctatgggctcatcttatatttgaatgcttacaccagggagtggacctgtttgaaaggattagaaggattaggtgtttcctagttggagaaagtgtgtcactgggagtggactttgaggtttcagaagcccatgccaggctgcatgcatgtccacgtgtgtgtggggcagggggtgcgtgtgcgtgcagatcattatgtggctctcagctacatgctccgcaccatgatgataatggactgtaactgtaagccagccctcaatgacatgctttcttttataagcgttgccatggtcgtggtgttggttcaccacaatagaccagtgactaagaaagtgccactcctcagaatggaccctggtgccattcactgtggaagtccatgatatgcaaagagctaggacagtcctacctgtgaggaagaggcatctgggcaggctggaagccactaactagcaaagtgtgctgacccgacttaggccatgaggaggccatgtgaaacacccttccctagaagtcactacccagtgtttcttccaaacccggtaggacctggctcctctgtcccctgtgctcagttcagggcactggcatgcatgcacatggccatccttggccacccttgtcactgtccccttcaagtgtggggcacagatgttgaaggcaagttggtggtgtcattggatgtcttttgtatctacggccctctggctctgccaggaataagcagggagcaggaggacagggccaggaggctgcagacttctaaagtcaggtccattcttggcgctgcagacagctggggatcagccagtcctctgtaaccacatgggactgaagtcctgccaagggcacacaatggttttggttgctgggagaaatgttgtcttcagggaaagtgcacaaaggttagacccagcactcctctggcagcattccagaccttccatggtcttccaagatggccaccaggtccagcatctttgagccctgtactgatctcccccacccccctccacccccgtccgagtggactggcttccaggtggaatcagggtgaggaggcaggaggctatggtcttgaacctgagagctgaggcttcagtcacaggaaatcaaagccagagaccgtgatggtggtaacctggacctggggtagatgctcccctgggataggagtcacctgagacagacccctaccagtgtaagttgggatccagcaagggtagggagacccacagtgtttcaagtaagtagatccaagggactcaccatgaatagcgacatctctgggatccgatggtgagaaaatgtctgcaccctcaggatagactctaggaagaagggtgtggcccatgctgttgtcttgaggttgggatgggaaggagttcccacccatctcccacaccccaccaatcctcctctgtacaccccctttgtagaaacagggagaccatactggctgtggccctaaggggaggccccctgtagaggatggagctgagggtagctggctgtggctaccaggaggtggcagtccagcttttctttgtcattctctgtgtcaacctgagtcgctccaattgtcctctgggctatgggcttcccagcaggccagggtaaaagctggtgcatctcctgtgccagtaggtgggcagctgtgtccattcagaggggacctaaagccatgggtgctagatgtaaagccagaccaagtccaggtcactatccagtgtgaaatgaccccagcagtgaccgagtccaagttaccatcaggtgtgcagcagccccagctgtgatagctgtgtccttgtgttctgaaactcaggcttgaaaggctatttaggcagcgtcacaccgaccagcatggagatgtgttcctccagaccctcggcaaaggaagactctgctttactgagtagttactgagagcagcgtgctggctaagggagggaccgagtgacaatgagttgccgatgggtgctagaacccacaccaggtgtgccaggcccgggtggcagggcctttgcaggctaggccaagtttcagtgctcgagaagatgaagcacacagtgtcccttgttgtcccttgttgaagtgagagggagaccagtgagtcactcttcagtggataagcaggctggggtcttgtggttggagacctgtccaacctggaggctccctaggccacaccaagaagactgttagccgtagaatgacacatcccagaggatgctaactcccccaggctgtttgagcaaaggcaacttccctgagcgtggcaaggtggcacctatgggggctgggtatgcagaagaagctgctggtggctgacattttccctgctgaggcatctagaatcttccatacttctcggatctgcccctgcccctgccctagctcaaaatcccctccaaagggggccatccctccctcctcattccatcgctaaggtgcctcaggcagacaggtgcacgccatctctcctttcagcatgtgtactgctttccccaaggctggctctaacctccgggcactgtaccaccccgcgggggaaagctttgaggataccacactgcagctcagggaattaggcacacagagcatggcctgtgtctctcagtcctcagcagtcagagctgggaagggctctgctatttttgtagaaccccatattgtgttttagaaaaaaaaaaaataataagagcatttgcaggcggccgccgccgccgtttccactcttggttcctgcagactgaggagtggcttatgacgatgtaccagacagcattgccgcagggcagtgctctgagctaggagtagatggcttcctgagtgtccccacctccatctttgctgctccttctaaaatttgattcagcctaggttcagagactttaagcagcctggcctgcatcacacagctggaacgtgatggaataggggattgaactgaggtaaactggctgcagaactgcagcccccatacccctccgagtatggaaagcccttccaatgaggggctactaaagtgccaaagggatatagagagagggagagcaggggagaggctattaggaactcctgcagggaacagaaacatcaccaggccttctgaggcagtagaacatagattgaaaaacaaacaaacaaaccatgagaaaggaaaccaaggctgagaggtctcgcctgggcctccctgccaagatctcttcctgctttgtaagtgagggtggagcagccaccagatgcagccatggctgtcccagactgccgtgtccccaggatgcagctcctcagggaccctcatcagactccccaccagttcctttcttggtcttgaggcacccggctcccccgagtcccaccatctccctgcctctcccccccccccccacccccgacagctgagcactcgcgcttctgagctcagaatgagccatttcggctcgggggccagatgcatttttatatctgcctggaaaaaaaaaaatggtaggggctctgccggcagtcaagagaggcttctaaattaaactttaaaaaaaaaaaaaaagtgtgtgtgggggggtggggctgcacctggcccttctcaagcagtgcagagaagaacaaaacgtggaagccttccctccattggccaagtgactatttaccacttcccctcccacctaccccagcatccccaagcctcctgcccttccagattctatttgtcttgaatggactctgggcgggctgccttcattgcttgctgtaagtcccaaagaccgagctagggtagtgaccagcccaaggtcctggccttacttctctcgcacatcctgcagcttacagagcagaagtacacaacctggagttacagggccccaaaccaagatagcgcgggataatatgtgaccggtgcctccctcccagatgctgtccccaggcggtgatgcttggtggtgtgcagcacaatgctgccctgtctgacaccagtccttctgtgctagggccaccttactccagtgttaacctggttacttcaactattgtttccaagcacagtcatctcccaaggtgttcaaggtcagaacccaccatatcttcttgggaacacattctaaccatagcagtcacctcatgggcaagggtcagtggccgtttcagccttcaatgagtgagtgcttctaggcatcaacacaatgagaaaggcaggctcccctcctggtcccatgtcaccctcctccagctgtcagcctgggtgctctgcagcctccaggggcccccaagagcatcctctatatacctagcgctctgtggagagaaggaggctgctaagggaattcgtctgagagcacaggagatgtaggtagacatgccgtgtgcccacacaggagatgtaggtggacatgccgtgtgcccacacaggagatgtaggtggacatgccgtgtgcccacacaggagatgtaggtagacatgccatgtgccccacactgagtcaccttagatcctcttcagggtcctaaatctggctgcatcgacccttccacttcaaaatgctgagctcagaagatccccttaacctgcctaagaccttgagaaaaaggaagcacagggtctaccttgccccagatatgttggttctagagttgagagacttcttagccaccgaagtcctgtgttcgtgtcatgggatgtctccagaagagttggaagagactgtcccttcacaaggccactgagcctcagtcagccatgtttactgagggctttgatcagtgctgtgtagtgatcagatgaatgcccatggctggtacatccataaaagcaggaagtaggtttgaagtgtgtgtgaactgggagaagaattgggggacttgccaggtaacagccaaatgtgtctctctcttgaggtggtgatggaatgttctagaatcatatgctgatggctgcatgtgaatacattgactgtataattatatctcaatttagtgttgaaaagcctggtttgggggggggggcggagggagcttggcagagcaaggaggaagagcgtattcaaggcctggggtgctgagctgggcacggaagcccctagtggaaaggacaggggggccaggaaggagacattgggaacaaacaggacagacagagggcaggcaccaagttaccatgagggagtgtgcatgcatcctctggtgacttgacagctgggtgagaggcttgtggggtcaccctccacagacaacagataagatgccacccggggaaacaggtgacccgcctggcccagtgtattggctgctcagttgtttgcagctccttcatgtcaaacatagctcactagtgaagtaagtgtgccagcagcaccctgaagcattgccagacaccccaagtcacaagggggttggggaggggggctgtgtgcaacacccgcagctccttcacagctcactcgctgctctttcctgccccctcctccagaaagccttcaatgcgctgtgtcatagcactcacttgtacggccgcaggctggttctggaatgggcagactcagaggtgaccgtgcagaccctacggaggaagacggccaggcacttccaaggtaggagtggctgactcggggcttctggggttaagagctgggatggggaccacctggatcgctgccctcacttgggtgcagcctcctgccacttcaagccaccttggattaggacagccatgtgcatggcagcttaccttgtccactgcaggtaggtaaggcaatgaggccaggcaagcaacaagggcaaggcagttgtcttttctgttcatattatagtctctgattcaggttccaaaacatgatacctcaagcccaggggtgctggaaatgtgtcctgcgggctggccctaggaaccatagggtcaccaagttccagtattgccattcttggggacccaagctctgtgctcccagctgactcagcaaggtgacactggcctaaagatggttgtcctactccggagtccagctgtcctcatgtgtgggacaccatagtgactgagcagggctgtgggcatggatgaagtggtagccacttcccttcgtgggtagcccaggctgagggtccccaaaattgagaacaaagaggcccattgtgcctgtggctgagagatggagggagtcagggagagctagagaggtctgtggggttgggatcactgagccttgtctctaattgggtgtgcacccctcacaaggatgtcaagacttgaactggaagcccatcttccttaagtaccttcacagtggtccccagaaagcggaacaaggcagctaccattgagccacccagctgggaactggtcccctcctcccatctgctggcaaacaggttctggctggggctgggacagccctgtctgtagtcagtggtgctgtcacctcaagaggcaggcagtcttcctaccctgtcatccttgcactggggcccccgcaggaattctagctctgggctcagagagaccaccctcgtcccatgaaggtgtttgctgtaagctatctgtctacaaagctggcctcaggagccaggggcagtggaggaccatagggtgcattgtcctggagggttaagagcagtccagcaatactggccttggccctccatcggtcttcccagagccacgccacctgcccgccatacttcttactaaggtcactgtcctctaccagctgaggaggaccccgagccctcttatgtgctgctccagatcagattagcaccttcttctctgcgtgtgcttgtgctgtgagacatggatgccctgtttaaagggctgatgctgcttccatgcaattggtcccctgccctgctctggacctgccctccgggcattggtcactgcatctgctcctctgtgcctgtccctgtactttcttggttttgttgttgttgttgctgccgctgctgtttggtagctggctggttagttcgttggttggttggttggttggttggttggttggttggttggttttggtttttttggttttttttttaagtcttcttatggcttgtcattctggccaggcccagccaccccacccccacgcgtggcaaatgtagtgtgctgcttgcttgtacctggcgtgatctattcctatcgggtgcccctatttagctcatctccgggtgatgccaggctttctatccagggctaggagctttccagcccaaacaaatgcaaagcaagagaagcaggagatggtacacactcggtggtgggctcacaaacagctcaataagatcccgagtcctgatgggcagacagaacctgtctccatcgacaggcatcgacagccccaaatgcacccgtcggcaaatgtttgtggaaggcactctcccgaggcggggcccaccccccctgtggtcgccccaccacccagcccaggcctctaagactgtgggctcagcacttctgctctgtgtggacagaggacccttcaataaattgagttccaaagactgcatcatctcctcccaggcgcaaggatacagcagaagccagcccttgatgtgtccgcgccgtctctgtctctgtggccgctcacagccacaggaccccactaggggtgtggtaatgagactggggaagataactaaccctgtgtctgcctctccagccaccccaagatggccatgggtactgagcatggctgtagcacctgccagacgtggccctgcaggtaccctggcaggtacaaggctccaggtaggcagatgtcccagagacagtgtgcaccccatcctctaccccatcctgcccgtgtgcacagcagctgaagtcctaaaaacagggctgtgggcccctgatgcctgcctgggcctcctttctcctctgcccttttccctgccgagaaaagtactagctcatttgtgtcggagtctgcattgttctgagcctccagggccctggcagaacccaagggtaagtgggacttgtgcccagccccggcatgggccctgaacattgccaggaaggtactcagacctcaggtggacgcctggaaactctggccccacaaggctgcctgcctatgggctgcagttccatgcctctcccacagcccgctactgacatgggaggcttggtggagacatgccgttcctgggtccaaggagacagctgaactgtgtattcttgctgtcagagcctctcctctcctgtcaggccttgccaggactcagggagacagatacggtcattgacacatttagcagatcagaaagggctcagagagggcaagaagcttattaaggggtgtccagccacccatgacacagctggaactcaaacctaagcttttagtcattctcttgactgagtctttgcatgggctgatctggtaggcacccttacgttgattccgtgtgtgtgtgtgtgtatgtgtgtgtgtgtgtgtgtgtgtgtctgtctgtctgtctgtctgtctgtctgtctgctgtctgtctgtctgtctgtcctattatctgctccatggccctggtgagtctcagcctcagctttgccatccttacagtgaacccagggtgtcatcaccttgagggcctgtggctccagggaggtaacacccagcttctggccactcagctagtggactgaagagtatgtaactgggcagaggaaagggagagcctgatgctgctgagtctccagccagggcacagggcctggcacacaggaggagggccccaggctagcccacttcaggcttttcacttactggtgtctaaaggagctttgctttaagccccacccccttgtctgtcccatgcagcatccctgatgctatctgcagtccctgggcaatggcaggacatcacagtgtccctccctagctggtgcttgggacccacctggcaagaccacagtataggccaggccacaggaagaagtcaccctgagtcagtagagacgttactgccagacaggtgccggagggagggagggagggaggctgctgtcccctctagtccattccccctctcnnnnnnnnnnnnnnnnnnnnttcctggactatcccagtctggtcctcttcccctgttcccctccctccaactctccctcccccttgctctctgcctgcccccctccccggtcaggaatcagatatttggtctccagcccccagccctgtagtaggtgaagtggttttcttctctgcctggcgtgtggggtgtgaaaagagtgctcaggaggggaagaaagaagaaagtctgcctctagctgtgtccctttcttcccgaacatgttacaaaccagcagggtcgcagcattgcgaagctttcagggcctggcaggccacagtaccccagcacagagacagagtaaaatggccagaagcgatccaccgcccaaccggtcttaagcactcacaggcagggaggcccggcacacggctttcatttagccaggaacgtggctaggcttccctctgttgtcttattccagctggggaggcctgatgggctgtggttagtggctgcaactttcacctccagagtaggggctcaagcatgagcagcatagcaagtggccgcagatccgccgtccctccacccgccttacccctgcccaccaggcctggggacgccagccagagcaacatagacagagagcacacacagcaagagcccttggcacagacaggaagagttctggccagacagccactggcctggcactctgagccaccttcctagcctcacaaggtagggatggagcactaaccagacacctgtgccatcagcccaccacctcacctccaggcctgcagcattcttctctgtgttacacacacatacacacacacacacacacacacacacacacacacacacacaccctttcccctactagcttaaccctccaggggacacagccaccctccttgtctcctaacttatctcgtatcaagaataaagctggcttcataactgtccacagagcagatgagtgagccccgttagaacaagtgatagacgtggctgatgttagctggacatctagcatattctgagtcctgtgcagttctgattgcagccaccttcacattaggtacgggtgccgaggctcagcacagccaggctattaccccagcccagacttatttaggacaggccctgtttggagcctgatatttttaccttgttcctcaaagccctgtccttctgcagagatgcagcctcgtaaagtcttactaaagatgagctcagcctcagggaagccagagaaagctctgtcaagggcctttgtgcagcagcaacacttagcacttttacatacagtttagaagcctggtggcaccttagcctagcacactcggagagagacaggtcccatgttacaggaccagacagacccagagtcagctgttggctttcctaggaacacacagctctgggcgggcccttgtagaacagataccccttttcctcctgccctacgttgtctacagttcctgagtcctgggcggcgtgcacagacgtagcagcctcagtgtaagctttcctgggagaaggcatgtggctttgtctctccctcctccttttccttgtggatgtggtgtttgtataagagaggggcaagtttcacagcgtataaggatcaaagttctgttggcggcaggtttcctgaagaaaattagaatagatgctacaacataccccaagggaaggtggtgcatctaatatggcaactagaacaagccttcccaggaagtcagcttttctgtgtgattgcaagggaccagccagccaaagacctacaggagaaacagtacaaacccaggtgcccaccaatgcaaaggccatggggcagaagtgtgtttactactggagctccagcatggagagtagaaaccaaacaggagaagccagcaggggtctggccatcggtgacaggaagcctgactttgctcatgttgccctgggaagccctggaagactaaatcaaaggccagcatcaactaacctcgtgagtctacattgttgttgttgctgcgtggggatagctctggaaccaggcccagggatcacactggggtcatccaaagatggtggccaggaccacagccaaaggctgcagggcggaaagcagccaggagactggctgtgttgggagcgggtcgagctggccagggtggcatagagaaggcaggcgagaagcaagggtggggcccagctgctgcgcaagccctggaagccaaaaacaggtgcggagtggggagtctgaccaagctgggtctgagatatcccaggatgccccagggatattagcaaatagatggatgagttcagagctccgggcgaaggctgagctgcgatataaatttgaagttatcagcatacagatgatatttaaagcctgccagcgtttcccacacacccccaccccacacctccatcatcgacaagatggcacgcttttgaaagaccagggaccacaagagcccgttatcccccatcagcccctgcaaatgggcctccttgatctgagccgtgaagacataatcatcaggctttcaaaatcataggcagaaagttcaagcaagtatgtgaagtcacagaatttattattcaaaacatcccctggcctgcctccttccaactccctggagatgggggttttgtgtaagctctacatttcagcccttcatctgggcacctctcactcttcccaagacctggttgtgtcagtccttcctctggataccccagactgtcactctaggtcccaggaggacacggggtatacaagagggctttgatcctgactcctggttgcatcaatggctcctgcctcgagaggtcaggatacttatcactccctcccctggttgccacagctggtaacaggaattgaggctcacaaagtggaactctgtgggcccaggcagcttctagccaaggtgcaggtggacggggtcctgtgtcagggcctctagacagcaacctcatctcccagtgaaagtatactgggagcctgcaggtccttggggcctgctggggcaggtgtggcccagccacgccccctgcttccctctaaccgcccccccacaaccacacacacacctgagcctcccactcttaagagatgtgacaataccctgtacattgtgcctccctcccctgggagcgactgtccgtgcgaggaagggacctgctcccaatcccactaaattgttattgacttgtgttctgtgcgttctgcaaacatttcactcagccgtcgccggcaagcccacgaatccctgctagggctaacggggaagccagctgtgccgggccatctcgcctgctccttctcatcgatcacagaattaaactgacagaagtaccgcagggcagtgtgggaggggcagggcctggccaccatcctgggcggggcccacagacccagagggtacaggctggccagcatacctgacatgcagcctggcccaaccaggggaagccagggaacagcttcagtggcggcctcaagtgcctgtgataggcaacaagaagcacgcagaccagcagccaccagctgagccatcggtgtcttgcctgcaacatgttgaacacaaaacagtattggattcatcactgtttggccactggaagatctgacctggaaatcagtttcaaggcattcataggaaatcagatccggccaccctggtcccacaccccacacagaagcctgtagagccactgtgcatttatgagatgtgtgtttcctgttgcccagtccacggcacacggccctcccaatgctgggactcctgcttactccacagccacgtgtctctgtgtcatctcagcttggacccaggaggaagaaaagatcataatgaaaatgagcctccaggctaagcagggctgcaggagcctgtgggagcctccactctcccaagactgcacagggttcccagccctggtagcccacactcacataggccaaggacagaagaccccaggtcagtgtgggccccttccctatcttgggttaagcccaccgtgatcgaggttggggttccacatgcacagggccaatccagttatctggacctccaggcaggaagatgcccaggatggacatcttggagagaagttagcctgtggccactttacaacctcccaccatttaggtcccttcctcactgggcagaatcacagtggagaatgtgtctgtgagaagcaaaccccactcactgcctaccttacttgaataagatccacatccctgccctttgaggtgggtctgttgggcttactgttgtgtgaatactgtcctgtgactcactctgcttctgcttctgttgccgagactgagggtagagctgtcactttccactgcaaggcaagtgtcagtgggacacttggctatgatgtgaggaaaaggcccccagagtgagctcagcaccatgtagagagccagtctgtacccacagggcttccccacagctcagggctcatgtacccaacttgtgggattccccacaggcacttagagacctgaccctgcctgtgtcccagctcagccacggcagctcagccccttctgctgggtgctggccgtcagagtcacttgatggtacatttaacacttcttgtctatcttggccggtgccttctggcaactgagtgttcacccttgtgctagccaaagtcctgaaggccctgtggcttgtcacttcctgcatttctaaacaggatctcgccattgtccaggctggctgctcaccaccaggctcagaccatcttcctgtgccagcctccctggtcctggggtaccaggcatggccagcacatgcaacttgtgcttagacgcttcgtcttcattcgggaactgagcccaaacagggaaagcaactggcttgcatgcagcctccatccagagtggcagggtctgctgcaggcctgctggcttccccttctgggccgcctctgtctcgcctgcctcttcacggagcccttccagcgtcctttctccctgtcagccctgctctcctccccagcctccctctcctcccatgaagcctttctcctgtcttcccacagtcccccgcctgcccgcccgtgccttccatgcaggcgacattgccagccagggaagggaaaaaaagatgcgggctggcattctgtcaaggaattaattgaaaaataaaaccattaggtgggaactggagaaatgcagaagtgggtgtttggaggttggggggagggggcaggactggggggctgttgggggccggccgagctttttgttgagttcatttctcggtattgatgtttggtgacagtcacttgttgtttatctccaggagcagctgcgctgtggaaggaaaatgcgcggcttgttccgtttatttatttcacaccttccctgggttctgctttgtgtttgtttggtgaaggcccacggaggcctccgacatggggaagcggggtttccacagctgttcctgccaggcggagccggcactccatgtggaggcaggccagtgggggtggggggctgggtggcagcagtgaagacgagaaatgggggtgagtggcccaacccccatccctggctgtagacttgaacctgacccatcagtaaggtgcacccaccccatccttacggccaccccaggaggtggcagagagcaggggtgacatgctcagggtgacttggctggtgatggcagatgggcactacagaaagcagctgttcagaaagtgcatgaagacttgggctaaggaaccctactctgagcaaagacaggctggtgctgtgagcacaggctgaaggcagtggctaccatgaagcagtccccaaggcttcctccctgaggactgttagcagggcagtgttcagaggtcctggccaagagtcagttggctcctggctggggtcccaggcaggtgttgcccaggtctctgtgatgagagagaagtgtgtgtgtgtgtgtgtgtgtgtgtgtgtgtgtgtgtgtgtgtgtgtgtgtgcacgcgcgcacatgcgtgcgcgagtttgtgtagcaaggtattcatggaaaccattcatggcttcatacattcttctctctgctccttttgccatagcctgatccctttgagcccggttgtaccctggccctcttcagtcagtctatcagtctctcagtagacatttactgagggctgcttgtattaagacagttctgggcattggagcacaggggcaggcatgataggcatccctgccttccagcaagagacaaacagcagcaaagccaaaaggtcttaggggtactgtggggcacccagggatgcttcaccacaggcatgaggcccctgagcagcccagtagagcattctagataggccacagcagtgcaaaggccctgaggtgagaggaatgggtacaggatagggaaggggccggctcctgtggactggttgccaacaatatgacagtttggcttcccccaggaacagggcaaagttctgcaggagagggagttgggctctagagttggcttgacagggtctctctgtgctggaaggaccatcataatggcagaaggggtctgctctgaaacagcaaggacacctgagggacacctgccccctgcagcttctccccagccagtctgtcctggatcaccacccaagcagcagcgggaggggcaccagataaatccagcgggggtggggggccccgctttgttgttgtctatttccagccctattacctgcccacgatccaatttcctgaggccattgtgcatcgggcatgaggcacggagtgaagagaggacaccgcagggagtcgggagtcgggctgcttcctcccctttccacagtcagccatgatgggcagagccgccagacctcagctctcagccagtgcccccacctcccttgtctccaggcagcgctgctgcagctctgttcatgcctctcccacccaggggtctcataggagccccagccagggacacggtcccaaacagaagagcttggtgcatggtgggagaggggaggctcaggctgtgccaaggaagtgtggggaactggggcaaaacagaccagggtgtgacctctgccagcctgggggtgactcagaaagcagcatgcagctacagagggctgcctgtgggctcgggtctcagggggcagccacagctaaagtgtggaagcacctaggaaaggccaagctaacggagagggggtgagagcagctgggccacggaccgccatcgagggcagggtccatatccttataaatatgggaggcatgagatgagagggattcctgacccaccccggaaagagccaaggtcatccatgcctgagccgggcactctgcccacattgtgctatctactgccttgtagtcactcgagataaagggtcaggtgtctgcattcagagggcttcctagaaggagttaagagtgtcctgaaggcagggattcgggtgagcagcctctttatgaaataggccttcactggtgaatggatggttagaccagcagtagaactggtgagaagagcaacccagagccagcctgccaggtttcttgtctgtggggttgttgaggacaccagtgctttagcatacagtaggtactcaaatcagtggcatttgaaacagctgtgtgtctaaatgccccccttccctccccccctgcacttgtgccttcttcttagaaaactcctctgcactcatcaaagcccagatcaaatagcccctttcctccaaagctatcatctttgctaaggtccccggacccctctggattccttggccactgcagctgtgcacctaacattgagtccacggccggcatagaaatgaagctggcttctgcttcagcccagctgttgccttggttcactaggcctctggcgggcagggaggaggcaaccctcaggtgggccgctggctccctcaagtaggtcctttgctctgtggcaagggtgggaggcaggtgagcggcatccatgggaggctggactgcccagagccgtgtttgttctcttcccgggctcatcccccgtttgctcgctccttgcgctcaccccacacacctctgcctcccccactcactgctgaaccctctcggggtcttttctcctctctgccatctgccacagaacccccgaagaaaaagcggtctgcagtgttggatgggatcctggagcagctggaagatgaggacaacagtgacggcgagcaggctctccagctgtgagctggcactgccagggtgcatggctccagggccccggggctggatagtgcgatacaggaagtctccatgggtcaggaccaaaggagtcaaaagctcgcggcaagtatgggatgtgagaacaactttgctgcagactctgcaccagtgctgagcagctgctgacctggcacctgcttgtgagatggttccatgaggagctcaggcctggcatcctcctgtggcatggctggccagactctgggatgagtgacagggtgcacagccactgtagagctcagccctggccagccaggctcctgcagccctgtctccccctcaacaggactgctggccagtagacagagctggggactctacctcatcatcggggccccttccttgtccctgtgatgcagccaggttctgagccctgctgtcaggttcacaggctgaactgcgccagcaccactgacggactctacagctcaagcggaggccctgggagtcgcacggaggcctcacccgcaccagaggcttcaaaggcgagtctttggctgggtaccctagcacagcctctctccatggactcggacacaccgtcaaccagaggaggacatggcactagtcagggaggaaggccagagcccttcaaccactgtccagccccagcactacctctcaagcaagaagcttaagacctgtgtcattttgagtggctgttcagtgcaggtgactggcatggctgcctcggccagccatgccaacttcactcatccaaccaggaagacgtggggagacactactaccacctcagagctgttgtcaccgagggctgaagaggcaccagacaggactctgagcaccaggctttccaactttatgtgagagtcttggcctatgaactttttgccttccagatttgcctggatcccacaccaggttcccaaagatggggccacgccctctcaggggtgctgagaactaagcaataaacggcagagcctagaattgcccctccctctaccctgatgtcactctgtcactctgatgacaccctgcaccatggtgatgcacagaggggtggagatgatgcttgccacacacccgtactggaccatggggatcgctgtgggtcattagaaaccgacccactcactcagggtgcacccacccatcatcacacctcagccaggatggcccagggcagaaagttgtagtctgatgccagcgtagactccccagagcaggctccacacctgtgccacttggcatgggacccaagacctgtgctccaccaggttggcctctaaaccctagagcccagcaggtgacttctgagtcccccagcctcctgagcacaggtccccagtacccatgccagctaggcaaggtcactgtgcactcgtaatctcagatcttatggggacaaacaggtccttggatggatggatgggtgggtggatggatggatggatggatggatggatggatggatggatggacggacggacggacggacggacagtgagcttagccaatcagggaactccggcttgaggaagagaagtgaatcaaaaaaaaaaaaaaaaaggcagagagcaactgaggacacagtgaacctgtcttccccttgtacctctttctgaccttccccccactccatcacacacacacacaatagagcgtgtgggtggccagtgcccagcacagctgggggccttagaagttgtgggtgaaacatcacaagacaggacaggagcctgagtccagcaagggcctggaggaggtagtttttggcctgcagcccagggcaggagacttcactcatcatcacccaccccatggttccccacacaggtaggctctggtggctggggtgtaaacacctgcatgcggttctgccttaggtcttcgagtcctgagagcccagctgggactcccgggccagctgagaaaggtacatccaggaaacagagtggcgtctgagccagcagggagatttgagatggagcctgcctcgtcctgcctgccactggctcacagcaaaggctagttgccatgagccttgagctcgggtcctcacatgagcaccctgactggaagggcgccagcatcttgtcactctccagtaagggacagccctatcaggacaggcaccctgttgcaggtggaggacatagagtcagcaagatctgaccctcgttcacaaactccttcatcaatcccaggctgcacccagccctgaggacaaaccagagtacctctgtgggtatctcccttgagacaaggcattccttgctggataaactccagaggctatcctgggccttgagatgcacacatggggtgctaaaaagatgactcagcagttaagagactgtaccactcttccagaggacccaggttcagttcccagcagctactggggtgagccacactcaagattactcattaaccccagctccagaggacccagcacccccttctggcttctacaagcaattgcactcatctggcacatgaaaagagacagatacacatcaataaaaataagaattttctaattttagaaaatgctcacatcaggtgcaagccagcccccctccccccatgtgtnnnnnnnnnnnnnnnnnnnnnnnnnnnnnncccccctccccccatgtgtcccctcgcctcggtaacccccccccactcccaccccccagtcccgcaccctccccacagtctgcaaccacagccaccgctcaggaccaggacggcaggggcaggatcagctggggctggcgcactcaggcttcgcccgaacagagccgagctcaggctcaacatctaattcaatttgttctgctgagattgaaatatgaaatggttgccagtcaaaaacgttcaaaggatggagaaggagggagagatggtgcctgccggaatttaaattttaatgaaaatgactttaacccttccggtaagggtctggaggaaatggaactggccctctggtccccggaatgaagcctccaggactctgcaccttccctctcactctgcttcactggggatggctagaggttttcccttgcagagttgcttcttaaagctgggaccgcccctacctccttgtaacatgcttgcccctgctgcagggagtgagagcacctttgtctgccccacccccacactcctccccttctggacacatgacccccatcagagcttgtgagtctctccttgtttgcatttactttaggtaggtaggactgcgcagcccaggctcgtcctgcacttctggactccagcgaccccaggctccaggcacagggccctgtgcccactcctaatcctgtcgcagcaggttatttggggtcatacccatcctaacagtagagcagtgtcttgcactggcaggtcccaggacttggtgtttaaaatggagaggagagtcagtctctctctcccccccgcccccatacacacacacacacacacatatataccagtttctgtctcagtgcatcctaaagatgggtggcattccccccagtaccaacgctgcacagagggttggcaccagctctatctggcaaagggcacaagagggcttccggaccatcatccagacagagccccgaaacagaaagcatggacccaaggcacggggaggacatgaggagtccacactgacttcattattcaattcatgaagtcattccccaggcggttgccacaaacagatccatggcttttccaggctctccagaatactaacaaggggtcattgagacagctcattggctaaaacgtgattgctaagaagcctgacagcccgagttcgattcctgagccccacatggaaggaggagagaacaaacccccacacgttgtcctctgaccttcacacatgctgtggcattcacacgtgaccacaccaagtaagtgtgaaaaactttatatatttaaacatttatatatcaaattatattttaatacctatttatatactaaatatgtatatttaaagtttttcacatttattttgtgtatgtatatatatgtaacactgctgtgccagctaagatcatatatcatctacatagattgctacggcggtaggtctgagtctcagctccgtcacatgcagcctggatgacatggggctgacttccctgggcctcagtgtccttccaggacagacacaccgactggtggcaagccatcttagttatggctttgatttaactgcaattaagccccgtgaccaaagacaacttgggaggagggcgtctactaacttacactttcaagtcactgttcattactgaaggaagtcaggacaggagctcaagcagggcaggaagcaggagctgatgcagaggccttggaggggtgctgcttactggcttactccttatggcttgctcagcctgctttctcatagaacccaggaccaccagctcaaggatagccccgcccacccacaatggtctgggccctccccccacaaatccctattaaggaaatgccctgcaggctcacctacagccagctattatggaggcattttctcaattggagctccctcccctcagatgactctaactgtgtcgcgatgacctgaaattatccagcacagatgcttaagtcagtacatgccaagagctgggaaaggccccaacacgcttactgtaaactctctcctgtggtcatcccatcccccagtgcaaagagtgttctcatcctccactcccagcaggctcccccacttccaagatgccctggaagccagagtgttcgagcacaagccctaggctggggttgtctctgtgagtgacagaggggacctacatgttcgccggacacccaagatgccttcaacctccagcgtccttaataaaccctacttcttaattgtgcccatcctgacagtgatccactgaagccagactgcttctgccctgggcaagagccaacaccaaacgcatccatgcttgcagatccgcacaggggcagctcctgccttctcctgggagctgtggagagtcctccctttccacgattccaggtgatatcaccaccacccaccctggacacctgcagttcacagagtggtttcctggaatcataggcagggattgccatacaaaggggaaactgaggctggagaaatgagccaagctgctcacaatgagtattccaggaaggtgcaagaggaaggcaggtgccccctcctctcagatcccacctcatggttgactaatgactgagcctctctctcccttttgccttgaggaaggaaaaaaaagtcttggtgctcatgtgaccctaccatccacagacagcagagagaagacacctgttcctgttaggatacctcagactgtgcccccgagagggggatggtctagagcagtgaatatcaatctgtgggtcaggacccctctggcagacctgtgtctccaaaaatatttacattttgattcctaacagtagcaaaatcacagttacaaagtagcaacaaaagtaatttcatggggggggggggggcagcacaacataaggagctgtattaaagggtctcagtactaagaaggttgagaaccactggtctagagaggcaggatccagagcccccccacccccaccccaagaaaaaaaaaaacacttctgctcccattacgagcatttttgggtaatggaacctaaaatgcaagcttcataactcagcgctcagtgaaagagaatcttgtagagtcaggggcctccagctgtattgtttttgagagtgtgcaccggggaaggtgtgttctggcccctggccttgggggccttcagtacaatgaaggcaagtctccagagtgactggaaaggtgagcatgtctggtgctgctcacaggagactgtgtcgtcatacagtccgaaggatgctaccagtgcggtagaggaagaactcctgccctgcccctcaggcacagcctggagtcctcatgtggctcctacactgttcttttgaccaggacatggtaacctggagaaccatggtaactgcctccttctgggagccatcaagagtcctcccttcccacgactccaggtgatatcaccaccacccaccgtggactcctgagaagcaatctatgtagttatgtaatcctgggaaacaatctatgccagctagttaactgtctcatcactgtgaccaaacacctagcaggtgcaacttgggggaaggaggttttcttttggaccacggtttgagggtgcagtccatcattttagggaatggctgccaggtgtgacagccagtgtgggaacccgatgctgctcggtcacatcttgagatggccaagaagcagggccacactggacccaaagttcctcccagccccagtgatccacttcctcccagaaggctccttttctagaaggttctccagcctccccaaacagtgtcacctgctggggatcaggcggtcaaacagtcagtgagagggactgcgcccacagctgtgggtatggaggagggaagatgtggaaattggggtcacaatctcccacacatattacttttagggtgttctgcctgcatgtatgcctgcaggccagaagagggcaccagatctcattacagatggttgtgagccaccacgtgtttgctgggaattgaactcaggactctggaagagcagccagtgctcttaacctctgagccacctccccagccacctctcccacacatttttaatgcatcttccacccatgtccctttctgagcactaccctagaaccagacccactctgtggctcttctgctctccccaccccttcccctgtctatgcagcctgtccgcctttcacatctggatgccatttccctggagcagtcctcactggccacctgagtcttggcccctactacctcacctgacccctctccacaccatagcctggagactccatcacctggctctaagcccttttaaggacaaatatggtgggttcttgccccctgctatgtcaggaaggccccactgcatcctcctcgcacccaggcagatttgttttttcttaccagtctgaggtttgccctgcccagcccagcaaggtgttggccaggcaagtgacttgtctcccagctttagggggaggagcactactagggattcagtgatactcctcaaacccttagggtctgggtgaactttccagataactccctccattggaagggcctatattctgtcttccctcagaagttaggaaagggagccaccatccctgctgggggggaggggtcaacaaatgcaggtgctccccccactgcgagcacattcctccccaaggcagttgcaggttgctagtggtgcccatccccagttgagaaggtactcagggaccccaccagccagatccagttcatcttattcccctagagttgtccttttagacctgaatcccccagggaaaactttgaatctaggaagcttcgtctgggacatggcctcatttctctgcgttctggtttctttgcaattccccaggcctggcagccgccctcacttcagaacctgaatcagagacagaggccccactttgcctgtctccctgatgctgcggcctcgtttctgggggacccttggaggaaggagctagcatctttcttgtgctcccagcaggccgagtctgaaaagcagtctcaactctgctgcctctgtcctgctaggctagccctctgccccatgtctgctggctcccgctgtatgcaaaaggtggcagatgctagagcaggaggccataggcattgatcaaccctgacccctgacccaccccccacccccagtgttttatttgattctgatccaagcatctcagctcctggaacaaaagtcatcctctctccacacccaaaagtccccaccctcagggtgagaggttaaacaccaccttttgaacccaaagcataggctgggaacctcacacagcctagatcctgtccagcaggtccccagacctgcctcagcttcctcgagtgaagactgggagaagaccactccttccagatggttccaaggacccaaaggatatgaatcaagccaggaccaagggaaacgtagcagccagacattctgcagtttggctgatcactgcccagtgctaggcagtggacagtaagccaaggaaaagagagtccaggtccccatgtcctcctcccaagggacagagtgacaaatgatacctatcgacctgtgcccgtacagcggggcatgcatgagtagtgggggaggatggctcagtggttggtgattctgcatcccagctccagatccccaatcaaagaatgatggagatcctgtatggggtgagaggcacaaggcaccttcaaagcagggagagaggggcaaagatgggaggccatggccaccctgtcctcttggttcttctggctggaaactctgctactgccccctaggtctttgccactgccgaaatagtgcgctgtcagccaggggctgctcccaaggcaccactgtccccatctgaggaccatggcaatgtttcagggctgcacacatcccctgtcatcctggaggccggaagcagtcacgtggcagctggctgaggcctcagatgtgtcggctcatgaatatcaatcaggccgggtaattcacagaaagaggagcccagattggctaataagcaacggtttcaccccaaaccgggcctggggaagcagcgggcaggtgtgggcatgatgtgactggaattggaaagccagagagtaaagctgtaggcagcgaggtagggggctcgccaagcaacttgaggagtggggaggcccctcacaggcagcaggctcagagccacagcttagagcatctataggtagagatgtgaagaactcagtctatgcactgggggaaggggcggtggcctttcaggatgcatagggcccatacccctagcatccagctgacatcagtcatggggagacccctcaggtcacctctgccctaactgagaggcaagaccactctctccaaggctcctggccacagttatgacgcccagttgcatccctgagaaagaggtgagctgtctgtataggctgctcccgcagactggaccttcaccaagcagagggagggcaaggctgagggagagtgcccaggtccctgcggattgagggttacccactctctgtgactccggagccccaggttctcaccagaaccaggaccctgggaaactcagggatctgactcaccagaggtttagccctgttgcttacaaagctctggccccaggaaagttacaaggtcatctcattctgcagtttctattgatgttagtgggggtaagaaacaactcccccaccccccggaacctaccgggtgagcttaatggggtaagtcaccaagttatgtgtctcacacaagacaccaactttgagccaagtcccaatgtgtagggcaggctccaggcactaagatgagacactgtgggccctggatgacgtcaccatccttcacctctcccactattgataaggcttgtccacagccttaagtgacgtcatcaccagtgcctccatacaggttaagttatttcataacaccccacaagtcaggcaccccctgcacatgtcttaccctcagctccagtgagaaattcagaaaccagagagactaggtttactcaagaccacacagctggcaagagagcccaggccagaagcaggctgagtagctgcctgttccactatagactccccccgcccccacgacagcctctgtccaacatccctgagacccaggaatgccaccctgcctatttgtgtaggcggtgccaaggttgtgggagctggaacctttcctccctgtgcacacagggaagggtactgggctgctaggcagaaactgatgaagaatcttacaccccctgggtgcagtctatgttggcggccctggttctcagtgctgggacaagagctgtctccagcaacaccacgtatgtccaacttgagttctcccagaggatgtgcggaaccaaagcaagctccaaaaaaactggaggggggaacactttttgatgagactgcacatgttctgccaactctgagatgcagtatagaggagacagaacacaaagtccctgtcatattcctgggggagcaggggtggagagatggatttactgaaagggaaagtattgttctgggttgggagccaccctgcaggatggagcagggggaagtcactgcccggtaggacttcttccctcagggctatgtgatggactcaccgctatagaatagtggtgatgctgaccttaccaggtcctgtgagtacagacaaagatgaaggtgatcgggagcccccagaaatacagcaggcgctcaataaaggggaccccagggcccagctggccaccacagcttgcttttaccagcacttgcaatgagcctgtggcctcaacaccttgggaatttggtgaggacatcaagcacctgcccctagtctgaagtttctagtccccctctcaccgctctgtctgtctgtccatccaccgaggctagcagctgcagagccactgctcggggatgggggtggggtgcccagccgctgccacccgtgaaaccccacggtttctcattttccccttgagtggtttctcagcccggctggacccgaagcagaggctgggatggagacccaggcatggggaggggatgatcaagctctctctctctctttctctctctctctttctctctctctctctttctctctctcttccccccctctctctctgctgcccctcccccagacaaatggctgaatactcagggagggttctgagagaggaatttacaggggctcaacctgactcatccccggaggaaggatgaagctgtgtcttcatacagaagaatgcagagcctgctggggaagggccacagctcacaatgaaggcacaggctgaaattgtgggctcttgttcaaagcatttgagttcgttttcctaaact

SEQ ID NO: 1717 - DNA, 3810 bp, Mus musculus
tcgctaaaaatggcggcgcccagtgtggcggcgtgaaagttgtgggaagtcgctgtcgccggggtcgtgagtctgaaaagcgaagggaacctgagagccatgtcgcgtctgatcgtgaagaacctcccgaatgggatgaaggaggagcgattccggcagctgtttgccgcctttggcacactgaccgactgcagcctcaagttcaccaaagacggcaagttccgaaagttcggcttcataggtttcaagtcggaggaggaggcccaggcagcactgaaccatttccaccggagctttattgacacgacccggatcaccgtcgaattctgcaagtcctttggagacccatcgaagccccgagcttggagcaagcatgcccagaagtcaagtcagcccaagcagccgtcgcaagactccgttccctcagacactaaaaaggacaagaagaaaaaagggcccagtgacctggagaagctgaaggaagatgccaagttccaggagttcctgtcaattcatcagaagaggacccaagtggccacgtgggcaaacgacgctttggaggccaagctcccaaaagcaaaaaccaaggcatcaagtgactatctgaacttcgactccgactccaactctgactctgggcaggagagtgaggaggagccagccagagaggaccctgaagaggaacaaggcctgcagccaaaggcagctgtgcagaaggagctgtcagacatggactacttgaaatccaagatggtgcgggctgaggtgtcctctgaggatgaggacgaagaggacagtgaagacgaggcggtgaactgtgaagaagggagtgaggaagaggaagaggagggctcccctgcctccccagccaagcaaggaggtgtagagaagccagtcagccagaaggaacccactaccccctacaccgtgaagctccggggagccccgttcaatgtcactgagaaaaacgtcattgaattcctagctcctctgaagccagtggccatccgaatagtgagaaatgctcacgggaacaagacagggtatgtcttcgtggacctcagcagtgaagaagaagtaaagaaggctctgaagtgcaaccgtgactacatgggtggacgctatatcgaggtgttcagggaaaagcaggctcccaccgcccgtggtcccccaaagagcaccacgccctggcaaggccgaacgctcggggagaatgaggaggaggaagacctggccgactctgggaggctcttcgtacggaacctgtcctacaccagctctgaggaggacctggagaagcttttctcggcctacggtcccctgtcagagctccactaccccattgacagcctgaccaagaagccgaagggctttgccttcgtcaccttcatgttccctgagcacgccgtgaaggcctatgctgaggtggacgggcaggtattccagggcaggatgctccatgtcctaccttctaccatcaagaaagaagccagccaggaggccaacgccccagggtcctcttataagaagaagaaggaagccatggacaaagccaacagttccagctcgcacaactggaacacgctgtttatgggaccaaatgccgtggctgacgccattgcacagaagtacaacgccaccaagagccaagtgtttgaccatgagaccaggggcagcgtggccgtgcgtgtggctctgggggagacccagctggtccaggaggtccgaagcttccttattgacaatggggtctgcctggactctttcagccaggctgcagcggagcgaagtaagactgtgatcctggctaagaacctcccggcaggtactctggcggctgagatccaggagaccttcagccgcttcggcagcctgggtcgcgtgctcctgcctgaaggtggcatcacggccatcgtagagttcctagagccgctggaggcccgcaaggctttcaggcacctggcctattctaagttccaccatgtccccctgtacctggagtgggctccaattggtgtctttggcgcagccccccagaagaaagattcccagcatgagcagcctgcagagaaagccgaggtggagcaggagactgggccgggtcctggttcacgtaagggaccagtagtggctgctctagaaggcagcctggtgacaggggcctgtcttttgcaggtgttttccaaagtgggagctataaagagctgcaccatctccaagaagaagaataaagcagtgctcctctcaatggggtttgggtttgtggaatacaagaagccagaacaggcccagaaagccctcaagcagctccagggtcacactgtggacggccataagctggaagtacggatctctgaacgggccactaagcctgccttgacatcaactcggaagaagcaggtccccaagaagcagacgacctccaagatcctggtgcggaatatccccttccaggccaaccagagggagatccgggagcttttcagcacctttggggaactgaagacagtgcgcctgccgaagaagatgacagggacaggtgcccaccgcggtttcggctttgtggacttcatcaccaagcaggatgcgaagaaagccttcaatgcgctgtgtcatagcactcacttgtacggccgcaggctggttctggaatgggcagactcagaggtgaccgtgcagaccctacggaggaagacggccaggcacttccaagaacccccgaagaaaaagcggtctgcagtgttggatgggatcctggagcagctggaagatgaggacaacagtgacggcgagcaggctctccagctgtgagctggcactgccagggtgcatggctccagggccccggggctggatagtgcgatacaggaagtctccatgggtcaggaccaaaggagtcaaaagctcgcggcaagtatgggatgtgagaacaactttgctgcagactctgcaccagtgctgagcagctgctgacctggcacctgcttgtgagatggttccatgaggagctcaggcctggcatcctcctgtggcatggctggccagactctgggatgagtgacagggtgcacagccactgtagagctcagccctggccagccaggctcctgcagccctgtctccccctcaacaggactgctggccagtagacagagctggggactctacctcatcatcggggccccttccttgtccctgtgatgcagccaggttctgagccctgctgtcaggttcacaggctgaactgcgccagcaccactgacggactctacagctcaagcggaggccctgggagtcgcacggaggcctcacccgcaccagaggcttcaaaggcgagtctttggctgggtaccctagcacagcctctctccatggactcggacacaccgtcaaccagaggaggacatggcactagtcagggaggaaggccagagcccttcaaccactgtccagccccagcactacctctcaagcaagaagcttaagacctgtgtcattttgagtggctgttcagtgcaggtgactggcatggctgcctcggccagccatgccaacttcactcatccaaccaggaagacgtggggagacactactaccacctcagagctgttgtcaccgagggctgaagaggcaccagacaggactctgagcaccaggctttccaactttatgtgagagtcttggcctatgaactttttgccttccagatttgcctggatcccacaccaggttcccaaagatggggccacgccctctcaggggtgctgagaactaagcaataaacggcagagcctagaattgcccctccct

SEQ ID NO: 1718 - protein, 914 aa, Mus musculus
KLWEVAVAGVVSLKSEGNLRAMSRLIVKNLPNGMKEERFRQLFAAFGTLTDCSLKFTKDGKFRKFGFIGFKSEEEAQAALNHFHRSFIDTTRITVEFCKSFGDPSKPRAWSKHAQKSSQPKQPSQDSVPSDTKKDKKKKGPSDLEKLKEDAKFQEFLSIHQKRTQVATWANDALEAKLPKAKTKASSDYLNFDSDSNSDSGQESEEEPAREDPEEEQGLQPKAAVQKELSDMDYLKSKMVRAEVSSEDEDEEDSEDEAVNCEEGSEEEEEEGSPDAKQGGVEKPVSQKEPTTPYTVKLRGAPFNVTEKNVIEFLAPLKPVAIRIVRNAHGNKTGYVFVDLSSEEEVKKALKCNRDYMGGRYIEVFREKQAPTRPPKSTTPWQGRTLGENEEEEDLADSGRLFVRNLSYTSSEEDLEKLFSAYGPLSELHYPIDSLTKKPKGFAFVTFMFPEHAVKAYAEVDGQVFQGRMLHVLPSTIKKEASQEANAPGSSYKKKKEAMDKANSSSSHNWNTLFMGPNAVADAIAQKYNATKSQVFDHETRGSVAVRVGETQLVQEVRSFLIDNGVCLDSFSQAAAERSKTVILAKNLPAGTLAAEIQETFSRFGSLGRVLLPEGGITAIVEFLEPLEARKAFRHLAYSKFHHVPLYLEWAPIGVFGAAPQKKDSQHEQPAEKAEVEQETGPGPGSRKGPVVAALEGSLVTGACLLQVFSKVGAIKSCTISKKKNKAVLLSMGFGFVEYKKPEQAQKALKQLQGHTVDGHKLEVRISATKPALTSTRKKQVPKKQTTSKILVRNIPFQANQREIRELFSTFGELKTVRLPKKMTGTGAHRGFGFVDFITKQDAKKAFNALCHSTHLYGRRLVLEWADSEVTVQTLRRKTARHFQEPPKKKRSAVLDGIQLEDEDNSDGEQALQL

SEQ ID NO: 1719 - DNA, 169843 bp, Homo sapiens
  misc_feature (1)...(169843): n = A, C, G or T/U
cacaagtagctgggactacaggtgcacaccgccacacttggctaattttccattttttgtagagatgggatcttgccatgttgccccggctggtctcctgggcccaagcaatcctcccgccttggcatcccagagagctaggattacaagctgtgagccaccatgcccagccttgagggacaagtattatcataaatgatttgaaattctcaatttatctatcctccattttattttctattacttatttatgtcactggacttatgaatatttattttatactttgggttataatccaatactactttatttatttatttatttattttgagacggagtttcgctctgtcgctcaggctagagtacagtggtgcgatctcggctcactgcaacctccacctcccaggttcaagcaattctcctgccttagcctcccgagtagctgggattacaggcgcccgctaccatgcctggctaatttttatatttttagtagagacggtgtttcaccatgttggccaggctgctctcaaactcccgacttcaggtgattggcccgtctcggcctcccaaagggctgggattacaggcttgagccacagtgcccggccatattatttattttgttactcaaaatattccagccttggacactggaagccctttcagttggctcttgtgtcccattagggaaaaaattttgttttgagctcgttcttactttttggcattacaagatactccaggttcaccttgtgtattccctgccccagccctagaaatagccattactccaaatagccctggtcctttttattaaagaatggatttgaaatcgaggcttgagcattgcttcattcttttcttaacatctacatgatattttatccattgtctcatcggttctctgttgatgggtatttcggctgttgcccatccttggtgattgcaaacaatgtgcaataaatattaatgtgtccgcatagctatatgatacatttctacaagtcctccccagtgcctctgaaccatgcccagaagggacagaaggattggggcaagagagcaacagctttctccctattacccctcaccctgaacaaagctgaattctcagttcctgtgcacattttcacctcttgaaactgttgtcctcaccctgcccatctcatgccaagcagggaaagtttccttctcctttctctcccaacccccaaccctcacccaaaatctctcttgcattgcagctatggttacccatcgactcaattcctcaaggtttggtcaataaagggtcagaaaacaattcaaaccaaaggtcttgcctcagagggtctggttgggcacagggttgggtgccagggacacccagtgcataaatcagagcaatctctgctttcatggataatgctgctactgggggagaccaacaaacaggcacataaaaagtaagaaatgccaggtcataataacacgatgaaaaaatggactaggccaggctcacacctgtaatcccaccactttgggaggccgaggcgggtggatcacgaggtcaagagatcgagaccaccctggccaaaatggtgaaaccccatctctgctaaaaatataaaaattagccggtgtggtggcatgcgcctgtagtctcagctactcaggaggccaggacaggagaatcgctcgaaccctggaggcggaggttgcagtgagccaagatcgtgccactgaactccagcctggcaacagagctagacactctgtctcaaaaaaaaaagaaagaaaagaaagaaagaaagaaagaaagaaagaaagaaagaaagaaagaaagaaagaaagaaagaaagaaagagaaagaagaaagaaagaaagaaagaaagaaagaaagaaagaaagaaagaaagaaagaaagaaagaaagaaaaagaaaacagaaaaaaatggactatgggggatgagagggatggggtagaatggaatggttggtgccctttcagagatggtggccagggaaggcttttctgggaagatgaactttgatcagacacctgggggaagtgacagaggggacccatggagggggaaaggtgctctaggcagagaacatggcagattgcaaaggtctcggggcagaatcctgcaggagggggttgaggatgagcagggaggctagaagggatgaagcaaagtcagaggctgaggtgacgccttcttctttgggtcaggccctgggggcactgggaggcttaggcagagaaggcactggtcagtctggcttttgttttaacaagaccgtagaagtaaaagacagaacaaggggaccaatgagggggctgctggaataacatgggcaagatgataggtttggtgggctgaataacgtccaccagtggtgtctacgtcctaatcccgggaacctgtaagtacatcgccttctacagcaaagggactttttcagttgataaattaaggattttgaggtgaggagatgaccctggattatccaggtgagcccagtgtagtgacaaaggtgcagcaggagggtcagagtgaagaggagatgtgaccacagcccagagggtcaaagagagaactttgaggatggagggaggagccgcgagctaagggaaacaggttctcccctgcagcctccagagggaagcagccctgccaccgcccccctaccccgccaccctcggctttagcgtttctgctgtccagactgcagatcataaatgtgtgtggttttaagccactaaatttggggttgttacagcagctacaggaaatgaatacaatatgggcttggactagcctgatagcggtggagacggaaaagatgatgtgtttggcaaatctttaaaaaatggggttggcagaacttgatgatgggttagacataggctgatgagtgaggggtgggctgaggatgacccctaggtttctagccacagcatctgggtgcccattggtcccactcatggggaccaactgacataggaaggaaatcaagtttgctttcctctcctgtctccattctcttctagaaccttctagaatccctccccaataactggcctttctccagctgagaagttaattccctcagggaccaggcactacttctctcacgtcctcaagtacgtacacttatgctttttgttttgttttgtttttgaggtaggatctccctctgttgcccaggctggagtgtggtggcacaattatagctcactgctgcctcaacttcctgggctcaggtgatcctcccacttcagcttcccaagtagctgggtctacaggcgtgcgccaccacactttactaatttttgtacttttttgtagacaggatctcactatgttgcccaggctggtcttgaattcctgggctcaagggatcctcctatctcagcctcccaaagaagtacgctgatgaagcccagggatggagctggcttagacgggactgaattttttaaacatctaggtataattggagagcccaacctggtggcatctaggtgcccctggattagttctgatgggagaaaaaaggaggcaggagacaaaacaggaaggctggagagcaggaagactaataataatgttataatgtggctgcttattaaatgcacgggaatatatggcctgagaatggtctctcctccccacatgtggcaaccatattttctggacccagaattgggatgtggggattcgtaactggcattccattttcttttaatacctttgaaagaccttctgatttgtgaatttttttagggcaggctacattgaattgtatgttttaataaaggcagttcatgaaaataataaaagtatgtgaaactaggactggctgggcaacattggccctcttgtaaaactaatatctcagagctgcctcataaagcctgccccagcccaccctaacgagggtcacggtttagagcaaacaaccccccagttgtcatttaattcatatcacatatcaataaatatctgttaaatatcacagtgtgcaggaaacaaccctccagttattatttaattaaagacataacaataaatatctgttgactttgaaacacagtgacccgtaagtcatcgactccaggcttgagggtacatttttacatgcatatgtgttttaattgaatagacagtctacacaagacagagagagggtgaaatctgatcttcagagtagactactacaaagcaagcagatctcatgggtcgaacagcagcccccaaaagatatgcctacatcctaatcctcaaaacctgtgaatgtgactctttttggaaaaagggtctatgcagatataatcacctatggatctcaagatgagattgacctggagttacagtgggtcctaagcttaatggcaggtgtcctgctaagaggaagcatagggaggtggatttgactcagacaccagagtggagaaggtcatgtgaaaacagaggcagagacggacgctatgcagccacaagccaaggaatacctaccgccaccagaaactggaggagacaaaaaaggatccttccactttgagcctttggagagaccactgcgctgctgacaccttgattttaaattcctggcctccagaactgcaagagaatacacttctgttgtttgaagccatccagtttctggtaatttgatatagaagccctagaaaatcaatacaccccataatcctgtaacttaaaactatagctcatggggtggcttcctggttttgtaaataaagttttattggaacacggccacagatgttagctctggatgtgttcaaaatacagtagcaggatgcagaagttgcattagagaccacatagtgaaatactctctgactttttaagaaaaagtttgccaatctctgatttaaaacatatacagaccgggcatggtggcgtgcacctgtgatcccagcactttgggaggccaaagcgagaggatcacttgagcccagaaatttgagaccagcctgggcaacaaagccagaccctgtctctacaaaaaatttaaaaattagctgggtgtggtaatgcatgcatgtagtcccacccacttcggaggctgaggaaggaggatcacttgtgctcaggagatcaaggcagcagtaaggcctgatcacaccacagcactccagtctgggcaacagagcaagaccttgtctcaaaaaaaaaaaaaaaaaaaaaaaaaaggccagacacagtcactcatgcctgtaatccaagcactttgggaggccaaggcaggtggatcacttgaggtctggaatttgagaccagcctggccaacacagtgaaacccatctgtaataaaaatacaaacaattagccaggcacggtggtgtgcacctataatcccagttaccgtctcaaaaaaaaaaaaagacaaaacccaaaataaatacataaagatttactgggctccctacaatttcacccctccaaagccatcctgcagaaatgcccacaattaatatacatgcttgttgactttaccctatggttaagtataaatatatgcagatgtagtttatacatgattaacattttaatgtattaaaaataataggtaattttttcataatgaaatatcaaaattataaaaggttactcaaggtaaaggacatttccatccatccgtatactcacttcctcggtcccctccccagaagcaactgctgttaccacttcctcatgtatcttttgagatcgcctttgcttacataaatcatatatagtgtcccctccaaattcctatgttggagtcttaacttttcatacctcacaaagtgatgttatttggaaatagagtgtttacagaggtaactatattaaaatgaggtcattagaattagctttaatccaatgtcttttaaaatggggaagtttgaacatgaactcatggacacagggagactgtcatgtggagatgaaggctgagatcggggtgacatgtctacaggccaaagagtgtcaaagattgccagcacaccaccagaagtgagacagggaggaacagattcaacctcacggctctcagaaggaaccggcgctgccaacaccttcatctcgaacttctagccttcagaactgcaagacaatacatttggaaatttacgactaccctggcctacaaacatgacaagtatctatgtatcctcacccatctccctcctttttttgtgtgtgtgttttgtttttacctaagtgaaagcatacataatacattatttagtatattgctggttttcacttaacaatatattttggagattgtcccatgtcccatgtgctagttcttctctaacagcccatctcccattccctgagcctgctcctccactttgctctgtgccccagatgcaatctgtgtgcactgcaacatctgtgatcatgcctccagcttcccattggttcggccaaggggaggctccagtaggaaactgcagttgggaagagaaagaggggacagtgtatttatccccgacacacacacacctgtggttccacagtggctgtatctctctatagctctagtccttaaagtacgtccctcttccatggctcctggcatcactgaagctcaggaatgacatgtcctactctgcccttcagccccaggggtggtgatagctccccactgttgccaggccctggggtttggccatcctttgttggttcccttaacccttcctgtattcatttgctgcaggtgctgtctcaaattaccacaaattagatggcataacaatgcaaagttattctctcacatttctggaggccagaatcccccaaagcaccagcagggccatgctccctccaaaacctccaagggagaacgcttccttgcttctttcagcttctggtggctccaggtcttcgttgacttgtgactgcatcactccagactctacctccacctacacatgacgttctctgtgtgtcctttaaaaggacatgtgtcattggatttagggtctaccaggataattcaggatgatctcattttgagacccttaagtacatttgcaaagacccttgatatggtttggctgtgtccccaccaaatctcatcttgaattgtagctcccataatccccacgtgtcctgggagggacccagtgggagataattgaattatgggggtggtttccccatactgttttcgtggtagtgaataagtctcacgagatctgatggttttataaggggaaagcctttcacttggttctcattctctctttgcctgccaccaggtaagacatcccttgctcttccaccatgattgtgaggcctccccagccatgtggaactgtgagtccattaaatctctttcctttataaattacccagtctcaggtatgtcttcattagcagcgtgagaacaaactaatacaacacttttttgcaaataaagtcacatttacagcttccaggggtcaggatgcccccagtgtgtgtggtggtgaggggacaggggatcattcatcccactacactgcccacccttctgtaaatagctttttgtccagatttgcttttgttaaatccttttgagtatacctctgtgtcctgctgactgatgcatttccttcaaaaacatttatagctacatacctaccgttttttaacaactgcatagaattctgttgaatggacagaccttaatttacaattagcatttaatgaactcctattacctgtctcctcctggtgcccagtgtgatgctttgcaaagatggatctaaggatgcccctatggcaacataatgtagaaagaacaagtggcctcatctataactctgaacctacactgtgcgctcctcaccagcgagttctgtaggtttatgctgtggcagatgcatgagctccctgcatttggggctcagtaggaaagaggcatattcgaggatgccatgtttgagctggtcttagagaggggatgggaatgggttcagaaagatattccagtggccaaaagcacatgaaagatgctgtttcattagttatcggggaaatgcaaatcaaaacattgagtcaccactgtacacccactagagtggctatgattataaagacccaataacaaacactggaggagatgtggagatatttgaaccttcatataccgctggtaggaatataaaatggggaagccactttggataacaggttagcaggttctaaaaaggttaagcatagagttaccatatgatcaggcaatcctactcctaggaatatatccaagagaaataagaacatatgcccacacaggaacttacaggtaaatgttcacggcaagattattcacagtagccacaaagcggaaacaacccaaatgtccatcatcaactgatgaataaataaaatgtaatacatccatatatgtaatactattcagcaaaaaaagtgtggtggctcacgtctgtaatcccagcactttgaaagttcaaggcaggtggattgcttgagcccaggagttcaagaccagcctgggcaacatgttgaaacctcgcctctaccaaaaaattaccaaaaaaaaaaattagccaggcatggtggcatgtgcctgtagtcccagctgctcaggaggctgaggtgggaggatggcttgagcctgggaggcggaggttgcagtgagctgagattgtgccactgcactccagtcggggtgacagagcccgaccctgtctcaaataaataaacagataaataaagtgctgattcatgctgcaacatggaagaactttgaaaacattatgctaagtgaaagaagtcaattacaaaagactacatattgtattattccatttacatgaaatgtccataacagacaaatccatagagacggaaagtagattagtggttatcagagggaagggagagggaggaattggaaggttatagctaaagggtgtggtgtttctttgggggtaatgaaaatgtcctagcattgattgtggtgatggctgcacacctctgtaaatatagtcagcaccattgaattgtgcactttaagtgggtgaattgcatggtttgtgataaagctgttaacaataagaaggggggacggaatgtcttttaggtgaaggaaattgcagaagcttggcagcaacgtccagtgcagctgaggcactgtggggaaacagaaaggaaataccgtcatttaagagtgaaaataggggttttcataggatgtctccatccaagagtaggtaccgagaatgctcagagaagcaataggaaaataacatccctttcacgttctcacctccttaacccctagcataataaagaattattcccattttatagaagtagacacaaaggctcagaggccattttggccaagatctctcagctagaagattggccagctgagagttccaaacattaggaagggaggcaaaatgcttgtggggctggggttgaaggcgtagagactcattgtagggccctaggcagtccctagctcgaatctgactttccaattcatagttataagactttgagcaagctgctttacacgcacgattcccagtttatctgcctgcaaaatgagagcgtttatttccaacatgttcattccaagtatttacacaaaaggctcaatacttgatttgtgttggctggcaatctctctaaacttcactttccccatttctacgaggaaggcaagggtccctaatcttgcccccgttctcaggggagtcctaaggctcaataataaaaataaaataagaaaaaggagagaacgcgattgcccggttggcgcgacccttaacaccgagctaaaccggcgcatgttagggaccggcgccccctgccgccttctccgctgcattggcgtctcacagaatccgcccaaggccctgcgcctgcgcaaaatgcaagcgcccaggcccaccccttgtggggtgtgacctccctgagtagttttggattagccacgcctacttccggacaggtcaggccaaggtctcagccacgtgactgtgttccggctcggtaaagatggcggcgcccagggcggtagcgtgaaacttggtggaagacgctgaccagtcgtgttggaatcaaaacagcggggaccctgcgccatgtcgcgactgatcgtgaagaatctcccgaatggggtgagtgcagaggcaggacttgggaatctgaaatgagaccagccgggagctgtgaggtagggaagagatgcctggaggtgatcgaagaatttttgctctggggcaggactccgggccaattctgaactcaaagggggcgggatcctgggcttatccccatttgatcccgaggaaagaggaatagtgactgcttacggtttcacggccggttgtttggtacctgactcctaacacacctcttctcggggagatgacaactcccaccttgtggcgaataccctgctcccacaacctctttcattcgatcactgttttttagttgttgacccgggacatggtccgacactgtatttatattcctctcccagtctggaaactgttggggaagacatggggaatattaatctgcggacctgcgttccaattcccactcccatccttagggcaagtaggaatacggagtgggtaaagggctttacagcatttatccagtaagtggggagtggtgacccagccatacttttttgtttccctggagcccagcgcagaacccgacacgtggtaggcaaaataggtgaatgtacgtaatattagatgattagatgcggtgggctcgaatggatcatccttttttctctctctcgctgttttttgttctgttttgtttttttgtttttaaatggattactgctccttccatcaggttagacagtgtctcttgatgcctcgctttgtgggatgaggatttttagcgtagctgcacttcctttccctcccaaattcagctttgttgtgtttcaagtgtagttgattctcttatcattgtttgtcttatctcttttttttctctctctttcatggctttttttggttttgttttttgtttttttctttttttgttttttttttttaaacggagtctggctctgtctcccaggctggactgcggtggagcaatctcggcagtctcggctcactgcaacttttgcctcccgggttctagcgatgctcctgcctcagcctcccaagtagctgggactacagacacgcgccaccaagcccgactaatttttttatttttagtagagacatggggtttcgccatgttggacaagttggtctcgaactcctgacctcaggtgatccaccgcctcggcctcccaaagtgctgggattacaggcgtgagccactgcacctggcccccatttctgttctaatgttgtgagttttttcctttccttttttttttttcatttgtcaggtgggacaaaggaactttgtaacacacagttttcaaaattcaaacagtatagtagtgtataacatgagtagcaaagtctttgctctgtcctaccttccctctctgtccaggagtaaccatcttcattgatttgtttttgggactcctcacatgtatctctgtatatttgaggagtgtactttcctccttttgacctgcctgccccagtgactatctgctaggcctcaactgtgaaaaataaggaatttagatcatctgttcctcctctccagtgtctgtaatattcttgtttttaattatcctgttataatctctgagtagtatacttaaaaatatctattactcatccatccatcaggttagacatgtctcttgatgccttgctttgtgcgatgaggatttttagcgtggctgcacttccttttcttcccaaattcagctttgttgcacttcacagtgtagttgactctcttatcattgtttgtcttatctcatgaatgaaagaataataaaaacaagggcagttgcagctgacacttggagagtttactgtgtgccaggcactgttccaggtgctttaggtaaagtaacatttaatcctcaccatatccctgtgaggtaagttttatttttacgcccattttaaaggtaaagaaaccaagatacagcgaggtacagggatttgcctgaggtcacacactggtgtaatttatagagcagggattgaattgagcaatctttagtttagggattgaattgaggaaataattagtagtgagtacttgtgatattgctgacactgtagatagaggtggataagcctgtgtccttatttttaatgggacttgcaggctagcagaaaagagaggcaccagatcattacgatgcaaggtgcatcactgacatgtgaaccgagtgctgtgggagcacagtgagggttggttatctcgtccatctaaggcatctaagaaaggcctcctggaataggagatgattgaactgagaatgaggagttagccagggcctgtcttgggaaatatcacccagaggggacaaccaaagtaaaacctcggaagtgagaaggctgtgagaaatttgtcaaagcgtggtgctgaagaggttggtcagggcagatcttgaagaattgcatgttttcctttaggtgctcgtccttgagactttggtgccagaaagtcaccgaaaggtttttggcaaaggaatgatggattcagacttgagccaggtctctcccaggcactgaggaattgaattcactgtcttatatttctgaattgagtcacaaaccttgattctgtaggccttgggcagatcatttatcccttatgagtttcattttctctataaaatgtggacaaaaattcctaactcacagtgtgattgagattttgattagatcagttagtaagaagctacctcagaaaatgtcatcttctggctggactgccaaggcctctagcttcttgcattttcaaacttattttggctgttcgtggggccctgaatgtcccctcaactccactaccacacacacaaatatcccagtatctgcttagaaaactgagttgtgagggtagcctggctgcagtgaagatggtgagaagccaggagcctgttttccatagtgtggggcttcttgaccaaattataataatagtgtgttagttttttagtgcagctatagcaaattagcacaaacttagtggcttaaacaatccagacaatccttatcttacagttttgcaggtcagaaatcctaaaatcaaggctttggcagggctgcagtccttctggaagctctgtgggaatatctgtccctttgccttttttcagcttctagaagcacctgccttccttggttcatagctatatactccatatttggagccaatagcatagcatcttccaatctttctgtttccatcttctctgatcttcccgcctccctctcataaggacccttgaggtgacattggacctggctgcataatccagatcatctccccatctccatatcagtcacacctgacaagtcccttttgccttgtaaggtaacatatccacagtttccagggattaggatgtgggcatcttttgggggggctttattaacaaagatatatatagcttaccatgcctgttcattctttcatttattcctacaagtatttattaggtatctactatgtagcagacgtaatactgcttctgtaattggtcttatcctcataggagccccatagggtaggaagatgtcatttgcagccattatgagtcatgatttccacatcagtgagtggttaagggactttctcaaggccacacaactcgtgctagagtcagagctggaacctgttgtaactagaaaagtacactctgcccctcttcatctaaggccacccttggagaatctcgtggcctcaggtttccagcccattttgtccccttgctctggggactttccagttcgtctctcattcctttccctctgtcctagatgaaggaggagcgtttcaggcagctgtttgccgccttcggcacgctgacagactgcagcctgaagttcaccaaagatggcaagttccgcaagtttggttttattggcttcaagtccgaggaagaggcccagaaggcacagaagcatttcaacaagagcttcatcgacacatcccggatcacagtgagtgggcaggagtctcacccttaccttcctgtcaagtgtgacgttgtttgatctttcactcagcacttgagttcaaagaccgtccctcttcactttgtgatgtctttggttttcttcctcaccgattcacacactttcatgtgcatacaaatcacctgagagcttattataacagcttcctgggcccgtccccagagcatctgattcagtgcatggagtcaggacccaagaattcacacatccaacaagccctcaggtgacgaccatgctgctggtctgaggcccacaccttgagaaccacagctctacctcatccattcactcatgcatttagcaagcactcaatgatgctgggagtttagagaaaaaggtgatgcctcagcccctgtcctcatggagcctgctgtctctgggcaggcagggggctgacaggtcagcaggctgctttggctcagtgacatcagtgctatgatagggtgagccccagggactgtgggagaacaaagatctatagccggaccagggaggagtcaggaaagcttcctggaggagtgggctccactcaggtcactcgtgtatttagtgacttcgtaaaaacatctctaatgctttgttgagaaggaaaaaacagatgatggataaatatatatatgtctcgtgatcctatatagacacaatcgtattcctctatccatacatatatgataaatgcatagaaggccataggataggatttgtaccaaaatactaatcattcctctccatgagtgataggaattggagtacatcttttttaacttccattgtacttttgtatattatttgaattttgtaccgtgagcatgtcattattatagagataacaagcctattttggaagtgtgcacaaaagggattgtaactggccaggtgtggtggctcctgcctataatacaagcactttgggaggctgaggtgggaggatcacttgaagccaggagttcaagaccagcctgtgcaacatagcaagactgcgtctttacaaaaataaaaaaaaaaattagccgggcatggtgacatgtgcctggagtcctaggtattcagaaggctgagacaagaggatcacttgagcccaagagtttgaggctgcagtgagctatgatcatgccactgcagtccagcctgggcaacggagtgagaccctgtgtcttaaaaaggattgcaaccagatggcagctccttcccccaggggcagtggttggttgaccagcgtcagccttaactgtggctgggagtggcttgcggtggtggatgccccagtaaccagcgctctcaaagtcctctcagaggagtgtattggaggttttagggcctgaatagtgcgtcagctcaggctgggtctccagtactcttccgtccctccagtggtcaccccagtgcccctatcaccctagaattgttctctggagccagatgagcttactttatgataattaacccagggcagtgtggggtaactgtggtagccactgccccacattaccctgcccagagcctggttgagtgcttggcccaggtcatctcatgccatcctcacagccacccggtagagtggatggttaagaactcaggttccagagcccagagaccccctgagttccagtcttcactctgtcacttattacctgggtaagccagggaaattgacttcttgatgctccaatttcttgatctgaattgtagaaagtcatagctgtcactgacatgagaggctcggtgtatcagtacttgcagagcacttcagacagtacctggcatgcggagttcctcagtaagtggcagctattaccattacagtattacagactcataatgatagactgttagagtattgtattctagacttgaagggaaagaaagcccaggctaaggggtgacgtgtaatctacttcagcaaactcagctaggcagtgacagttgtctgaaatgcccgagctcccaggtgccgaagggcagcacccaacgcctgggtgccatggcaggtgtgaaaatcactctctttcccacacaggtggagttctgcaagtcattcggggacccggccaaacccagagcctggagcaaacatgcccagaaaccaagccagcccaagcagcctccaaaagactctactactccagaaattaagaaagtatgtaaagggtcactctagcctctgtccccactgccagcagggtagtcactcacttttggttcccaaagatgggccctcccaggtcagtgcagttctgtttcccagctctcttcatctgtgtgaccctcactctctgtgccttctgttttcaggatgagaagaagaaaaaggtggcaggtcaactggagaaggtgagtctgtcctgttgcccaaggaggagagagggtgggcagcaggtggaagagggtggagactggagagggtagaggctgggagagggtggaggctaggagaccgtagaggctggagagggtggaggctaggaaagggaagaggctggagagggtggacactgggagagggaagaggctggagaggatggaggctggccctggcaagcagagctgtgcctctggtctcccctggccttgtcttcttgtcctcttagttttgtctagtgaggagtcaactctgccttcctcagaactgacccagctgaacctcggggtcctccagagaatgggggaaattagcttgagggatcttctcaccctcttaagagttagaaagatcaagccccacctgagccttctctgcctcttcctctctctttttcccgtgtccctgccgcccgggttctggtgccaccagctgaaggaggatacagagttccaggagtttctgtcagttcatcagaggcgggcgcaggcagccacttgggcgaatgatggcctggatgctgagccctcgaaagggaagagcaagccggccagtgactacctgaacttcgactccgattctgggcaggagagtgaggaggagggagccggggaggacctggaaggtgagggcatggggactgtgtgctccatgcgcacggacctgtgcttgccattgggctaaccggcactgggggcccctctgtgcagactctaggagtcaggtgagcccttgagctctccattgggggtgatgatccctctgcaggtgcatctgtcttcactgatcctagttgtgtattcagtcagtcagtcaacaaatatttcttgagcacctattatctgccaggcatacttcaggcattgggaccatgttgataagcaaaagacagaagggtttattcccctatggagctgtgattatggttgtggagagaaacaataagcaaataagtccactgttgggtatatcataggatgatgaatgctacagagagaaagcaggaaaggcgacaggagaattatgagggaaggcctccctgaggaggtgagggagtgagcctttgtcctcagaaggggtttgtggtgtgggggaggcctggtgggcaagaaaacagttgcaacacaggagggtacgtgcttggtggagaactgggcatctatttgggtctaaaggtgagaagatgtacatttagtgcagttatgcctggtaacgtttctgcactaagttcacatccgaggaactcaggggacttagtgggacacggtaggggaggggagaggaaaggggttccagtcaagggaacagcatcgcagagacacagaggaaaggaaagtgcatgggcttgaggggctcaatgtgggttgggatggcttgagcaggaggagacagtggaagaagcccacgcagccagccctgatgaggagcctggatttcaccctgagcattcagaaacccctggagggtattaagcagagactgaccgtcctgtacctactctgtaaagtgtcacagaggctgccgtgtagaggactaggaagacatggctggtggcagggagccaggagctcaatgtgtggcacagagaatatcaaagctgcagtagccctgccccgttttggtattgctaatcagaggacttatgggggatgctgggcacaggggccatggacacggtgggcatggtgcctcaggcctctcactaggaggaccatctaccatttgctacctctgacctctggtttgctcatagctgtcgctgatcccagcttccctgtttttccagaagaggcaagcctcgaaccaaaggcagctgtgcagaaggagctgtcggacatggattacctgaaatccaagatggtgaaggctgggtcgtcctcttcctcggaggaagaggaaagtgaagatgaagccgtgcactgtgatgaagggagtgaggccgaggaagaggattcctccgccaccccagtcctgcaggaaagagacagcaagggtgcaggccaagagcaagggatgccagctgggaaaaagagaccaccggaggccagagccgaggtgcgtgtgtatcccacaggtgatgagggaggaggtgcgctctcctgcttgcccgtggtccccacagctcctctgttaggagagcggaatgttggggaaagacgcagctctgcagtccaaagccttcccgatcttggccctgccgcttgctcgccgtgtgttctttctgcgtttcttttctgtttttatttttattttattttattttattttttgagacagagtctcactctgtcacccaggctggagtgcggtggtgcaatctcagctcactgcaacctccgcctcctgggttcaagtgattcttctgcctcagcctcctgagtagctgggattatagtcacacccagctaattttttgtatttttagtcgaaatggggttttgtcatgttagccaggctggtctcaaactcctgacctcaagtgatccactcatctcagcctcccaaagtgctgggattataggcatgagccactgcacccagcctctgcatttattttctgttgctaacctggagaggtcacctgccttccagaaattgcctataagtagggtgacaactaaattattgtcaacactaagttaaaagtgagatgctagtccagtggggtgccaggctgtggatgtagttactgcaggtctaatgactacagatagagtgaacaactatcccgggcaaactggagcagccccggtcaacacacccatatcccaccaatggggcagaagtgagctgagtgatggctttgagcctttatcctttgtatttagtaacaacacaggcagaggggtgcagaccagtcatcagcaatcatagggaggatcaactgagcctgcgctacacactaggcaccatgcctgccgtgccgttgcatctcatcactatctggagggcagtattggtcttgttccattttacagatgaggaaacaggcctggagaaggaaggtgcctcagccagggtcatggctgggaaatggtgggttcaggacttagccccaggtctgtggggtctgaagtcgagatcataaacgtgggcgcttccccagaggtcggccaactcgtctctgacctgggagtcctctctgcatcagagacagagcagtttgacatgttgtccaggtccctgttccctcctttctctgtgaagcatcacttctctccctgcctagccctgtattttttttttttttttttttttttgagacagtcttgctgtcgcccaggctggagtgcagtggtgtgatctcagctcactgcagcctctgcctcccgggttcaagtgattctcatgcctcagcctcccgagtagctgggattacaggcacacaccaccacacccagctaatttttgtatttttagtagagatggagtttcaccatattgtccaggctgatcttgagctcctggcctcaagtgatcaacccacctcagcctcccaaattgctgggattacaggcctgagccactgcacctggccccagccctgtattttcaaatgagatgaaagcaagcttcatcctcttttctttcctcttttccctttcttcttcctccctccttttattttctgcctcttctaattatgcactctgtccttttcttcccccccaaaattgtatatttcagtgaggtagtagagtgtggggaagtcagaattatgagttcaaatcctagttccatcatttagtggctgttggtccttgggtgagatactttacttccttcagcctctgaattttcgtttacaaaaaggcactcatggtagcactgctccctgcctccggtttctgaccccgtgcctaagtatatgctggaattctggaatcttcaggtttcaggaagagaaccctctggaatgcagcacccccagcagggctcactcccctctgcctaccttgttactaaatacaggataaaaggcagcaccccacggtcaagcgcagtcacatttctgcaacgcatggacaagactgcttgcgctgcgtgaatcagcataagctatatatgggctcacatccactcagggcaggctttgctgggaagtgcattcaagtcggggcaggttttgttgccataaaggttaccagaaacttaggttttttcagaggtgtctggattccggagttgtgggaaaaaggatcctgaacccataatccccatgggattgttgtgaagatgtagtagatcactggcatctgtaaagtgcttggcttagtgtctggcactgataagccctacatagtggtactgacaccccgttcttcagggctccttcacattcccaccctgcccctccttgtagccccagggtccctgtccaggtgcccatagcttgccaggctctggttccagccctcgtctcaggggcacatggagacttggcatcacctagccccacctctggccagactccatacacggtggacattgattcttcccagcattccccagctccccctggcggcaggcaccttctctggcactgaaatgtcccagtgtgccacctcctgcagctgtacgaagggttagtgtggccacttctgtttgtttttctgatcactcagacagagaaaccagcaaaccagaaggaacccaccacctgccacaccaccgtgaagctgcggggagccccgttcaatgtcacagaggtatgtgctaactgaggacaagggtcggcagcctgcgggagcaggagacgagggtggggaggccaggagcctttggtgcatgggggcattagagtcggttgaggacatgagctggaaggaattgggggccaaaaaggctgagaaataacatctccggcatcgtcagggtcaggaaacaggcatggctacaccaagacaaaggaggttctggtttcactcaccagtacccacaccagggtgggcacacactctgttaaagaaaaggttgtgggggcagtcagccagttaatatttaagacttcgtgatcaacacggtctctgttgtgactactcaccctgctcttatagcaaggaagcagtctcagaaagtaggtaaaaataaataaaactttagttacaaaaacaggcagtgagccagatttggcctgtggactgtagtttgctgcctttgggtctgtaacagcagaagaacacttaattttcgttcttcgtgaaagtagtagttcaatatagaaaactcaaaaccatgtagctaaataaaaaatatttaaaaattgcctgtaagtaggatgactactaaattatcatctacactaaattgagagtgagaggggtgctaccccaatggggtgccaggctgtggatgtaattaccgcaggtctaacgactccaaatacagtgacaactcatcccaggcaaactagggctgccctggccaacacacttgtatctacccagtgacgtccactgatacattttgggtgtgtcttcttagatggtttttgttttgttttcctttgtttttagtttttattattattatttttgtgtgtgtgtgtgagacagggtctcactgtgttgcccaggctgtagtacagtgctgccatcatagctcactgaagcctcttcttggacgtttttgtctttgtatgtctaagaagcaatcatttactgggaactctttggaaacccctttttcctcctcatcatggtatgttatagacctctttgaatattgaatatactctgctacagcagcattttttatgctcatgctcttccttactcagggtaaacttctgtaggtttactcagtcccctaaattgggacgtgggagttatatccaattttttgctgttataaataataattcagttccttgggattaggggtgagcagacttcgtctgtaaaggccagatggtaaatatgtcaggctttgtaagccatttaatctctgtcacatattcgttgttttctctttttttggtaatcctttaaaatgtaaaaaccatttttagcttgcaagccattcaaaagcagaccatggtgatatttggcccgtgggccatagtttgctgatctttgctccagataaatattctgtgtaggcaaatgtgtgtacaattctaaggctttggcacataatatcagttgccctctgggagcattgctagtttatgctcgctgtagcagagtctacaagtgcccattttcctgaaccctgggtattattaatgtttcatcaatgtgataggtaaaattggcatctcatgttaatttatattttaaattacttgtaagatggatcatactctctcacatttgtagatcgtgtatatcttgttgtcattgttgttttgagacagagtttcgctcttatctcccaggctggagtacaatggtgcaatctcagctcactgcaacctccgcctcccgggttcaagtgattctcctgcctcagcctctcgggtagctgggattacaggcacctgtcaccatgtccagctaatttttgtatttttagtagagacagcgtttcaccatgttggccaggctggtctcgaactcctgacctcgggtgatcacccgccttggactcccaaagtgctgggattacaggcgtgagccaccgcacctggccaatatatcttctcttttggaaagtgcccgatcatgtcttttgcccttttttctcttgaagtctttatctgttctggtactctatgtttataaatatctgaattacaacttatcaaacttcagagtagcaagcatgtaggttttattaaactcactgagttgcttgtaattttgtcagaattctttcagtatcaaccattcagaaaatcacatgctttaattaacaaaaccaaaaccactaggtggctacttgcaaaactaatacacaaaaaccaaatactcaagcttaatgagaagtgaaaaaagccaggtttaatcccaagtatatacaattatctaggggggaaacagtgccttgaaatgcggatcgtgacatcgctattttaacgctgatagtgacactgctattttatatttatattactcatttctcctccaattttctttttcacattttctccaaggtaattggagaagcgatacgtataaggaaagagaaaaactaaagaatgaaacactttgtaatcctttctgatttagaaatttgccccatgtcttttcgttgggttgtacttttattatgtggttggtaaggggaaaaaaacttcttctcacagaaaaatgttatggaattcctggcacccctgaaaccagtggccattcgaattgtgagaaacgctcatgggaataaaacaggtaagatccaggatgtttccaggtgggaaggcgggtagacagtgaagattgaaggttggggtacttgaataaggaagaagttttaagggcacccgtttttcttcctgtttgtggtcctcagttgtgtggatgtggtcagcctgggcaggttaaggctgcatctcttgccccagcctttggtggcctagtgtatagggatggagttctcacctgtgcttttcatccttcccttcctcatcttagcctttgcctatctcagtgggctcacctattacgctgaaacaaatgccaacaggtcctggggtttgctaggccaagtccacaggcagctctgctggtgggcagggctctgagttgctgagcatgtgtggtgttgccccgtgccaccctccctgcaggtttatactctgggcaaccaaccaggcacctcccttggcttcagagccctgggttctggtcatcctgagatgagcagtgtggctggaaggcagagtgtctgagctcggggaggtgggcacctgtccgtgcctacttcttgctggccaggacactgggagattcagcagctgacttgctacttctcaagagaaccacactgaggccctgtagctgcggggaggctggaggctggaagccgctggatgtgtactctgtctttggcaagaagacactggcctgggtagagcagttgagatctacctaggctgacatctggggaagaaagtgtgcttgagggatggtctcctcactgtcatgtttctgcatttcttccccaactctcctcttatcacggaagtcccacttacccagctgatccattcagccacccatccttctccttgcagactgattacagggcaggatgaggtcagggtaaagggctctgcctaagtgcagatctcaggtaggagccctatgaccttggacaagggacttagcctcagtttgtttgtgtgtgtgagtgtgtgtgtgtttgtgtgtgtgtgtgcagtcaggtaaacctgtctcaccaagttgcatgaatggctctgtgtacagcatttagagcagtgctgagcccctgttgcacactccatgaaagctgctgttaatattcatgatggtggtggtgatggtgctggtacccttggttttatggcacttcacagaccagggagggagcaggaagaaacatatctgagttgtcagacccaagagaaaaccatattggaggccccagagttggagagagccggcatccaagcatgaaatgttgaaaagcagctgaatgtcccctgcaggagagctggggaggaggcaggctgggccccttaagctttaggggcctcattaaagattgtgtgtctcagctactcaggaggctgaagtaggaggattacttgagcctaggagttcaaatccagcctggacaacatagcaagacccaatctcaaaaagaaaaagattgtgggcttcagtctggatgcaggggcccctgggagcttagagcaggggagggcagtgatcacatttaggatggtccctggcaggtgaagaatgggtcctggagccaggcgtttgccatcgtctaagggaggatcagtggtgatggggcctagggtgtggccatggagagggggagggaaaaggacggaagatgtttatggggatggatgaggtgcctggatataggaaaggagggcatggaggagtcacagaaagaatctaaacagccttgtgattaaaggcagaaaacccaagggctttggaccaagtattagacattgccagctattagccgagtgcccctcggagtatttctttaatgctccagaaaagcaggggaatggtcctcacccctcaccttgttgcctcacaggtttgaggcccaaagaggtcaggaagcagagcctctcatgctagaggaaagactcccccatttgcttgtttttttgtgcaagtcaaggcctcaggtgcccaggagcagagtgggtgtggagaaggtgcttccagcgcctaggtgggtcctcatgctgtagccacaggcccttctccagagaatggcttagagcaggtgccagtcgggggatgggggtgaggcttggagggagacagaaaggcctcctgggcttccaactcctggcattcagcatcttcatccatgacaccgggctgggctctgtacactccctgcagagggaaatttggctgtgggtgggagacagagagagggagaccctttgtattttggagatctgaccaaggtagaggtttctccctcactttctgctcctagcacagtatgggtgttcctctggggaccaccacaagtgtctgcaaggcctgcagattttacctctgtcattgtcctctgtcaggatacatctttgtggatttcagcaatgaagaggaagtgaagcaagctctgaaatgcaaccgggagtacatgggtaaggaagccctggccatgtgctctctctgtgttacagcgttccttcgttccttcatttcctttacacgttcttgtaccagcaccatcaccaccaccaagaatgcagtgtctctgcagacactgttctaggcactggggacatggcagggagcaaacagacccaaatccctgccctttcggggctgacagagagtaaactgacttaggagggagagacaggtggttaaatgtgtgatccatgctacagggaaacacacagcaggcacgggtcctggggagggcagggattggaggaggcttggctttaaacagggtcctgtctgctttggcctcaccgaggggtgacattgggacacaaacctacagttgtgtaggctctggctctacggacaggatgttcagtagagggaacagcacgtgcaaattccctggagttgggaggtcttctgaacaatacccagggatgtattctttgaccaatccctggccaagacaagtgatttgaatccagccatcaaccccagtgaagacatgagttgtgttagagaaggatggagagccttgggaattcttgttagnnnnnnnnnnnnnnnnnnnnnnnnnnnnnnnnnnnnnnnnnnnnnnnnnnnnnnnnnnnnnnnnnnnnnnnnnnnnnnnnnnnnnnnnnnnnnnnnnnnnnnnnnnnnnnnnnnnnnnnnnnnnnnnnnnnnnnnnnnnnnnnnnnnnnnnnnnnnnnnnnnnnnnnnnnnnnnnnnnnnnnnnnnnnnnnnnnnnnnnnnnnnnnnnnnnnnnnnnnnnnnnnnnnnnnnnnnnnnnnnnnnnnnnnnnnnnnnnnnnnnnnnnnnnnnnnnnnnnnnnnnnnnnnnnnnnnnnnnnnnnnnnnnnnnnnnnnnnnnnnnnnnnnnnnnnnnnnnnnnnnnnnnnnnnnnnnnnnnnnnnnnnnnnnnnnnnnnnnnnnnnnnnnnnnnnnnnnnnnnnnnnnnnnnnnnnnnnnnnnnnnnnnnnnnnnnnnnnnnnnnnnnnnnnnnnnnnnnnnnnnnnnnnnnnnnnnnnnnnnnnnnnnnnnnnnnnnnnnnnnnnnnnnnnnnnnnnnnnnnnnnnnnnnnnnnnnnnnnnnnnnnnnnnnnnnnnnnnnnnnnnnnnnnnnnnnnnnnnnnnnnnnnnnnnnnnnnnnnnnnnnnnnnnnnnnnnnnnnnnnnnnnnnnnnnnnnnnnnnnnnnnnnnnnnnnnnnnnnnnnnnnnnnnnnnnnnnnnnnnnnnnnnnnnnnnnnnnnnnnnnnnnnnnnnnnnnnnnnnnnnnnnnnnnnnnnnnnnnnnnnnnnnnnnnnnnnnnnnnnnnnnnnnnnnnnnnnnnnnnnnnnnnnnnnnnnnnnnnnnnnnnnnnnnnnnnnnnnnnnnnnnnnnnnnnnnnnnnnnnnnnnnnnnnnnnnnnnnnnnnnnnnnnnnnnnnnnnnnnnnnnnnnnnnnnnnnnnnnnnnnnnnnnnnnnnnnnnnnnnnnnnnnnnnnnnnnnnnnnnnnnnnnnnnnnnnnnnnnnnnnnnnnnnnnnnnnnnnnnnnnnnnnnnnnnnnnnnnnnnnnnnnnnnnnnnnnnnnnnnnnnnnnnnnnnnnnnnnnnnnnnnnnnnnnnnnnnnnnnnnnnnnnnnnnnnnnnnnnnnnnnnnnnnnnnnnnnnnnnnnnnnnnnnnnnnnnnnnnnnnnnnnnnnnnnnnnnnnnnnnnnnnnnnnnnnnnnnnnnnnnnnnnnnnnnnnnnnnnnnnnnnnnnnnnnnnnnnnnnnnnnnnnnnnnnnnnnnnnnnnnnnnnnnnnnnnnnnnnnnnnnnnnnnnnnnnnnnnnnnnnnnnnnnnnnnnnnnnnnnnnnnnnnnnnnnnnnnnnnnnnnnnnnnnnnnnnnnnnnnnnnnnnnnnnnnnnnnnnnnnnnnnnnnnnnnnnnnnnnnnnnnnnnnnnnnnnnnnnnnnnnnnnnnnnnnnnnnnnnnnnnnnnnnnnnnnnnnnnnnnnnnnnnnnnnnnnnnnnnnnnnnnnnnnnnnnnnnnnnnnnnnnnnnnnnnnnnnnnnnnnnnnnnnnnnnnnnnnnnnnnnnnnnnnnnnnnnnnnnnnnnnnnnnnnnnnnnnnnnnnnnnnnnnnnnnnnnnnnnnnnnnnnnnnnnnnnnnnnnnnnnnnnnnnnnnnnnnnnnnnnnnnnnnnnnnnnnnnnnnnnnnnnnnnnnnnnnnnnnnnnnnnnnnnnnnnnnnnnnnnnnnnnnnnnnnnnnnnnnnnnnnnnnnnnnnnnnnnnnnnnnnnnnnnnnnnnnnnnnnnnnnnnnnnnnnnnnnnnnnnnnnnnnnnnnnnnnnnnnnnnnnnnnnnnnnnnnnnnnnnnnnnnnnnnnnnnnnnnnnnnnnnnnnnnnnnnnnnnnnnnnnnnnnnnnnnnnnnnnnnnnnnnnnnnnnnnnnnnnnnnnnnnnnnnnnnnnnnnnnnnnnnnnnnnnnnnnnnnnnnnnnnnnnnnnnnnnnnnnnnnnnnnnnnnnnnnnnnnnnnnnnnnnnnnnnnnnnnnnnnnnnnnnnnnnnnnnnnnnnnnnnnnnnnnnnnnnnnnnnnnnnnnnnnnnnnnnnnnnnnnnnnnnnnnnnnnnnnnnnnnnnnnnnnnnnnnnnnnnnnnnnnnnnnnnnnnnnnnnnnnnnnnnnnnnnnnnnnnnnnnnnnnnnnnnnnnnnnnnnnnnnnnnnnnnnnnnnnnnnnnnnnnnnnnnnnnnnnnnnnnnnnnnnnnnnnnnnnnnnnnnnnnnnnnnnnnnnnnnnnnnnnnnnnnnnnnnnnnnnnnnnnnnnnnnnnnnnnnnnnnnnnnnnnnnnnnnnnnnnnnnnnnnnnnnnnnnnnnnnnnnnnnnnnnnnnnnnnnnnnnnnnnnnnnnnnnnnnnnnnnnnnnnnnnnnnnnnnnnnnnnnnnnnnnnnnnnnnnnnnnnnnnnnnnnnnnnnnnnnnnnnnnnnnnnnnnnnnnnnnnnnnnnnnnnnnnnnnnnnnnnnnnnnnnnnnnnnnnnnnnnnnnnnnnnnnnnnnnnnnnnnnnnnnnnnnnnnnnnnnnnnnnnnnnnnnnnnnnnnnnnnnnnnnnnnnnnnnnnnnnnnnnnnnnnnnnnnnnnnnnnnnnnnnnnnnnnnnnnnnnnnnnnnnnnnnnnnnnnnnnnnnnnnnnnnnnnnnnnnnnnnnnnnnnnnnnnnnnnnnnnnnnnnnnnnnnnnnnnnnnnnnnnnnnnnnnnnnnnnnnnnnnnnnnnnnnnnnnnnnnnnnnnnnnnnnnnnnnnnnnnnnnnnnnnnnnnnnnnnnnnnnnnnnnnnnnnnnnnnnnnnnnnnnnnnnnnnnnnnnnnnnnnnnnnnnnnnnnnnnnnnnnnnnnnnnnnnnnnnnnnnnnnnnnnnnnnnnnnnnnnnnnnnnnnnnnnnnnnnnnnnnnnnnnnnnnnnnnnnnnnnnnnnnnnnnnnnnnnnnnnnnnnnnnnnnnnnnnnnnnnnnnnnnnnnnnnnnnnnnnnnnnnnnnnnnnnnnnnnnnnnnnnnnnnnnnnnnnnnnnnnnnnnnnnnnnnnnnnnnnnnnnnnnnnnnnnnnnnnnnnnnnnnnnnnnnnnnnnnnnnnnnnnnnnnnnnnnnnnnnnnnnnnnnnnnnnnnnnnnnnnnnnnnnnnnnnnnnnnnnnnnnnnnnnnnnnnnnnnnnnnnnnnnnnnnnnnnnnnnnnnnnnnnnnnnnnnnnnnnnnnnnnnnnnnnnnnnnnnnnnnnnnnnnnnnnnnnnnnnnnnnnnnnnnnnnnnnnnnnnnnnnnnnnnnnnnnnnnnnnnnnnnnnnnnnnnnnnnnnnnnnnnnnnnnnnnnnnnnnnnnnnnnnnnnnnnnnnnnnnnnnnnnnnnnnnnnnnnnnnnnnnnnnnnnnnnnnnnnnnnnnnnnnnnnnnnnnnnnnnnnnnnnnnnnnnnnnnnnnnnnnnnnnnnnnnnnnnnnnnnnnnnnnnnnnnnnnnnnnnnnnnnnnnnnnnnnnnnnnnnnnnnnnnnnnnnnnnnnnnnnnnnnnnnnnnnnnnnnnnnnnnnnnnnnnnnnnnnnnnnnnnnnnnnnnnnnnnnnnnnnnnnnnnnnnnnnnnnnnnnnnnnnnnnnnnnnnnnnnnnnnnnnnnnnnnnnnnnnnnnnnnnnnnnnnnnnnnnnnnnnnnnnnnnnnnnnnnnnnnnnnnnnnnnnnnnnnnnnnnnnnnnnnnnnnnnnnnnnnnnnnnnnnnnnnnnnnnnnnnnnnnnnnnnnnnnnnnnnnnnnnnnnnnnnnnnnnnnnnnnnnnnnnnnnnnnnnnnnnnnnnnnnnnnnnnnnnnnnnnnnnnnnnnnnnnnnnnnnnnnnnnnnnnnnnnnnnnnnnnnnnnnnnnnnnnnnnnnnnnnnnnnnnnnnnnnnnnnnnnnnnnnnnnnnnnnnnnnnnnnnnnnnnnnnnnnnnnnnnnnnnnnnnnnnnnnnnnnnnnnnnnnnnnnnnnnnnnnnnnnnnnnnnnnnnnnnnnnnnnnnnnnnnnnnnnnnnnnnnnnnnnnnnnnnnnnnnnnnnnnnnnnnnnnnnnnnnnnnnnnnnnnnnnnnnnnnnnnnnnnnnnnnnnnnnnnnnnnnnnnnnnnnnnnnnnnnnnnnnnnnnnnnnnnnnnnnnnnnnnnnnnnnnnnnnnnnnnnnnnnnnnnnnnnnnnnnnnnnnnnnnnnnnnnnnnnnnnnnnnnnnnnnnnnnnnnnnnnnnnnnnnnnnnnnnnnnnnnnnnnnnnnnnnnnnnnnnnnnnnnnnnnnnnnnnnnnnnnnnnnnnnnnnnnnnnnnnnnnnnnnnnnnnnnnnnnnnnnnnnnnnnnnnnnnnnnnnnnnnnnnnnnnnnnnnnnnnnnnnnnnnnnnnnnnnnnnnnnnnnnnnnnnnnnnnnnnnnnnnnnnnnnnnnnnnnnnnnnnnnnnnnnnnnnnnnnnnnnnnnnnnnnnnnnnnnnnnnnnnnnnnnnnnnnnnnnnnnnnnnnnnnnnnnnnnnnnnnnnnnnnnnnnnnnnnnnnnnnnnnnnnnnnnnnnnnnnnnnnnnnnnnnnnnnnnnnnnnnnnnnnnnnnnnnnnnnnnnnnnnnnnnnnnnnnnnnnnnnnnnnnnnnnnnnnnnnnnnnnnnnnnnnnnnnnnnnnnnnnnnnnnnnnnnnnnnnnnnnnnnnnnnnnnnnnnnnnnnnnnnnnnnnnnnnnnnnnnnnnnnnnnnnnnnnnnnnnnnnnnnnnnnnnnnnnnnnnnnnnnnnnnnnnnnnnnnnnnnnnnnnnnnnnnnnnnnnnnnnnnnnnnnnnnnnnnnnnnnnnnnnnnnnnnnnnnnnnnnnnnnnnnnnnnnnnnnnnnnnnnnnnnnnnnnnnnnnnnnnnnnnnnnnnnnnnnnnnnnnnnnnnnnnnnnnnnnnnnnnnnnnnnnnnnnnnnnnnnnnnnnnnnnnnnnnnnnnnnnnnnnnnnnnnnnnnnnnnnnnnnnnnnnnnnnnnnnnnnnnnnnnnnnnnnnnnnnnnnnnnnnnnnnnnnnnnnnnnnnnnnnnnnnnnnnnnnnnnnnnnnnnnnnnnnnnnnnnnnnnnnnnnnnnnnnnnnnnnnnnnnnnnnnnnnnnnnnnnnnnnnnnnnnnnnnnnnnnnnnnnnnnnnnnnnnnnnnnnnnnnnnnnnnnnnnnnnnnnnnnnnnnnnnnnnnnnnnnnnnnnnnnnnnnnnnnnnnnnnnnnnnnnnnnnnnnnnnnnnnnnnnnnnnnnnnnnnnnnnnnnnnnnnnnnnnnnnnnnnnnnnnnnnnnnnnnnnnnnnnnnnnnnnnnnnnnnnnnnnnnnnnnnnnnnnnnnnnnnnnnnnnnnnnnnnnnnnnnnnnnnnnnnnnnnnnnnnnnnnnnnnnnnnnnnnnnnnnnnnnnnnnnnnnnnnnnnnnnnnnnnnnnnnnnnnnnnnnnnnnnnnnnnnnnnnnnnnnnnnnnnnnnnnnnnnnnnnnnnnnnnnnnnnnnnnnnnnnnnnnnnnnnnnnnnnnnnnnnnnnnnnnnnnnnnnnnnnnnnnnnnnnnnnnnnnnnnnnnnnnnnnnnnnnnnnnnnnnnnnnnnnnnnnnnnnnnnnnnnnnnnnnnnnnnnnnnnnnnnnnnnnnnnnnnnnnnnnnnnnnnnnnnnnnnnnnnnnnnnnnnnnnnnnnnnnnnnnnnnnnnnnnnnnnnnnnnnnnnnnnnnnnnnnnnnnnnnnnnnnnnnnnnnnnnnnnnnnnnnnnnnnnnnnnnnnnnnnnnnnnnnnnnnnnnnnnnnnnnnnnnnnnnnnnnnnnnnnnnnnnnnnnnnnnnnnnnnnnnnnnnnnnnnnnnnnnnnnnnnnnnnnnnnnnnnnnnnnnnnnnnnnnnnnnnnnnnnnnnnnnnnnnnnnnnnnnnnnnnnnnnnnnnnnnnnnnnnnnnnnnnnnnnnnnnnnnnnnnnnnnnnnnnnnnnnnnnnnnnnnnnnnnnnnnnnnnnnnnnnnnnnnnnnnnnnnnnnnnnnnnnnnnnnnnnnnnnnnnnnnnnnnnnnnnnnnnnnnnnnnnnnnnnnnnnnnnnnnnnnnnnnnnnnnnnnnnnnnnnnnaattctccagcctcagcctcccaagtagctgggattacaggcacgcaccaccatgcctggctaattttgtatttttagtagagatgaggtttctccatgttggtcagtcaggctggtctcgaactcctgacctcaggtgatccccctgcctcagcctcccaaagtgctgggattatgggcgtgagccactgggctgtccaaaatattatcatttcaacatatgcacaatgttaaaaaaaaaaattgcaagctattgtagtctttttttcctcacggaattctgtgtgtgttttccacggagagcactttggatgtgtcgcgttgcatttcacatactgaggggctctgaggggcttgtggcactgtgttggatggcacaattctagacccaggccagctgggggcctgcagccgcttcagatcccccgagtactctgagttctcggaatgcagcaacccccaaaacaggagcagtgaggttcctctggtgctttccgatgagggaaaagacactgacacattagcagaggtgcagtgcggcaggcctggtgagggcagagaacagaaaagccaagggagggatagggtgtcaccgcaagggtgggctggtcagcaacgtgacacttaagcagaaactgaatggagcaaggaaatgtggggtaaaagccatggaggccaaggtcaacaactgcaggagccctgcggtgagatgagctcagcatggggtggcagcaaagacccatatgatgaggggagggagtgcaggagaggggaccctggggtcccagatctactgtgagagacctgggaagccagagccactggggggccaagcacagtggctcacgcctgtaatcctggcactttgggaagctgaggcaggtggattgcttaagcctagcagttcaagatcagcctgggcagtatggcaaactcccatctctacaaaaaatataaaaatgagctggaagtggtggggtgcgtctgtggtcccagctactcagggaggctgaagtgtgaagattgcatgagtctgggagattgaggctgcagtgagccatgatcacaccactgcactccagcctgggggacagatatgacagagtgagaccctgtccttcttaaaaaaaaaaaaaaaaaaaagcacagagccgttgggggcatctgatcaatgtaggaaggtgagcggcatccgtggaatccatttccatcccagcctcctcttcaggctgttgggagatgggagggccagcaagtcacctggccgacagccaaccagaactcttcctttcctcttccacaggagaccaagggcagcgtggccgtgcgcgtggctctgggggaaacccagctcgtccaggaagtgcggcgttttctcatagacaacggggtcagcctggattccttcagccaggtgggtgttctcggtggcgccagccagccagcagccactggagagtcgagaatggcctttccaggggagatgcagatggatttaaggatctggccttctaaggactattactgatttctaaattgtctctaaagaaaagaagaaatgttacatgggctgagacaagtggcctatctgaccctgattctgtctgtccagagccatgtacaagaggtctgcctacaaccccacagttcccccacacagatcggcacccccaacatctcactcccctacccagtggcttcccagagcatctgttatctgttcggggactttgacccttcttgaacctagcagggaagagtccagcacctccatgtgcctgttctccagcaagtagcaggtcttagatttatggatgactgcagcttagagggcccctaagacatcatgagaccccttcattttacaatctgggataccaacgctcagagtggggaggtgacttacaaggtcaaacagtctatatgtgagaggagcctggactaaaactcagggcttctgactcccaaaacagccctttcaacagccttcccaggcctcacatttttacctcaagatggatgaggaggatggatgaatgaagatgtatgggggatgggtggatggatggatggatggatggatggaggatgaatatggatggtggatgaatggatggcttgatggttggatggatggatggatggatggatggtggatgaatacagatgatgcatggatggatgggtagatagatggataaaataaatatactaatagctaacatttattaagacttaccaaagcactcttctaagtttacatgtttaattagctcatttcattcacatggccactctgtgaaagcagctctactgtgcttccaccctacagaaggaaccacagtcacagaggggtgaagtcacttcacagctagtcatggtggagctgagtttgaacacaggccttctggccccagagtctgtctctctaactgtaacactgcggcctgagttgcacctaaaaggcccacaggtgcccagcctttcccacctgcagatggttttcactcccctcacctcactcaatcctcatagtaaccttgtgtggcctctataagatgggtgtgactgttagcccattttgcagatgagaaaaattgaggcccacagaaacaaggtaattgacccaaggtctcaggttacattagcggctgagctaagacttattcccagataggccatatgcctagatttttccattatattttattggctcttttatcctcctccaacattattttttaataaaattattgctaacgttttcagagtgctcatattacatgtacttttactaacccatttaatgaaaacttttcctggagcgatcctgtgaaataaatgctctgtccttgctgtcgctgcgggagctgaggcacagttaagtacatttctcaaggctgaatagcttagtcttttagttttggttctcccagaagcagattctgagacaaggattcaagggcaaacagttttgggggcagtgcagaaaactctggtgagaaagggatgcagggaagggaaggagcccagggtgcagagtgtgctgctgcagtacgctgccctgtggctgcctggagctctgcctaggggaaagcctgcagcactcatacctcagtctcatcccacccaaggacaaggagtgcagcaactcctgagagctgtgggctgctcccagggggcgttagctctgcagcacgtcctgctggctgcacgtggtagcaggtgggcggtctgtagttcaggaaaaaaagccttggtactgagatgcagaccccagccactggaagccttggaaagtgcggccctgctcaggagtggaggaggggctgggatttgatccagaagctccagcttcagagtcccaggccttaccccctctgcagagctgccttgcagccttgcagggagcatcatgccagagagggtcgttcctcctgggtcttcctcctaagtgcctggttgctgaggttccaaatggagagccttgtctggagagccccacgatccctgctggtgtcagctggggaccctcctccctcctgtggtcccatgtgtgtgcatttcctctttgcaggctgcagcagagcgaagcaagactgtgattctggtcaagaacctcccggcaggcaccctggcggccgagctgcaggagaccttcggccattttggcagcctgggccgcgtgctgctgccagagggcggaatcactgccatcgtggagttcctggagcccctggaggcccgcaaggccttcaggcatctggcctattccaaggtagggctgctggagacccagaattgatctggagaaggaccagtgagggctgcttcaagggagagggtgcagtgggctatggattcacagatgtggcacatgggagctcaccctaaaccgcccgtcacgatcatggctgaatatcatccctgccgcctgaaaacctgtctggatgggaagaatgggagacggaagttcttttttttttttgagacagagtctcgctctgtcacccaggctggagtgcagtggcgcgatctctgctcactgcaagctccgcctcccgggttcacgccattctcctgcctcagcctcccaagtagctgggactacaggcacccgccaccccgcctggctaatttttttatatttttggtagagacggggtttcaccgtgttcaccaggatggtctcgatctcctgacctcgtgatccgcccgcctcagcctcccaaagtgctgggattacaggcgtgagccactgcgccgggccgggagaagggagttctgaaccatcctccagaaagcatgccttggttccttgcctgactctagcttttctttggctttctttacccatgttaatttggattagcattttaattttaattaaatgtgttcattatttttttgaaaaagtatttatttattttgaaagacagggtctcgctctgccacccaggctacagtgcagtggcgccatcttggttcgctgcagccttgaactctggggctcaagcaatcctcccacctcagcctcccatgtagctgagactacaggcatgcaccaccacgcctggctaattttttgattttttgtagagacaaaggtctccctattttgcccaagaatgagcattcttgatgcttttgtaatcctgtagctacaatgagatgaatgaaagtcagttctgtaggtggggctgtctcctggttcttggtttagaaaaaagccaacagttgtgtattagtttgctggctgtggctgtcataacaaattattacaagctagttggcttgaaacaacagaaatagatcatcccacggttccgaaggccacagtctgaaatcaaggtgtcagcagggttgtgcttcctctgaaggctctagggagtctgatctgtgtctcttccagcttctggtggctccaggcatccctggcccatggctgcatcactccagtttctcccttcatcctcacttggcttttcctcttctctcagtcttcctccctgtttctcttataaggacacttgtcattggatttaggctctgccgggataatgcaagatgatctcatctcaaaatctttcacttaatgaaatttgcaaagatcctttttccaaataagggcgcgttcacaggtttctaggggttcaagatatagacatacccttgcggtgccactacaagtattttctgtttataagacactttagcacttcgcagaccttggtctccctcagcaattcttagagatagatattcatgtcccccccagcaattcttagagataggtattcatatgccccccagcaattcttagagatagatattcatgtccccattttgctggtgaggaaatgatttctcattctctgccactttaaccccgtaatagtctttagcttgggactctgtggccactaagctctcaggaagtcagtctgcgcctgacccataagaaaaattatctaggtggggccccatgactgagatgtgagcatcctttggaatgtgacaccatcctttcttccttctgctttgggaggacatgccagtcaccaaaagctctctctgtgtgagccacagttggagaacactgactaggtgaggcctcctgttttgggcagtgtctgtttcaccgacaagaagactgctgtcttcattttgcacatatggaaactgatgcccagagaggtgccctgacccacgatcacacagctaagtagtgatgcagcctgctgtctgcacaccaatctgtttcactctgaagcatgtgtatttctctgaaaataactgatttgcaaggctttcatggagtaggaaatttgaaaagattcaaaaagggcatttgttgacaagtctcactcccacccctgtcctgcagctccccagtaaccgcctaatgaggcaggtgtcatcagtgtcttgtttatcacccgcctgcccagggcccctctttttttttttttttttttttaagaggcaggatttccctggagtgcagtggcagaatcctagctcactgcagcctcaaactcctgagctcaagggatcctcccacctcagcttcctgagtagctaggactacaggtgtgtgccaccatgcccagctatccttttaaaaaaataacatctgcatgcacacatatgcacacgtatacagggttgcccgtggatatatgcacatagagagaaagtgtgttctcttaacgggtattttacacttcctcctggagagctgcactttaccagtgatgtggtcgctcctcgtcccactcccatctaaagtatgaaactttagagtttcatactctgattggaaaaaacacaaagggggcctgggagctgccatatgtctggtggcaacagagactaaagcctctctcctgcaccctgagatgcagcatgggggccgaatgttgtcctcagggagtagacagcagtcagggctctgggctgggctccttccggctccattcttgggtgagttgcccatcctctgtgacccttgggctgtgatctgcatgggactgagtccctccccagcagtgtgttgtaatgaagacccacagggccatcactcttgtctctgcagttccatcatgtccccctctatctggagtgggctccagttggcgtcttctccagcacagccccacagaagaaaaagctccaagacacaccttcagaacccatggaaaaggacccagcagagccagaaacaggtaagagctgagtctgagaccaggatggcttgggatcctggtgagggaaaggaggagggttgggggcagcgtgaagtttcttatcaagcctctggtttaaagctctttgttcatgctagagaccagcagggctcagactctcagattttatgggcatgtcctgtaaaaaacagtgtcaaaattatggatgcaatatgcttttagtttgtcaattaaagcttttaggggaaaaaaattactatctattaacaaggattcaaagcagagcaagtataaacaaccttcctgtttcagagatggaccagaatggctcatggaggagggtggctggtatgggagatacttattctcatgtccttggagtggcagtgccctctgatgtccagtgactgcaaagacaggaaaggaaggggaagccgtggcccctgggggccagatagggcaacccccaccccctggctaatgcttcctagctgggaaaaggggtatcattgggctttgggactggacagtactttcttgtcaggactgctttgcaaatcacaagacatttcacatccctggcctgtgcctctgagtgtcacgagtgcccccagtccttgtgacaacctggaacacccccacgcattcctagatgcccacagcgggcagtgtatcccccgcatcgaggacctcatagtctaaggaccatgaccacatcttagaagccaagaccaacaggaccatggtcattctatccagatgttacgattttccttgtcagtaataaccactcacctatacacacccacaatacagcaaccagttgtttaacttattaaaataaggatgttaaaaaaaataataataagtcctcagctactctctcctttgttctcatttttttttaaaggacatttcatagttaaaaaaaaatggggaggaacactgtcagatttaagagttgttttttttgttttgttttgttttgtttttttgagacagagccttgctctgttgcccaggctggagtgcgcgatcttggctcactgcaacctctgcctcctgggttgaagcaattctcctgcctcagcctcccgagtagctgggactacaggcgcccaccaccacgcctggctaatttttttgtatttttggtagagacggggtttcaccatattggccaggctggtctggaattcctggcctcaagtgatctgcctgcctcagcctcccaaagtgctgggattacaggcataagccaccacgcccagtctaagattttagtggaatagactttgctgtacctaacctcccctgccttgtccacatttctcatttccttgtttcactgtgtatcttcaggactggctcagccagcgcaaggcattcaggaagtgcctgtctggaggcctgtttcaatcaggaaacaaaatccttcagtccctttgcgatctgaggacccagaagcatcccacatcgttggggttaatgatgattggtgtaaaccttgtgaaagcccgactcctgctcgtttatgagttaagctctctccactcagtttggatcagggtctccttcaaaacctgtgcctgttcccatcaaaacaaaattctcttcatgtcatcctggcttgttcttaactgtctcccccaaatcacagctgccttgatttttacttcagttaccacccttgaacctaagtaatgttttttttttttggcccaaagcgagttctcctttgaaacgcagagatcagccagggctgagcggcactgaaaacaaattggtggaggcctcttcccgcagccttgggtggcaacaggaggcaggctggggacacgtggtggctcccaaagtgaccgcttccaccaggctcttcatttccttgtgtcctggggattatccctctctgctgtcttcttttttctctaacacttgtcacaatttctatttattctgtttatttgttacttgtatttgtttcctatctcagccagactttgagccgtgaaggcagggaatggggctgtctccttcactgcccggtacccagcaccccggggggcccaggcatagggaagctcggttcacaggtgtcaagggagtgagggaatgcatgagaatctgcctctctgttccttcgaaagatgaggccgggtcatatttgtctttgtgtcccaaggctctggcacacagtagaagcttagttaggtttgaacgtttggttttcgttgttagcccagcctcagaacacagtggtgacaataacaccatcaatcaaaataatagagggggctcccatttgtccccactctcacaaatggccctttattttatttcaaatgcttatcacttcctggaattgtgtcatgaatggttcctttccccggtgttgctctgtcggactctgcccctggaatggccactccacatgccgagaccccattcaccttgctcacggcagtatcctagcacccatgaacgtgccccagtggctgatagtgatcaggaagtgtgtgtgagtgaacccaagagcaaaagcagcagttatgccatgctaggcatggttctaagtccttggcatcctcatcatgtgaggcctagagcccctggggaaatggccctgagatttccagtaagcagccattctgtgactggccaagccacctgcctctctgaggctcagtttccatatctgtaaaacgggcatgatatccgccccgccctctgagggcgtggtgggatgtcacatgcacatcaccagtcttccgctgctgttggtgactgagcaatataaatcacagtgcatcttgggaggctgaggcaggaggatcactcgagtccagaagttcaagacaagcctggacagcatggcaaaaccctatttctacaaaaaatacaaaaattagctgggcgtagtggtgcatgccttgtagtcccagctactcaggaggctgaggttggaggatcacttgagcctggaagatggaggctgcagtgagccgagattgcaccactacactcagcctgggtgacagagcaagaccctatctcaaaaattaaattaaaatttagaaaaatatggcacagtggatagtctttaactcaccatgggcaccagccccaagccagcagccgagctgggtgatcaagatggacaccacacagatgcacagacccccttccccaggaacttttgagctgtggaggacaatagagctgttgggggacaagtgagatgtcacaagtagtaatagaagtgggccctgagtacagaaatgtctgcatcacagcacagggtgcatcacggagatagcatgctgtggtttacggtcagagtgttttcccaccccctgcccgcgggtccccctgcttcctgggtctacattgtaggtttgagcatgtgtccaacagcccctacctcccagaggggctgctttccagggcctgaccatgactcacacaaagaaggccttagagcccggccgctgggcctcctttggcccgggaagttgtgcgtgtctgtgctaattccaagccccgctgtgtcccgcgtcatcggtgaattcccacagagctgatctccagggcctcctcctgccctcactgcacgcagcacatgcacagcccctcctggcgggtgctgttcttttcacctgctcctcccccacccccaccctctttgcattgttcctgaagcttcaccaaatccccgactcccccgttgtacgaggacaacgagggctggggggactcagccagcccacaaagccctggattttctcaggctcccaaggaagaagagtaggaggggagtggacatacctttttttttttattttacccccttcctttctgcaaagctctcctgttctctgtaccagtctcgagggagggggacagcgtgttttatctccccacaaccaagaccctcacctccagataaagggctcagagtggggggaggtcctgaaaagctgcttgcaactgataacagtctttgctgtcagctccagcgccgagagccgggaaaggggaggaggccgcagtaaattctgtggcctgattataataaagccccatgtggcgatgcgtgactggatttgattgtgctaactacagatggaagcacagttcccctgcctctcccaaccccctccagcccaccttgcttttagatccttcccccaactcccccgcccccaggcctagccctgattcctttctcacttcttccctctttttctggttcctggtgtttttgttggcaaacatctgtttgagtttcacaataccttatttttttctttcccatctttcttttgtctcccaacttggggccagcagcagaagtgctttttaaaatgacctttggcttcatggccttggctcctggctgtctccacgcctctctggacacagcctggcctggtgactcggggagcagtagctggctggcaagggtgcccagctgtggactcggacgcctggcactggctggccttcctgggagcctgaagccagcagcttaccctgcagggagaaggagagggagggccgagggctccccacactgggttgtcttatctctcccagggttagggatttccaacattttcccctggatttctctctcagcaaggcctgctgggcagtgtgggtagcaagggtaatattaagaacgaaactgttctctcccagtgctcgctgcaggcccaggctcaggtcttgcagcctgctctgcattcattctcatcatcgtcctgcaagtaggcaccatgatggccagcccctttttagatggaaagaaggaagcacagagagtttgcatgacttgagcaaggtcacacatgtggagagagccgggatatgacctgaagccatcaactctgaggcctgtgctcttacctaagacctcacagctcttctcgatcacaataagggctatttcatgatcgctgtgttctaggcacatgctgagtgcccaacagactcatcgcccacaagtagatctgttctgagcccagtgctggagattcagtgccaactgagtcagactgggtcctgtctcgagctccctgtgtagttggggagcacagatagaggagcaaactgctcaatacagtgatgatggaataggacagggctctgaaaagaagaaagcagaagaatggaacagcgagtggttgggcccaggctggagactgctttaactagagtggacaggatgagctccctgtggggaggctgtgtgagaaggagccaggcctgggaaagcagcagaccagcagaacaggcagaggccagcaggtgcaaaggccctgtggtaggaagggggcttggcaggctcggccatcagaaaagagaccagtgcgtttggaacggaggtgacgggagagaagggaaaagggtgagggatgaagtcagggaaggtggcgagccagggagaggggcagagggcacagcagcagggagtctcttcagttgtccaggtgaggtgaggggtaacagagccatggcctggcatgtggaggaaatagtggatacttgcatttctaaacagcccagcaaagcgcaggtgtatgaggactgctggcaaagataacaactcttcccccttcgaagcacaccagccacagctcatggacctgggaggccatgctgagggctgctgggccctccaggttgttgcccttataagacttgggaactcctggaatgccatgctggggactagctgggttctggggccttgtgggagagagggggaagggccattatctttgccagtggtctgtatacacctgcactttgctgggttttgaaacaacctatacaatacatcctatacaatatactcacattaatttacaattcatttaaacttcaaatgtagattttgcattcttcgtcataattattacattatcgtccttttaaaatttggtaattgagtttacagtcactcactgttctgtttaccaattttcctacaaatgagcatgactttggggtttttgtttgtgtatgtatttttggtattaggggagaggtggttttaataagctctattttataggtaagggtgcagagacagcagtgaagtcactcacccagggccatgcagctaggttgtggcagggctgggactgggcctgccctcctcgtcttttccaggcccccttctccggcagatctctaaagaccatgatgcccttgaactgttagttcttctaggatccagggtgaagtttcaggtgtagggcggttgttgctatgaactcaaggttcagggaaagaacggacgtctccggggtcagccagagcctgcgctgctggaggaaaggcagacccctttgagcacatctttcatttaagctgggtgttcctcccgaaggggagggtaagaggctgacttatgggaggttggagatgccaggtgagccccatgccaggccaactgcacacccagataataggtcttcaccttcctcacagttccctcttgttcttcctgggctggggctaagggcagctgatctgccagggaagggatctgcccattactggtctcagctgtgttactaaacccaaacatcacacccccttgggcaggtgcctgggcatttaaagatgccctttgcagcacaccagccactgctcatagaccagggaggcagggtggagtcaactccagccatgctgaggggttctgggctccccgggttattacccttgtgagactgggaactcctggaatgccacgccgggcactagctgggttctgggaccttgagacagaaagagggaagggcatctttgccagtgctctggggcaggccagatgcagggagcagagcactgaggtttcaatgagctggtgtacttgctgactactgcctaattcaaaagtcacttgccattaagttgccaagatttaaaaaccatgggatttcctctgtaaagctggatttcctacttctcttaatagatctgaattctggccatgctaggttgacctttccgtcaattggccagtgccaagaaggggctgtcctttaaactggccatgagccctcctggtcaccatcatccccactatgcttttctctataaaatttttttccagtcttccatgaacctgtctcaccaaccagaaggtgcctgagatttcgggtacagatgcagcagcctacagaactctccttgggccccctgttttctgtgatgtggctgctgtggtcatgagtgagactgtactcagggtattcaaccacatgcctggtcatggcaggggatctcatcagtgttctttcctttctcctttaatctccaagatgtcaaatgccaaggagggccagctgggtggaaatatcattcactgctgaaggtcatggttttcatctccattgaagttctggtccaggacctgaagtcttagctgccttgcatagctttcgttctcaccattagtggtactttttcctccagctttgtttgaaagttgggttttaagtacaaagggccacaccatggagtctctcttgttgggtaaattgtgttagtttcttggttgggggaggagcctttgtgtagatttcttctttttgtgctggtatctgagtctcgattctgggcttatccgagggaggaaggcagtgtgttcaactgatgttaaagagacagcattatcacggtagctgtttctgtaagggcttaaaagggttgttttatgacaaagtggtcgaagcttaattaggacttgaaagcattaggcttgcatcagaaagggcaggacagacagaggcatcttttgtgcttggcggtgagagtatgtgggatgcagctgaaccccaagaagcccccttacatcacaaagaagtttgaactatgcaagtgaaggtgtgagtagaagaagcaggctgtctccatcagctccagcgtacccgcccgtgggacctccaggtgcttctgccaggctggggtgcagggtttaactcttaggggaggtcactggtcatctgcttagaaacattgagggtgaggggtgtgaaggcacagcctgagaactgctttgaagagttgctaagacagtttgatttcctgggggatatgggaatagcttcagaagccttgtctttggaggaggaatttgtctccaggtcctaatcatgtgacttagggaaattggggagcttgaaacgaattgaacacatttcctcctaagatttctgaaaagatcatgacactgccctcttccaacttcctgaggcttctggcagctgagaatgaaatctacatgcttagcgccactgcaggctagcaggtctagtctccctgttcccaactccctgagctgcagacacacacacacacacacacacacacacacacacacatcccttgctaactcacaacttcacatctgctcttcctctccctaaaatgctgttccttcagagtggaagcggtacaaagtgctagcagtgacaggttgaaatgacgaccatccctagtgccatcctccagaaataaaccaggagcactttgtgcatctccttcctgtgatcactgtgtgtgtgtgtgtgtgtgtgtgtgtgtgtgtgtatgcacatgtatgttttctcataaatgtgcagatcatggttttgttgttgttgttgttgttgtttgttttgttttatttttgagatggagtctcactctgtcacccaggctggagtgcagtggcatgatctcagctcactgcaacctctgcctcccaggttcgagcaattcttgtgcctcagcctcccaagtagctgggatcataggtgcccaccaccatgcccggctaatttttgtgtttttagtggagacaaggtttcaccacattggccaggctagtcttgaactcctgacctcaagtaatccacctgcctccgcctcccagagtgctgggattacaggcatgagccaccgcacctagcttagatcatggtttggattacattgaacattttctaaaattacagttatatacttttttaatatcttaatttttctctaacttttatatgatgagctttgttgtgtgtcattaaacgttcttcggaaacgacatttttaatgactacatatttttccagcttttggtggtactctaccttacctagtctcttgtttgtgaacatagagtattttccgtttttccctgtgatgcataactctgaatttaatatgtatagacaaaaccacaccttttgtgtatatgcttcctgaagtaatgcatatgagggatttcgatggtatgtaacattctttaggttcaagggggtatttagactcttcctaagttttgttcccattctgtaattttttaaaagttttaagttgcattttagtttgaaagttcactaagtgctggtttttttttttttgtttttttttttttgttttttgaggaaaaataacgttttgcttaggctcacggttcagtaaaacagttcacatggtaatttatttccaagttcaaattagtgtgagctggtcctgtttaaggctccatttgggggctgtgttttgtattcctttctctttacaacacagcaggggcaggactttctctctgtctcaagagttgctgaagctcagcacaagttggggatcacggtgccccttcctgccactgcccgcagaggcagaacccctttacctagtgggctttttgcagttggccccagggctctggtgggtttgacattatttcatggatttgatgtttttgtttttgtttttgttttgatgggggttcagtgcctgatggcgaaaccccagaagatgaaaatccaacagaggaaggagcagacaactcttcagcaaagatggaagaggaggaggaggaagaggaagaagaagaagagagcctcccaggatgtactctgtttattaagaatctcaattttgacacaacagaagagaagctgaaggaagtgagtggtttctcagcccaggagggaggggcgtgggatgggaaaccccagtctactgatacggccactgcatttattctgccctgaaacatgatgcgtgttaatatgcacttgggagcaataaccagcaccacctacttgaccctttcccctggggtgtccagtagatgactcaacggaagactagagcagtagcaaggctggccgggggccctgataggggctaccacatacgctttggaggcataccggaatctttcgggagaccgtgtaatatgaaggcagtagttgtttctatgatgtaaatacccaaaagtaaatgtcagcacaatcctctcgcccgctgggaataatggagaagccacatcagtgagtgagggtctgggcttgaccctggaatccctggatggggtgagatttttgcatttatgggaaaagggaaggggatgaaaggacagggagctccacatagaaggttagtaaaagccaaatgagggctgccctgagtgagggccgggggcttctagaaggaagtggaccagcgatcaggaaacaacggggcctccagttccaaaggagtggggtctgcaaggtccccaatttgtggcacctccctcaggagactgtttatttctagagtctgggcttggcacagaataaacactcagtgggtttttcagttttttgttctgttttaatgaataacagcaggctgatcgccatcaacttgttctggtaaggaagctggccataagaattgacctgattgatttctaaaaatccctctgaaccctaaaattcgatcatggggtcaagagagaagacagtgtccactgaacctcaggggtaggaatatggtgggcagaagatatggaggcaaacattgggatgtggtagagaggcagagggtcagagcccctctgacaccctctggctcagcctctgtgatgtgactgtccccttacctagtagaagagcagccccaacagcagagataccctgactaaagcagcagcgtttaaggagccaagattcaccttcttcagcaattggaaacccacccttagacttgtctttggctatttcctggttccatttttgttttgctttgcttttaaatggcggcatgtacttgtagcatccaaaaggtagatagatttgaatatgtcagatagatttgaatgttagttttattttttttctggtgcgggtctggtatgggaacatcattatccgggatcattgtttcctgggagatgcactcaaacagcagcccaagagcatcctctgaattcaaggattctggagctggaagtcatagccaagatgacctagttcagtctcttcatgcaacatggctggagactgagcttcagagaggccagttcactgtccttaggtcacacagtccacttgaggccctgcggggaagagcccgtagttcccagggctcctgtctcagcaccttgagtggagagccatgcgtagcgatcagtctacctgggcttggatcccagctttgccccttgctaatgatgtgaccctgagtgagtccttcagcctttctgtgcctcagtttcttcatctgtaacatggggatgttaatagactcttctcatggagttgttttgatgatttggatgaaggagatactccaaataaagcatctgacactttaaacacaagagtcagtaagcagctgctgctcgtagtgtttgtttctcaagtttctccccggcccctgggcttccccattgctcatttagtgaatgtttattgggtatctgcctttccctgggctctgtgtgtagtgctgaagacgtagccgggaaccaggtaaacatggattttgctctgggtgggtttcaaattctagcaaaggagacagaaaaagtaaaggggaaaatagaatagactatgacttaaaatttctgtaaaaattattctggcatttggtgcagggggcagtgagagaggtccagactggggcagtagaccccatgcttcggaacttaggcccagcttcccgattgcatgatctgcagtcagtctctcgctgttctgtgtcctacttccttcttctaaaactggaatgagaaacaagcccagctgctcttatggggaactctaagggactgcccaggttacttaaaggaggtcatcactcatcacctcaaaatgtttttgggaccccaaggtgtccatatggcaaatttgggggtatagtgtttgacaggtgcccttgcctgcatagtggtttagagctgctgatgatacttgttactttcttatccaggtgttttcaaaagtggggacagtgaagagctgctccatctccaagaagaagaacaaagcaggtattccgcatgaaattcggaaagtgttcagtattcagccggaaagagtggattccaaaagaagctccagcttcagacaaggggttggggtagttctcccttgcacattttgaaggttctcttttttctgaagcatggtcagcctcagactctttgaaatagcccctctttctgttcccctggagtctcctttccagtcgaagcagcctcttgggtcagatccttctgaacctagagcctccaccacctcaaactgtcaggggtggtttcagagcagtaacatttgtgggcagatagtgaggaccctggatggtatcaggaacctctgcctcctcccagcacttttgtgctctggaagtttcctaggaaatagcaagaaacaaccagtcttgcactctccctcttcccttctgagggagataacccagttgtagaacttctggaacgttctaccgagtcattaaccacacagattttcctgagtcaataaccatgcacctcccaggccagtgggtacatggacaggcagagagcaccctcatctctccattcggccctgggtgctattctgagtctcctggcctctgctgggctccagccctggcttcctgcaggggatacgtccttgctttcgcacagccatgccagccctatcctgagtccctttggtttggcaggatttgtaggaatgctacatgtgtcagcccaaactgtgtcctgagcacctactgcatgcaaagtactgggtggccagaatgtctgctgttgagttactcctcagacagtccccaggccccaccaggcagcaggcacggtgttagttatataagactgagggagacgcagccctgcccgcagcatgcacacagtctagctagagagaccaatgtgctggtggttacagcagagtgcagcaaggggttggatggcagggacaggcgtccagcacaggggacaccacatcagcccgaggctgggaggggtggggggcagagcagccaggcggcgggaacaaggtgttcagaggccactcacactgcagtggccaagcctggggaattcgttgaggaagaggcaggagatacgcctacgcctagaaaggtaggcaagttccaaaccatgaagtggcttttatgccacacacacagaagagttttgacttttccccagaagtactggggagccatggagggttctaagcagacatacagcacagaagtcagaacatcccttgtattcgtttgccgggctgccataagaaagtgccacagactgggtggcttaaatgacagaaatgtgttgtctcacagccttggagtctagaagtctaagatcaaggtgccagttgatttggttctttctgggggctgcgagggaaggtctgttctaggcctgtctctgggcttatagatggcctcctccatgttcacagggcatcctccttctatatgcccatcccatgttcaaatccacccacactttttttaaaagaacagcagtcatccaatcatattggatttagggcccaccctaatgactgcatttaatttatttttatttttcgagacagagtctcactctgtcacccaggctggagtgcaatggtgtgatctcagctcactgcaacctctgtctcctgggttcaaacgattcttgtgcctcagcctccccagtagctgggattacaggcatgtgtcaccacacccggctaatttttgtattcttggtagagatggggtttcaccatgttggtcaggctggtctcgaactcctgacctcaagtgatctgcctgccttggcctcccaaagtgctggtattacaagcgtgagcttccgcgcctggcctgtgacctcattttaacttggttacctctgtaaagagcttgtctcagataaggtcacatctgagatactgggggtcaggattctacatgtgagtctgggaagacactgttcaccccttaacatccctgttctccagggtcttcagatatagttttgggtgcaaggaaaggcagctaagtaccaagttaattatgagaaggaccagttttgaggatttcaggaaaaaaaaaaaaaaaagttattgctgaagtccaggatgggggtcagattgacagaggtgcacccaggccagcaggtggaggtggctgtccctgcctctcactgcgcccagtcagatgctctgtggggccagccttgtactcctggggagcactcttcagcatgttttagaagtggttatctgatctttccatgtcataagcagctcttaaaacatacactgtctttttcaagggcctgtatttgagacccctgttctctggggcccatccgtcacagtttggtgaaaatctaaacaaagtatatcagtcagggttgcagcaggaaacagaaagcactctcagctggggttggagcagagatgtctgtaaggaaggggccgacgtgtggctgggctaagggagcccacagggatgtccaggaagtgggctctacaggaagaatgcctttccgcctgccgtgcctggaggggcattaaaggaaaacgtgtgaccagagctcagctgagagttggagccacgagataacctgcaggagtggtggccgtggattggacgtggccactgcagagccacccaaagcaaggaggcgggtggggacatgtggaaggatccagtactccagcctctctctcctccatccccccaccccgcaatgccagatcagagcctcttgctggctgatcccaacaggaagcaaggaatctggggagcccaggtagagctgtctatagaggtcagtttcccatagaggatggtggcggagagtggatctgcatagtgtcagtaactcagagttgaacttgaccttctcacagttgcctttcacacagtcactgcacttttaaaatctcacaggtgcacagacatgccagcccaccacctgcagcctcgagcctccaaaagagagctttggagcagtatctgcttgcagaacgaacatttaaagtcgccatggggtggcactggctgtcagttctgtctgagccatgtatgggcaattaatggaattccttaatgcagttggctcttattttgtaacacctgctgtcaatggaaaggcaggagcataggtctcacaaacagcacagtaaaggtaaagataggacctgcaaagtgagccaaaggtagagagccttgagcctcatttgaacccatcagactgaagggaatcttctttgaattcacaataaagaagaaacctaacaaatatgtatgagatgctggggtgtgggtggaaggtggggggacatcaaatctaatgtcaagagggcaagatgtaattagggatcttaatgttttttagtgccctataaaaacactcctccctccccagttacacatagtgaggaagcggaagtttctgatgaaatttttgcagtattctttgctatctgaactcttgctacttgcaacctagaagtaaggaaccagagaagtttgaataatgcagtcgcccacatgatccaaactttatatctgaaacccaggaaactgaatgtgattggctggtgagaaatatttgtgaagagcaagcctttggtgcgtttgactctcacgcacatattcattttaggcattacgtgtggaggcagaggactgcccaggtagaggttttgccacttgccttcatgatggtcatctctcttaggtcagtctccctcccaaagcagaatcctattatgaagttaattatcatgtcagtcatctgttaattaatagtcaaatgggcctcaggtggcagccatgttaactgcgttggctgattcgtcaagatgactaatgataaacagcaagccaggtgctgagatttttggggggaatgaagggggtatgaaaagaagaggaaatacagcgcaggtctgggggcccgtcacagcccttgcacttggccttgtgcttccgcttcaccgactggtgtgatttccacctctctctctcaggagtgctcctttccatggggtttggatttgtggaatacaggaagccggagcaagcccagaaagctctcaagcagctccaggtaaagtgaagattctcagctgagggccacggaggcacttggcaggtagtgggaggtcccgtcagccctctgaaattgagtgagaatatgtatgaagtctacacttgaccgggcccattgcttttcccagatctctacgggactgtggcccaagaaaaaattaagaacctttcccaacactccacggtcaccatagttcattcatttgatccacagcactattatcaagggcctgacgtgagccaggggtggtggtaggcctgggagaggttgctcacgtgggcccctctttctggtggggtagacaggccatggacctctgaataaacatgcaggaccaggtcatgaagacaaagctgcgagttgggggtggaggtggggcacttaggctgtgtggtcagggaaggcctctctaaggaggtgacagttgaggccacacctgcttggccagaagtcagctgcacagagatctgggagggaggtagttggggaggagggaccatgtgcagagggtctgaggcaggggccataaggtgggaatgagcttagtacgtttgaaaagctaagaggccactgtggcaggggcggcgtggggtggcggttcagggtgcaggatgaggagagaggtgtgcagggcaggatcttctaggccattttactgctcagcctaaaggcagtgggagaccattagggggctgtgagcacactggcttctactccagcctctgcagctgctggtgtggagaggggacgatggctgggggcagggggcaggtaggagacccttgagtcatccaggcttggccagttggggagaaggtggggagaacagggctgaaccgaaagctgtttggacagagactcaacatcctattcagacagagaagggagatatgccttcctgctggatcctaagtacaaggacagattgatactctctagcaggaggggagttagggctgtggagagcaaaacagcctgggattggcaccatcccaaagggcaaattttgcaccagctataagttcttcttttttcttgagacggagtctcactctgtcgcccaggctggagtgcagtggcgcgatctcggctcactgcaagctccgcctcccaggttcacgccattctcctgcctcagcttccagagtagctgggactacaggcgcccgccaccaagcccggctaatttttcgtatttttagtagagacggggtttcaccgtgttagccaggatggtctcgatctcctgaccccgtgatccgcccgccttagcctcccaaagtgctgggattacaggcgtgagccaccatgctcagcctaagttctaatccagaagctctgtggctttgcattagatgatgcatcctgatgcatggtgcctaggatggccttcagctaaagtgaagcagatgcagtaggtgttagtagcttgagaaggtatcctctgttcccttcataatgccccacatcctaggcccttcctggtcaggggctgtgtactcatttaacttaaaattggctctgcaggttcagtggtccgtgtttctctttcacgcgatataagattctatgaaatttcactttgcacgtgtactgtattatgttctggacatcattgtgtgcatgcatatgtgaatattgcctccaagaattgttcctacgaagctctgtgtgctgtattttatgggagatttaagggattttcaagggtaattttgctaatacaccagttctgccttgagggaccaatgttagaacctagctttagatgcaactccactaggatttagaatatttttcaggaacatacaaactaaacccaactctctctgcaagccagacctaagggccttactttgcctgaacatgcttataaacaatggaaaattccgtgtcccttgaatgacatctaggtcaaggcctacctgtggcttaagagagcgtccaagggctgagtctctgaccaccagctgctgcctgggcacggtgtgagccatttcagggaaaaaccatcctctgtcctctagaccagctagccccactccccggggaacaatcaggctcccatctgcgagccagggctctgctctggtgaagggcaaggattcgggtgagtatttctcgggacagagagatgagccatgttgtcttctctcttagggtcacgtcgtggacggccacaagctggaagtgaggatctcggaacgagccactaagtgagtcttcagtgtcctcatttcctttcctacgagctggggcttcctgtgcttggtgccggccaccctggaggctgtctcacaacccttcaatgtcctttccacctatccctttaccatttaggactcttcctaattaagatgcctaattatgttggcatttaccaagtccgaccctgattttcccagtgaactacaacagtgttagtcctttgggtgaatgtttaatgcacaggggcttttttttttctttttttttttaataagaaaaggaacaagtgcaggagaaacaggcaaacaacactcatcttgggataaataaaccaaggaagagctggaggttgctggtgctgtggatgaaccagaagaagctgtaaaacctagacattcagctttatgggacgtgctttcttagagctgaatggcagtgcctacgatggcctccagttaatgggaaagagattccgtaggtgttagagatggaggcagaccaatttgcccaatgaccagtatactgaagtagggggattgtttggagatttatctttgcacctccatttctacctgcttgtatatctaaatgaactattacacccgacgtgcctccaacagtgtccggcacataacaggtgcccagcgtaagccattattgtcattatcatctacttgcatcgggtgataaaatgaatgcctctaacagccctagagctggtttcagatatttatttggtagttttcaacaagttggtaatttgttgtggtcatccggcaaattagcttccagcgaattgacctttctttttccttctttctttgttgttaatgcttcctgtgagtccagcttgggccagctctggtgtttttcacccattgtggtctgtgctatgttaagcatccttggagggaagatggcttggtacagaggccctcagaagtctagtgggggttcctgagctgccagtataacagaaggagctcaggctttgagccccacacctgtagtttctaattcaggagctctgtgaccttgcatgggtgactttgcctctgaagtgaaacgtgctaagtagaggttgtgtgttaagcatccagcacttgcagtgcccatgagcactgagccagcagtttctttccagtaccctatctccagagagccagcctgaattcagccttgcaaggtctcacttcctagccagtgttcatggaaccattgttttactcaagaaaaaattacagcaagcccactgtgtaccacatcctccttctaggcatgggggatagtgtttccttgggagtttacaccctagggcagtgctgttccatagaagcttctgcagcaatggaaatgttccacatctcttctgtccaatatggtagtcaattgccacacatggctatttagctcttgagatatggcaagtgcaactgttttagctatctattgctgcatcacaaagtatcccagaacttaaaggctgaaaagaaaacattatctcatagtttcatgggtcaggaattcaggagcagcttagctgggaattctggctcagggtctctcatgaggttacagtcaggatgtcggctagggcagcagtcatctgaaggctcagctggggctggtagatctgtcattaagatgatacactcacatggctgctggcaggggtcctcagttcctcaccttggggatctctttctgggaccgcttgagtgtccccatggcatggcagcgggtctctccagagtgagtgatccaagaatggggaagaaggaggccacaatgtcttctacaacctagtcttagaattcacacaccatccctctgctgtatgctgcttgtcacccagacctgccctgatacagcatgggaagggattacccagggcatgaacaccaagagccaggaatcactgggcaccatcttggagcctgataccccagcaaccgaggaagtgaatttgtagttttgctgcttctatttttttgagacggagtctcaccctgtcacccaggctggactgcagtggtgtgatcttagctcactgcaacctccgcctcctgggttcaagcaattctcgtgcctcagcctcccaagtaactgggattacaggcgcctgccaccacacctggctaatttttgtattttcagtagagacagggtttcactatgttggccaggctggtcttgaactcctgacctcaggtgatccacctaagcctcccaaagtgttgggattacaggtgtgagccaccatgcccagcctagttttgcttcattttaatttagattcaactagccacatgtggctggtggctgccatatgagacagcatagccccagaatgacaagacaaaaaaaagaaaagaaacatgattaaatgtataatgtactagcacagggatcagtgccaggaagagaaatgaagctgggggctgtgggtgagggggctgccattttaatggagacagggaaggcctgtgaggaggtgacgtggagcaggcctgaaggaggtaagtcctaacatggtcattatcataacagctgctgtttattgaatgtttaccacattctgggtccagtgctgagtctgcttattaaatcttcaaacaatcaaattaggtgggcctatcattacacccattctacagtggaagaaatggaggcccagagcggccatgttacttgcccaagatcgcagagatcctaagtgtcggatttggcattcacacccagcttgttaactcccagccttgctcacttccctaccctgttttggtggagtgggaggtttccctgggagagcagggagacaggccaggtagcactgcattggggatggccttgaacctgggctgagagtgtccttgctcgccacctggtccatctgcatggttaggcccccgcatgttcctcctcgggttattgatgaagtgtcacaagacctttggaaaccaactggggtctttctttgcaactggagagaaagacacaatggagattgggtttggtgagaaaccagccccacccttagcggggctccttaagtccctggtggccccggagtctctcaaatgaaggtcagcagccacccaagcacggatgtgtccccctgacgtctgcagctgttttgggtcctatcacctggtgggagacggccttcctctcctttcacgttggtcccgcaccccacgcacactccttgaatccatcacctgaatattctgatggaggcgtagtggagtcaatgttgggcaggagctgctgaagctccgaataacttggaccctctccccccaccactccaggccagccgtgacattggctcggaagaaacaagttcccagaaagcagaccacctccaagatcctggtgcggaacatccccttccaggcccacagccgggagatccgagagctcttcaggtgagaacttcaggtttagtccaggggactggcgtgtgggcggggagcctgcccgagtctcagggaagatggcctttgggtcctggatggttccgttgcaggccggcacagtggtctttcaaaggtcatcttttggctgcttttgatttatctcccttaatctcagatgtggctccccagagcactgtgcaggaaaaaagtcaaaacagccaggcttccccctctccgaggcagatggagaaagggcaggcaggcttccctgtccccatccacaacgtgcaagaggggcaggggccccagtggctaaaacccagccctacccatgatctgcttgaaatttcctccatccaggctacccctttggtttaaggtgctggttttccaccttagccacacattccagccacctggcaatggctaaaatacacctttcccgaggctgcacccccagagagttggattccatttttcaacagtggggtctagacatcggtgttttgctaaaagctccccaggggatcctaatgtccagccggggttggggaccagtggcctaaatgactctatggaaatgaaggcgaattacctgcacacataaagcagtccgtcagcacctgcttgcacaggggtggaaaatgcagctgtcgcagggacccagccggtaacggcagcaggctgggtggggactgagcagcaggcgggcctctctctggtcatccagctgggatgccatgcaggaactcaggcttcgtaagaccagttcccatgttttgaaagagaaaccagccatgtggattcttaaggagaattcatcagcaactaattcactttttaaaaacaaaacaagtctggcctgccccagggcccctagttggtgatccctacgctgccatgttacagtgtttggcttttcagattaggtaggcaccacccagcaccaagccatgaatgaaagaaacgtcctcatatcagggcctaaggggaatgcttgaagccaaggcccccccacccaaggcatgggcagggtaatagagagaccatctagctctcagaatgcaaaggcagatgaagtcagcttcacctaaacacattgttgaggcttcggtgggatccaggactgctcgggggacctgcagcaccatggcctgcgcgtgggtgaacatttaggattctagacactaggtctcgttcgttcattctacacttgcacaagggtccaagagtgaagcctctgttagagttgccagttagcatcttgcaaggtaatctgtggttacaaaatcagccttgtgttttggagatgagaaacaattatctttgtgtggcatctaccttctttgctctcactctgtagtttgaagaataagaagtcatgtggggaacttcagatatctttgtcctccttttcccctctgtttgttctaaatcatacactagtattcagttcataaacagatgtggtgtgtggtgagctgggatctgaggcagagaccaatcctgccagtatctgggaagcaggatcttagctatgatctccgggtatcctgcacagcaggaatagcctggcgagatggggtcatgacctggggggaggtttcccatttccctaaacctcgactgatcagtcgtccctccaggaaggtacatatccttagcctctcggtatgtctgcttgtttaaacatgctctgctttttaaaaggagtccaacttaagaactgccagattaaaacgggcttgctaagaagagcgcatgttgatcgggaaataatatcccgctgaaatgacagtttcacttggttctgcagtatatttaggatgacacttatccggggaaacaaaagaccacaagggaagagagagcactttgtgtgatctcatgtattatatttatttttagaagacagggaattagtgtccactgaacataattacatgtggtgactcttctccttgccattgttctgatgagagttttcttaaaaccctggaaacgtaagaccttcttggagggccgtacctgctattgttgttcactccggctggggatgtaaggcagttcctcgttgcagacagcaggggtcgctgtgagccttctcagggacttcaagattgtccagggaagccccagacaggatttcagacaaagccactggccggtaaaggtcattagccagggggaggtttcagggtttcggggaaccaagctggtccatttgggcaggcaggttctatgggtttctcctaccaggtgtagtaaaaatcacaactcccttttattacacgcttgctgtgtgcggggctctgagcttgaatgccttcccgtgcagaatcacctcttttaagccgcacagcagccctgcgagggatggatgctgtcattccttttgcacccagacagaaactggagatggaaactagggagatggagtgtcctgcctgggaccatgccgctgaatggggatttggatctaagtcagcctaacccagagccccggcttggagccactcctctctgctgcctgttttcttgggtctagaaggaactgtcttcctccagatcattccagtgggaccaaatgacagcgagtgtgtcatttataccaggcactgtgctaggcacgaggcatgtagccatttcaggagagactcaggtctctctgtgggggaccagagaggaaactgacagggacagccagtgggacaggtgtgcaggtgagagtgcagggctccggagagcattctctgggcagggcctcaagctaccccgcctgctggaggggagagaaggcagcctcctagcccgaggcagcagtgcctggggcccttcccggaggccaccagccttccactcgggcctcagtgcaccacactccagccccttaactaaccagccttgggttaaaccagacaggcatcaggaggcactgcatttccatgtttctgtgggatcactgtctagggtgactcaaggattatgcttttggaaactcagagagaggcacagcagtggatttgcagacagcgattctcgtcttctctgtggctctcttttcggacttcagtttcccctggcataaactagtggtagtaacactagtgataacatacactaatttgtgatgatgctgtggtaatacgtgtgagtgttgatttctttctcatgtccccggccccgtgcgctgcagtgcctcatgtttctgggggcccattcatcaccgtggcccggtaaagtagtttcatgtctctgtttctcagtgaagaaaccagctccagagcccaaattccacccactgggtcatcagatgcctcaggccaccacgctgctcatcggcctcaaggactataaggattaaatgagattgtacaaatgaggcacttaatccagcccctggcagagtaacaggtagttaataaatgttgactgtggtgttcaacagcaccaaaccagtggagccaggatttgaacccagggtttgaatctgagtttatagacagaacccaggtccacaacggcagtgctgaagccttgaaggtcctgggcagcgttttcctggtttttttgtttgtttgttttgtttttgttttttcttctgtaaaggaaggctgtaatcctgtaatcctctatttctgccccattcgtctgtgttctggggtagagagtcaggaaggaccttgagggacaggctgagccagctcccctttatcccccaaaaggaaatgtggaagacacacaaataggggtgtcccagactgtgcaagtatgcatgtacacacaaacttctcaccccaccactcaaacaaggacggaaatggccagtggtcagctcacccggcaggtgcccagagtcttaggttagtatggatctaaaagaaggaaggaaggaagtggagactgggcttcccacccccccaccgccaccccatctgggtttgctctggagtaggtatgttgcacatgtgtgttttgccatgttgtttattttcctctttccctgtctccaccaggaagtgcccagggcagagaggcagttcagggcctggatcgggcctgagtgtatacatgcaaatgaagcttacacttggggctctcctgctgatacacagcagctgtatgcagagctcaagcgtttggtggagagggtcttatttccacccccatttcaaaagctggaagtggtgttaaaaacagagctggctaatacaggcatcggggaggcatgggacatggggtgaaccacgtgccacgcagtctttgtatcagttcgtccacacagcagcccaacatggtaagactgttgttaaacctgccttctatatgaagaaactagggtacagacagtaacggtgctattcctagatggaccctcggcttgcccatttctgtcatagtccatggggcagccttgtttgagccacctgggttctggcaggcagtaccccccatcttccaggaaggaggttctgcaaacaggattggcctcacacttggttaaatgcactgctgtcaccatcttgaaattcttagtaatgtgtgaacaaggggtcctggatttttcttttgcgccaggccctgccaactatatagccagttctgcctgtgaaccagtagaagaatcgggaagtttggagcctgggtgtagtggccattggccaggcttagtttgctcgcctgcagggtgggaatgaagagtgtgtctgcctcccctgcctccctgcccaggcggtgaaaggctcagggagagggtgggtggacaggctgactaaaggagggaggtgtttatgggagcatgtctgtcactgtcatgatcatcactaaggccctctgtggaaactgctaaggagcgcgtttcagacctgcctctctgaggatggcgtgggaatgtctaggcagctctgaagtccaggccaggtcaagtcatggtgaagagtcagttctggtgataaatctgtggattcaatgcacttctctcccttcctatgctatgtcatgttagctctccgggcctcagttttcctcatctgtaaaatggggatgaaaagccctgcctgacagctgggtgataaaagatgagtcaagtatgtgagacgcctagcgtagtgccgggctcatgaaaagctcccagccagcgtagctgttattactgtgtttccttctggtggtctgccacgtcaggaacactgtttggggttaggtttaggaagacagtcaagtgggtctggaggtgagaaggaaggcttgggtggctcacgcttagcctgtccatatacacagtactccagagtcccccggctcactttccacctgtgagcttccgctgtcttctctgtgggaagctgacatccacaggttcacagtcaagacccgatttcgctttcttccttcaccgctccctcccttcctttttaccgacaggtggttcacgttgccttccagccattggagtcaggtggacatttgtgagagagttaccttcttggttggggctttgggcaattagcttttccttgagcttggcccctgagagaaaatcgcccgcatggccatcaccagggtagcaaatgctaaaagtctgttcccgcactttgggaggccaaagcaggaggatcctttgaagctaggagttcgagactatgctggacaacatagcaagaccccatctctacaacaaatacaaaaattagctgaactgtgtggcactcctatagtcccagttactcaggaggctgaggcaggaaaattgtttgagtctgggagtctgagtttgcagtgagctataatcaggccactgcaccccagcctgtgcaacagagtgagaccttctctctaaaaaaatagaataaaatgaggccttcagcacacgccagcacactcttccactgactaactcctgacccctgtccagggtagctcagcctgtcctgcggtcctgcagtcccgttaccattgcaccccagctgcctcagctccccttggaactgctccatgtggttgcttagtgtactgacccccaacccccgaatataagctgggacactctgactggctcactgtcatgtccacaggtgcctgctacatagctggtgctgtgataatgtttgtggagtgcatacccactatgtgaagcctgtctcaatacaatcctggtagaaacgcgaagtgtaaggcacagagaggttcagcagtctgccccaggtcacacagctctgaggctggtcacacagaccagcacaaccagctctccctccagagcttcacttatcgccctggaactcctgccatgggtcagggatgtctggtgagagcaggcagcaattgcaggctggcagatggagagctacttttctccttttatctcagcatcttttttttttttttttttttttttttttttgctattttcttccttgaggtgtgaaccacctgctagggtgtgaatgggcgagagttcacaacaggtgtctggagatcttaattacaaggcttgcatctcctgtccaccccacacctgttgtgcctgctttgtgggcaacgtctgtccatccctggcctcctggccttctcatttcctcttgcagtggccgtgacagtggaaggagggccgaggacagcttgctcactcatgctccccacacacacctcccttgtctcccccacacaggcatggggtcactgcccgattgactcctggttgtcagcagtacttttccaaaagcttccagccctttgagccctttcatctgctagggcagagacacagagcaggatgggggaagacttcccattctccaggctttccctgaagaaactctgcaaaaatcaggctcaggcagctcctgagagccagccaggcaggatgggttgagtgaggtgtgtggggtgggagaaaacccttagccaagttctcaaagggatgggtgaggaggatgaggctgaccccaggtgtctctcctctgcacaggtcgtctcctcccaaatccacttccccagagaggccctaggtcagggggcatcacagccactgaccactgaccaactccagctatgcttgctcattattgcctggtgctttggggcttccgcagcagagttaagagcttgcaacctcatccatatgacctcatcctaccttgatgaggtatttccaaatatcgatgctctggccctggctgggaaaagtttgccaacccctggactcagttaaacacaaggcctaagtggggatttggcacgtcctcacagagcactgggaacctgaagtcagaaaacggggtttgtggccttctagtttcagttacacagataaggtatttttttcctccccttataaaacatacaggggttacaaataaagctaagtcctgttgaccccctcggagggctggccgcgaggaccgggtcatttccccactctgccctgttttcctatcaggatattcccactcttcctactttgctgtggtttgaaaggacggaatgaatgcgtgctttcattccttcagtgtgcatggggtgcctcctgtctcctctgcaccacgggagatgcagatttattcccctggcattcctctggcgttgatggagcctctctctgtaccaggtgcattgctcggcactgggaaggtggctgtgaacaaggcaaagttcctgccctcgtggctcttatgttctaatggtggttggcagtaggggcagtaaacaaatgaacaaataaattccgtgacatggtggcatgagcgttctgaagacagttaaagcaagagttaggagggatgagaataagaccagtaccagtttctgtggctgccatgacaacatgccacaatgggggtcttaaacagcagacatgtattctcacagttccagaagccagaagtcccagttcaaggtgtgggcagggccatgctgcctccgaaggctgcaggggggatccttcctcgcttcctcccgctcctggaagctgctgccaatccctgctattgcttggcatggggctgtgtcagtcccgtctctgcctctgtcgtctctggcgttcttccttctgtgccttctcccgataaggacaccgggcattgcatcgaggacccacactaatccatatgaccccatctgatcttgatcacatctgtagaggtcctatttctaagtaaggtcacattacaggtttcaagtacacatcatttgggagacatccagtacagggaatcttagattgggcagttaggtaaggctcctccaagcaggggacatttgcgtggagacctgggttgtgaaggagtgagcacgtgcagatccagagacagtaaatgccgagccccgacgaggcaggaccagccttgccccgtgtgattgccagctagcatgcgtgcagaaaagtgcacagatcctaagcggacagtatggcaggtggtcacaaattcagcaccactgtgtaaccagcacctggctcaagaggcagagcatttccagctagcccctgcccagcgcctcctgccagtcactacctgccccccaccaagagcagccactctcttaacttcgaaaaacatatattagtgttgcctgtttttgtactttctgtaaatggaactggaacatatattctcatttgtgtctggcttctttgatcatcattctatttctgggatccgcacttgctatgttgcagttgtaatccattcattgttgtgaccatctagaattccattgtgtgaatatgttgcaatatacttacccattttaccaatgagcatttgggtagttggcagggtttgggctatttcaaatactgctcctgtgagcatttctttggcatccacatgcatgtgtccctgtagagtgtatgtgtaggtatggaattgcagggccacagggtatgcatattttagctttagtagatatttatttccaggcaggtttccaaagtggttgtatcagtttgcgcttccttccacggtcagtttatggtgttctggtgcccctcatcctcgtccacacttggtgttgtctgtcttttccttagccattctggtaggtggataatggctacagtggtattactgtattatggttctaatctgtgcttccctgatagttcaggaagtcaaatattttctcctatgtttatgagccatttggatatctattgtctcttgtgggatgtctgttcaagtcttttgcccactttttaaaaactggcttgtatgatttttaaatttatttttcttttcaattttctaattactttttatttaactttctgtattctggactgtgtgattgcagtgtctcccattctgtgggttgctttcaccttcttggtggtatcctttgatgaacagaggctcttcacttagatattgtcactgtcattctttctccttcctggttataactttttgtgtctgctaagagatccttgcctcctctgagctcatgaaggtggccacctatatttttctctaaaaggaaaggcttctctttgacccttcacatcaaggtatgcaatccatctggcattgatttttgtatatggcgtgaggtgcagaccaaggagcattttttttccacttggatattcaattggcccaatatcatttattgcaaagaccattctttcccctccctctgcagcattgattttgtcatagatcaggtgactgtgtgtgagggtctgcttctgactctaatctgctccccgggtctatttgtctgcccccatgccaataccaacctgtgttaattaccaaggctttgtaatagacttgatatccagtggctttgttctttctcgtgattgcctggctggggttggccattagcacttcaggtctttgggctttcttgacttacatttgtaaaagatcttgtaaggagaaaagtctctcagggggactagcaggtgtgaggagacccaagagggggtttttgcttcacctgggccatagctgactgcggcttggaccaggcgtcagccatggaagtgggatgccaggtcagtttgggaatatgtttgatggtggctttggtgaggactatggcagagagagggattgcagatgacacctatatttaggtcctaagcagctagctggatgattggccacattcggggacgggaaagtctgagagagctgccatcttggtggaatgtgcatccctcacagccccgctccacacacacacatcctctcctcacctgtcatacagcacaaataaccactggccacagtcgtgatgccaaggttgtgtgcctcaacccatctggccgtgtgtctatgtgtgtttgggggcttctgtgagcattcctgttgggatccatgcatgtcagcctcagcaccagcatttgagtattgatggtcctcgctgctgcattctctgcctatgtgagcaaggcaccattaacgatacctcccgatgtctgcacagcaccttacccaagggcctgccggggcctgaagtgcttttgtgctcaggatttcattcattcccccgccaagaagcctggggaactgaagcgcacaagtcagatggcttcccagctataaaaccctgcacaagtggcaaagccgtatttgcactcacagatactcttcctgtgctgtctttcctattatgaattcaagggaaagagttttttttaactctttcatgtgcccattcagcaacatatctgctgagcccttacaacatgcctatcttcagcaagcatcacccctgaggttttactgtccactgtgcttatcaagggcagtccacaaataaccacgtgcttattgggagctcagtgctctacctcctaccctcagaataaccacagtctaaggaagtgatgagccacctggaagatgagcacaggtaccaggcagtgactacaaaatgccagggaatcagttccactaagggaatggccccaagacagaatgtaggagtccttgcctcatatctttttatttcaaaaaaaagatcttgagttcttagtggactccagggttcacattaaccagctgtgggatgtagctcaacagaatcccatggtccggatcccagaggtctcaactcctctatggcatgaccacatcttaaatctgtcttttaacgggtaaagtgagtaagtatgtcctcttattttaggagggagagacaggaactacccagattatatcaagatagaagatctgatatagggttggccagcctacaaaaggaatgcccaagaggaatattcagggctctgactcacagcaaatgttaccgaaaatcagatttctgctgagggtacaaacaaatgaatatacatgtaacggtcaggatggctaaaataaaaaatagtggtgacacaaaatgctgacaatgatgcagagaaactggattgtttatgcattgctcatgggagccaaaaatggtacagctgctctgggaaattccaagtgtgggcagtttcttacaaagtaaaacgtgcactttctctatgacccagtgattgcactcttgggcatcaacaacagagaaatgacaactcacgttcacacaaaaacagatgtctgtcagctgatgagtggataaacaaaatggggtgtattcatacaatggaatgttattcggccataaataggaatggactactgataacgtggatttgaaaacatgatgctgagtgaaagaagccagacacgaaaggccacgtatcctatgattctgtatctgtgggttccacatccacagattctgcacccacagattccaccaaccacagatcgaaaataatgcagaagggacttgagcatccttggattttggtacccatgagggtcctggaacccatcccctgtggataccgagggatgactaggcacatccgtagagactgaaagtagattcacagttgcttagggaaggggaaggtaggttgggagttactggatagagggtacaggacttctgtgtgaggtaatgaaaatcttctaaaattggctgtggcaagggttgcacagctctgtaaatgtagcaaaaaccatcaagttgtgcactttaaatgggtgaactatataagatgtgaattatatctcaataaagctgctaacccccccataaaaggaatctataattgaatgttcataatacctttatgcataaatagccaaaacttggaaacaacccaaatgtctttcagtaggaaaatagctacacaaactggtatgttcaagacatgggatgctgctcagcagtaaaaagggacaaactattgattcacaaaacaacgtggctaaatctccagagatttatactaaatagaaaaaaataatcctgaaaagatgacatactgtgtgattccatttatataacgttgtctttttttttttttttttttgagactgggtctcattctgttgtccaggctagagtacagtagtgtaatcattgctcactgaagcctcaaactcctgggctcaagggatcctccttccccagcctcctgagtagctgagattacaggcatgcacttccacgcccagctaatttttcagtttttttgtagagacagggcttgctatgttgcccaggctggtcttgaactgagcccaagtaatcctcctgtgtcagcctcccaaagtgctgggattacaggtgtgagccaccacacacagctctataatgttcttgaaatgacaaaattagatgagtgggaggcaggagggagggaggtgcctgtgtctatcaaaaggtagcttagggggtccttgtgataaaaccattctgtgttttcattgtggtggacactcataactactcataagatttcatggaactcaatacatacatgcaaatgaccgcatataaaactagtgaaatctgaataaggtcaattattaatgttgattttctgatgatgatattgtactgtagttttgccagatgtcaccattgagggaaactgggtgaagggtgtataagatctctctgattctttcttacaactgcatatagatctataattatctcaaaattcaaaggttttttaaaagtgaatatcccaaactataaagcattagaaaaaggccatttcctgcagtaatgagttgcctatcatcagcggtaagcaagtgatgtcaaggttaactgtttgttaaggatgcttaagaaggaattcctggggctgggcatggtggctcacgcctgtaatcccagcactttgggaagctgaggcaggtggatcacctgaggtcaggagttcaagaccagcctagccaacatggtgaaaccccgtctctaccaaaaatagaaaaaaaaaaattagccaggcgtggtggcaggcgcctgtcgtcccagctactcgggaggctaaggtgggagaatcacttgaacccaggaggtggaggttgcagtaagccaagattacaccactgcactccagcctgggtgacagagcaagactctgtctcgaatgaatgaatgaatgaatgaatgaataaaagaaggaattcctgatggagtgagaggccaggcttactctctatgtgaaacttcctccccaaagtatgccagcagtagccttttatggggtcaaagaaggtagaatcctctaggctttagggtcacctgcaggtggtggttccttggtcagaaggaaactaatattcagctgccacagagtcaacagatggggggataagtgggggaagagaaattatcccaacttttatactccatatagacaatttatacagtttattacttaaatctaggctaactgtacctagggaaatcaaaaggctgacctagtaagtacattttatctaggatctatttttatttagtaggttcatacatgaaccttgtactataaagaatgtagaaaatattaaccttcagtttgcagtgtgaggaaacactgtttggggatctttctagacccttttcagaaagcaaagaaaccagtgcggaactttcttaggcttctgtctatctgtgtctctccagattctccatattgcaggatgggcacaaagccatgtttctcagaacatgccctgccctatttaagatctctgggaatgcagccccaaggagtttgggagggatgtttactgagtgataccttcatcactggagaagctggctttgcagactcttctcctttttgatcatcctaccaatatgtccagaggatgatcagaggctgtaaaagttactgctgctcaagccaagagaagtgccacttgctcagaggacatactcgggttagctgagttcttgtcttcatgctgtccttcctcctccttcatcaggagttggctgtcagcttggaaaggcgccagtgtgattttccacgtggaaaaaaaacactagccagggagtcaggagacctgaattctggcctgggccctgctgcttgacctccggcgattacatgacctctcggggcctcatttgttgaatgattccatgaagggtttgggataggcctgccatttccaagccaacacaaacccattggtcatggctgcctggaaccctgtgcgggaggattgagactgtttgggctccgtggaaaatggcaccgaaattgattagtgatgtctgccacagatgtggggccagcgtctttgataagtcaacagctgcacgtacttgactaagagtatgtcatttatctgccatgaggctgtttccatctgccagactaactggtcgagcaatcccaaaccacggccacgtggaagcctccttagtttgcctccttaaaaaaataaataattaaccctgagcactgagaagggttttcttgccgttgttttcgtccttcctttgagatttcgcaggctcgggcttccgctgcagctggcgttttccctcactgcacgcctagactggttccagagtgggcgacaaaagctcagacagtggaacagggtgccccagggagagcgtgcctgtaccgggggaagggtggcattgtgcgccctcattcctcccctcctgccccaagcagccgcggcagctcactctaaccttgctttcacacctcccctgtctgcattcagagccttttcagctgcaaggtctctgtgctttgtctgggcttgctcggagggccgccgttggctcattgttggagctgataattgcgcgccatgtcttccagcattctgggtggtgaaaggcagcagggagccccagacagcttgggggattcctctttaggaacagcttctctcccctcacgcatcgcagagttttccacggaaaagggaggtctcaaacactgctttttagttaagaaataacttgtcggtttagcaaatatttactaagcatcactaatgaagcagggactgcgccaggtgctaggttacagaaacaaccatgaactccagaaagggaaggaaccgttttggcttagagggaggtggatacaaggcttaccccattaaaaccctcagggtagaagcccggattgtgcatgctgttttgtcttgacttagtaacttggtctgatgagttctctgggactcagtgtctgtctctgtaaaatggcaggattaacagctgtgtctggtttgctgtaagatacaaggtcagtgaggctggtaaagcacctggtatcactcctggcttagggttgctgtcatctctattgtggctcctgcctcggacttcagtaatacactcgggctgcgtaaggagccaggagactaggctgtgactcccagccctgctgctaactagctgtgtgctcttaggaaagtcacctaacctttctgatcctccctgaggaaactgaagtaagggaattcccaacgacgtgatggtctctgagtttcattcctaaagtaacattgcatgcaatcttgggccatcacagtgtttctcaaacttgagcaaggtataaagagcccttttaaagtaaaatacaatttcacagtcctttcccatggtgataatgtaaatatttttattattatgttatttaactatgtacaaatataaaactcagaataaactgacaactcatgcttatggttcttttaggactataaaaccaaaacacaatttcacgttaaatacaaacaaaatttaaactcaataaaattcaaattaacaacattattttagcgtgatggatgatgtcgttttgcagaaactaaattcagaatgtgggtttttaatattagaaagatgtagcctcaggtccagatctataatctgtttcggttcttttacgtcagtaatactaatgcagagaatgcctgtttgcataagtaagtgcttgtgcaggatgagaataccaaattgaaggcttcatttgctggttcagcacgattagacctcttgcttctctgagtcttgccggtcatcaaacacccgttttcatgcagcggtgcttattggttctatcctgatcacttaaaaataaaagttagcattgtagtgttattgaaattatgaatgaatggataaccaattactcttggaattgggaacagaaaaatgtttcattgttcatcccagtgaattgatctcttgttgccagttggttaggtgcagagacatgatctgaacactctagtgtccaaaggcatcatgtctgtgtctgtaggatgtcacttgcctgtccctgaagtccagtacaggcactgaaatctcttcacggttctatcatgatacacatgtatgtacacgtattaaaaattagactgtctaaataaaaacagaaaaacctgaaattgtcctacaaaaagagcaaatcctctccacccccaccccaccctcaacacacatgcacaggtatatatgcccaaatgtatccgagaggcagcagaccctaattagagaaactgttccattaaatggactcttactttagtccaaatttcaggttccaggatacctgtcaggttcacttagacctgtagatctttttcccagccaagcccacctgtggttgaaatgctgctggttttgatgcaatttacctattggagttagtcattttgctacttggccaccaaggttaaatgaagcttctggtgctccttggcatgtcctgtgagtctgtttacctgggaatgggatgtggccagaggctctgctcaggtaatcatagaagtcaaagcaagaggttgctcagtgaagagggaagggctactacagctggaggctttgtgcacagtcaagcctcagctggtagcgtagtgattcagatggtcagtactgtaatctgcaggagtggtggcctctaggattgtgcagtattcaacctgcacgaccaaacatggccgccctgagagtctatcagattggtgtttctgtttgcttttaagagacagagtgttgctatattgcccaggccagtcttgaactcctggcctcaagtgatcctcccacctcagcctcccgagtagccgggattgtaggtgcgagccaccacacctggctagattggtgtttgaatcttacctccttcagctgtcacacttggacaagtcatttaaacactctgggccgggtgccatgactcacacctgtaatcccattgctttgggaggccaaagtagatggattacttgaggttaggagcttgagaccagcctggccaacggggtaaaaccccatctctactaaaaatacaaaacttagctgggtatggtggtgggcgcctgtaatcccagcttgggaggctgaggcaggagaatcgcttgaacccaggaagcaaaggttgcagtgagctgagatcacaccagtgcactccagcctgggcgacagagcgagactctatctcaaaaaataaaaaaataaacactgactgtcagtatctgcatctataaaatggagatcataataaatacttgccgggtctattgggagggctcagtaaagtaacaagtaaagccattggcccaaagccatggttcccaaactgtgtaccaaggcacctcagggtgccacagtgaactgacacctttcctgtgggctatttcagatttctgaggaaaaacagccacatctgtcagagatggtgtaaactgctactgtcaagttgtttagccctaactacttaataaacaaactgttaggtatttctttcggcctaggagtgccatgaaaagatcctgcagcctagtgtttggtgcaaaatcagcactcaataaataggagaggttcttttgttgtaatagagccagaaaggctgtgctggcctcaagattccattttgtttcgactcttcgtacatttcaccatcgtcttggaggcgctgggattggtatccagggttattcaccattcctcccgccttccctctcctcacctctgttctcttgtaaaatgcatttcagaacatggatttctcagcccagatttcgggaaaaaacccagcctgcctgcagccatctcaatggggtgtcacaagagcatccaaaacataaaagtctcagaagaaaattaattttcttcactgtaatgtctgtgcctcccagtgttcctggcaagagctggtcctccaggttggagccagggtgtggctcccctcccatggggggcggagcctgtggggacagcctgggcctgaacctttaaggcggacatgcccccgagcccagaaattccctggagctctaagcacctcacgtgatggggccgctgcattccggagaatttgcctggttttccctgctctggggcaagcgaacaaagcacattacagggaagataggtggacccagggcccaggatgtttctctttggtttgctttgttttgttttcacttccatcctcattctagctacctccagcgacctcatggattggggtgccctttagctgacagttgacaggttaaattacagaaaaatgctaatatgtggtcatctttgacattcaaaaacagcctaattataatcgttcatcctttattgtacccctaccatgcacccagcacacatgagctctctctccctttctcctctctacatatatatctatagatatgtgtatagagagatacatagatatgtacatgtatatttgagagagaacgaaatgtatatattggatttttatatatacacatatataaaatatatcctatatgtaatcctatatatagctatagtatatattctatatataatccaatagatatatagtatatatcctatatataagattttttcttttttaaaaaatgtagttgcacaattaaaacatgaatatgttttccttgctgaaagtaaaatttaaggccaagatatcctttcatccactgccacccaagtcttgtgccaccctcctccctggagaaattcatgccactcatttgcgaatctccttctagatctttgtctttgcattttgtacatatgtgaacctgtaggcgacggatgtgatagtgttgtgtccatttagagaaaatgatgtcgtgttttctgtattgttaggcgtcttcccctctctgacatgtgtctggcaatcttgcctatttcacccatgtaactctcctcatctttcataatgccgtacgtatccttcactctcaggaggccaggcagcccatttcacagataaggaaagtgggtttggagccgggcatgttgtatggttgagaggtggtcctgactgtttccctcccagcagctcaccttccctgccccatcatccctcgtggactgacacacactctctcccgcccaaccaagatgaggcattggtcttcctggcaggccaccttgcaggttaatggagagttaccatcaataccatagatggccactttccagggaattcaaatataataaaatatacttaacatgggaactcgatggagtgtaattgaaatctttgatgatccagaaggtgattcaggacctgctgggccctgtttcatccttgcaaatatcaactatcactgtgcatgctgcacagaagccttgatgagtgaagttccctggctgctggcctaagtggttctcattgtgtgccacgtcccctgcgatgggccttgtcctctggccagaagagcaggcttggggaagtgctttgctcaggtgaaggacagcccctgtccaatatcaaaatggtcaggcatgtggctgtcccagtcgtggccttagtgtcgtcgcacaagggtgtgtcccacttgactgtctgcaaagcacttcagccagtgcttggactctgctctcagatagcacaggctttgagtcctagcccagaccttcatttggagaagtagatttgtagcttattattcccttttcaggaaaatgcagctctgtaagcaggtagattcctcatctacttccagaataattaagaccttaattcatccctgcagaatttgagaaaaatgtcagttgaaagaaaattacattgcaacccccagtctgaggagtatgtttataaaggggcacaaaacttcaatcagagctccctagcaaccaaagcaagaaaggggagaggcactgtgcctgctaactcttactctgccacccagccctctaaagagatgccccgccctcagagggtgccaggggttctgacagcctagattaagcctgttatttctcaggctggagagggcatgttctgtttgtattttggtacctaaaacttcaagattaacaaggcttagcctcttgcagcatcagttttactcagtaatatagcacaaacttattttttgaatgttactgcacacatactgccctgttgtggaacaggatgcaaagttggcatgcagggttaaaataagcacaagatgactttgactcacaccccctgagcctctggaagtgtgtgctcctctcacctaccattcaggggaaggggaaagatgtgttgccggaaagtcttgagacatcttggcctaactcataagtggagagaaagaggtagaaaagggagctatgaaagagagaaggtggtgcagaccaggaaaaggtggagtgctcagtgctgatcttcagtgccaagcttgtcccaccttgctcgcctgcgctctgactgttgtgtgtgccgagacaacaccatccattagaactttctgccgcaataaagatactctccatctacgctgtccagtacagtagctgctggccctgtgtcgctcctgagcacttgaaatctggcaagtgtgactgaggaattgaattttcactttactcaatgtcaattgaaagagccaaaaacctgtatttttctcattttagtcacatatggcagaggctgccatattgggcagcacggatctagattctttaaaacgctgataccttttgatctaatgattcttctcctagagctctattctaaagaaataattggaaatgtggacaaagtttttaaatgggaggatcttcaatggtgggttgcttatgatagcaaaaaattagaaacactaccagtgttcagcagtgagacagggcgggctaaatgatggaaggaaaagacatccgcagtgtttatcaagaatgttactgcgaggagaaatgcttttccatccagcaatcaagggaagaaagcaagaatcaaaacagtaggccagccgcggtggctcacacctgtaatcccagcacttttgggagggcaaggcgggcggattgcttgagcccagaagttcaagaacagcatgtcactacaaaaaagttaaaaattaggtggccaggtgtggtggctcacacctgtaatcccagaactttgggaggctgaggcaggcggattgcttgaacccagaaattcaagaccagtgtgtctctacaaaaaattaaaaattagacaggtatggtggcatgtgtctgtagtgccagttactcaggagactgaggtgggaggatggcttgagcccaggagttggaggctgctgtgagccatgattgcaccactgcactccagcctgtgtgacagagcaagaccccatctctcttattaaaaaaaaaaaaaaaaatcaatagttacagtgtggtcattgagtagacccgcatagacatatatgcatagaaaaaaagactggaaggaaatgcacccaaaataaagatcattattggtgagtttttaggcactttttatttcctcccccatattactgtgcatttggcaaattacctgcaccgaacacggataccactttagaatcagaagaaaaaatatttcttcaaaataagacagctgttcattgctctatcacagttgtcaggggagggcgaggagggtgtttcatgagatactcaggttcaaactcaagacccatttcacttttaataaaccttttgagtggctgtctgcattctctcttccccgtctctgttcagcattcctctttaactccaaagctgacccttttaaaaacctaatcgcattaaacgaagccaggacaatactgctctgctgtctttttgcccagcactttatatcatttcaaaactctttcatacacaaaactcttttgaatcttaccctattagcaagtcaaagttttactctttcaaaattctttctcctgattataaaacgaatctcattcctgagagtttgggaaattgagcaaatgccaaagaaaaccaccccagtccccactgggcaacaatagcaatcctgtttctgtctgccttgccccatcattttttcctatgcctctggaggcagggctggtattaatatcaccaccgcacagatgaggagatagcaggtcagagaggttaagtgactcacctgaggtctcgtggctggttaagtggcagaaccgaggcccgagcctgagttctagtctgtgttctttgcctggctttgtaggtgaggcttgatgtaacccccaaataggcatctcacctattcataggatgctgagagcctcttatccttccaagtgcagtgcttaaaagccttctataatggctcagctcacagagtaagttacaccgggctgatcctttctttacaggagtttactatttaaagtagacacgggtgacacagacagggttattcaggatgtgcgttgtcacatacaagcagaatgatctcagtgtttacccgacacacgacggaggaacaaaggctttctacagggaaatgagcgggaagacagagggaatcacattggagaggtttgaatccaggcagtgtgattacacttcgtggggcaattatactctgcctacctgaaatttaaatcaagtccctttaacagaggcgtgttcgcaaaagttttatcttttttcatcccagcctgaaccatcaccttggcttctgttaatatagcagagcagtagctgcaacccaaaatggtctattattaaaaagaaaaagtcagtgaattttttttaagggcctctaagcctcctggatggatgtggtgtgcgctctgcaattttcagagacttactatatcctcaagtaagtgaacatgacagccccttcctccctgtccacctggacgattccagctctgccttgagaagcagagagtgatgccaggtccaaaccaaccctggcaaatgggaaagaagtttaagatctgcctgagtctctgccctctcctgctgtcagccccctccctgctggagaaatgtggaaaagtgctgaccacactctttgtactccctggggcttattggtgcttttctaaacaagttgtgctaatgttgacttccccatgggaggaacagcccaagtttgagcaagagagagttggctggatgaataaaagcaaccagcgtcccacctgtggacaacaggacagggcaggagatggcgggatgtttcctgggaagaaggttcttttctcttgctggggatcctgatgcagcccttcctaaattggtggctaggaaatagccccatgggttgtttccacctaaatattccatcaaggccaggcctggtggctcatgcctgtaatcccaacaccttggtaggctgaggcaggaggatcccttaaggccaggagtttgagaccagcctggccaacatagcaagaccctgtctctacaaaaaaaaaaaaaattgaaatattagccaggcatagtggtatgcacctgtagtctatagtcccagctactcggaaggctgaggtgggagcatggcttgagcctgagagtttgaggctacagtgagctgtgatcgcgccactgctctccagccaggcaacactgcaacaccctgtctcaaaaattatatatattccacaggcacatccatttgcattggggagcacacagcatcccttgggggaaggatctcggaactgttctgaagttctgtgggacacccctgccttgccctagggacatggaatggggagaagccagcacttctagctggttggtttttgtttttcaaccagtctctccaccgtggccagagcttctctctgccatccctgaacattccccgatacactcggaagccagtggggtgggggtgatcggcagcgtgttccactcatgaagagtcactcatttgtatctcattttcgagttattatcgagctgccggttgtgagagtattttgacagcaactgtcagcaaggtgcaagcggctgccatcgcctccgattggctgcagacacctatggcaggatgctgaataatattccagcccacccctgcccccaccagagagcaaggcagggaggaaagggggtgccaggggaggaaaagaaaacagcagagcagaggaagggaaaacaccccggccactcacggcccagagccagcctggctcagctccggcagccccagaatcattagcatttttctgactcccactagagaaggcggccgtaaaagactcagattgtgtctagtgttttatttaatttattttatttgaggttttgggcagcgagggaggggggaatgagagaggatccatccaaacaaccatttaggcttgtcagagttcatttattgaattagcgaggttaccactcccaggctcccagctgcctgggctccagcccggaaagccggaggtagctgcagccttggagcagggagctggggagctggagaaggagggtgcggatctgagcgctgaggctctctgatcgattacgccttttctttgtttttttttttccccctcagcttgattgaaatgcaatggaatgcatgtattttcccttcttcctcgaagactcctctagccataaaataaatcgttccacatgtgtttctttccaagagccgtgcatccaggcaaaggaataaataatgctttatattctcttcctttcacctaagcagtttaaaattcgttgtttgtttgggttttggggtctttttgttttttttgtttgtttgtttgtttttgtttttttagtatgaaaaacaaatgtcagcgacactagaaagcagatgtgtggtgatcaggaagcaggcacacttttgctttcaactgaggacccgtggggctggtcttaaaggcagagtgactgcaggagaatgccatctttgtgttccagatgagggagaccatgtgtcatttttgtttgctacccccaaaatttccccagattgactcaggcttcagctgctttgcccaggtttggggctgagctgagttgggttttacagagtgcagctcccacattcctgtgggttctccttgcctgtgggttcctgagagctgaagggaactgcagctcgggatgtgcctttccccatagcagtgctgatccaccagggcactttgcctgccaggggacatttggaaatgtctagagtcacttttggttgttgcaacctgaagggtgctgctggcatctagtggatggaagccaggggtgcttctcaacaccctacagtgcacaggacagatggggccgagagactgtggcctgtagggaaaggaccagagggaaatgtgtggaggaaacagcagaggagccgggagcatcccagtgtttctgttggcatgcggggagagggctgtcctctgcctgtgggcatttcacatgcatggccaccacccactaaataccagccatgatcacagtcattgcgacgtccagaagagccccccaaaggctttcaggggggcagtaccacccgttaagaaccactgcctttatttctatctatattttatttttctagtgctgaccacatgccaaacgccaagctaagttctctaatatccctttggtcctcacaatagtcccatgaggttgaagtttttacctccattttagagatgaagacgggaattacagcttacagaggcagtgtccctgcctacagctaaaatgcagggaagacaggttgaaagtccagccctggcagaggccagtctctgcttgtaactgctctgctgagcactgctcttctgggaacctcagtttcctcatctgttgaatgggggaactgatgcctgtcctctcacatgtttctcttaagaatcttaagagaatgtacataaaggggctttgaaaaaaatcatatacaatatacggaaattgtcatactgttcctgggaagaacctaaaatcatgtggacagtgaagagtgttctttatgggccccacattgacagatgagacagtggccactggaatgtggacttagaaggtcaaggtttaaagccagtcgagatttgggctgaaatctacaaagtggttgcaaagcagaaccaaatagtctttgacggatgtgatgtcagcttccacgggattctgttatttgttatgtcattaaacagattggttatataatgtcatttcaaagggaatgtttgtaaagcattgagttttttttcactaaaagcagtgcacatgctggcagaggcccctgactcagattcttaatagagcagcattctgttctctcgctgtctttctccagctttctgatggttggccagggagtgggaggagcaagtccagggagctaaccacaggtctggctatgcatccaggtggcctcagggacttgtaaaaagttgggatgagccaggcacagtggctcacacctgtaatctcaacactttgggagcccaagccaggaggatcagttgagcccacgagttcaacaacagcctgggcaatgtagtgagacctcacctctacagaaaattttaaaaactagctgagcatgttggtgcactcttgtagtcccaggtactcagggggctgaggtaagaggatcacccgaacccaggaggtagaggttgcagtgagctgagatcgcaccatttgcactccagcctgggtgacagagcaagaccctgtcacacacaaaaaggttgggtgcctgaggcccacccaagatcagtgaaatcagatctactagatgttggctttttcttttttcttttttctttttttttttttttttgagatggagtcttgctctgttgctcaggctggagtgcagtggtgcgatctcggctcactgcaacctcacctcccgggtttaagcgattctcctgcctcagcctcccgagtagctgcgaccacaagtgcatgccaccacgcctggctaattttttgtatttttagcagagacggggtttcactgtgttagccaggatggtctcgatctcctgacctcgtgatgtgcccacctcggcctcccaaagtgctgggatttacaggcatgagccactgcgcccagccagtgttggcattttttaaaacactccctgtcaggtgattcagataggcagccatgggtgagaaaggctcctctagatcagagattgtcaaatttatccataaagggccagacagtgaagagttttagctttgtgggcccccagctctccatcaggattacccaactctgcctacagctcaaaaagcaaagacaagaagtcaacaagtaggtgtggctcttccagtaaatctgtatcatagacgatgaaattggaatttcatatgattttcttgtgtcacaaaatgttattcttgtgatttttttcccccaaaatattttaaaaatgtaaaaaccacccttgcttcgatggctgtacaaaacaggcggtacagtttgccaaaccctggtgtagatgaacacggaattccctctcagcgcaggctttctgcattcctctgagaaacaggtgttcatctctaaagtcctctgcgcttgcacacccagacccgtctgtccttgggctgcgtggcctgtgtgatgtttactgtttgagaaactcgtgttaaagttagaactaatggattctcttggaggtggacccataggatctccatccaaagaaaatgagtgttttttcctcatgcaagacaagagcaaatctttgggttaaaacaaaaacaaaaacaaaaacaaaaacaaaagcaaaaacaaaacaaaaccgcattgtgaaaagtgcctgttaggtccaaactactgagaaaggccacaccacagttgcaaggtccatggtggactatgcagagctgagcctttatctagcacaggagtaagactccattgcagctgttcatgcattactttatgtgattacttattcaaaaaagctttagaggagtctgcatctatcttaacgggcctgggtctgtcactggttaaaatggcaaagctggccagtcgcggtggcttacacctctaatctcagcacttcgggaggcagaggcgggtgcatcacttgagcccaagagtttgagactagcatggacaacatagtgaaactccatctctataaaaaatttaaaaattagccgggcatggtggtgcatgcctgtagtcccaactactctggaggctgaggtgggagaatcacttgagcctatgaggcagaggttgcagtgagctgtggttacgccactgcattctagcctgggcaacagaatggcggtggctcacgcctgtaatcccagcactttgggaggctgaggcaggcggaccacaaggtcaagagatagagaccatcctggctaacatggtgaaaccctgtctctattaaaaatacaaaaaaaattagctgggcatggtggcggggagcctgtagtcccagctacttgggaggctgaggcaggagaattgcatgaacccgggaggcagagcttgcagtgagccaagattgcaccactgcactccagcctgggcgacagagagagaccccatctcaaaaaaaaaaaaaaaaaaaggcaaagctgagaggagcaatataaaagcatatgatgttaaacttattttaacttaaaaaaaattcaaacatatagaaaagttgcaagaatattataaagagttccagatacccttcactcatattccccaaagttaatgtttatcattctctctatattcccatactggtttttctgaaccatttgaaagtaagtttcatagatgaccctacttcaccagtaaatatctaaaagtatattgtttaaaaaaaacaagatcctttttatacgttatagtacagttatcaaaaccaggaaattaacctagagacaatgttatcttatctatagatcttattccaaatgctaccacttattctaataatgtcctccatagaaccggaaacaactgattcagaaccccatccagaaccacacgttacattccattttcatgtctctttagttttctttaattttggaaatgttaccctgtattgctttctttttcacgaccctgacagttttgaaaagtacaagccagttgccttgtagaagttccccgattgggtttgtgggatgattcgtcctgattggattggttaggattctcacatagaaataccgaagatttgtcccattgctggtgatgttatctttgatcatttggttaaagtagtttcagccaggttttctccactaacttactatttgtccctttgtaattaagaaatatgttggaagatagttcaggaccctgaaaatatcctgtgtgtggactcactttactagttttagcttccactgaagatccttacctgaattatgcatcactgtgctggtggccaactgatgattgtgtaattccatcattcctcccacatgacatttattagtgggtattctcccccgggaagggcttttctccacattccgtttcctcatagttatttattttcttattttttatcagtgtggggtcagtggttattttatttaatgagttacaaaccattattatcattatttattttgttttgcaaattgtccccaatttgaccagtgggaaccccttcaaggtagattgtgtcctttcaatgtgtccccatctttttttttcgacccttaagttattctttcttaagtgttttctatggagatatttcagattcatcttgtactttctcagtgccaacctggaatcagccatttctccagggagccctagttctctgcagtgggtgatggtacttagaagccaagatctgggtgccaggtgtgctcatggctacagggtctccttgcctccagtacggagtttcccaaccttggcacatcttgggctgaataattatttgtggtgggaggccgttctgtgcattatgggatggtcagcagcatccctggcctctacccactagagaggccagtagcacccaaaaaatgacaactaaaaatgcctccagacattgccagatgtcctgcaggaatagaggtggggacaggggcaaaattgcctgattgagaaccaacctgtcttagcaaaaagtacgtgtgtgtgtgtgtgtgtgtgtgtgtgtgtgtatacttttttttttttgagatattgtcttggtctgtcacctaggctggagtgcagtggtgctataatggactactgcagctacaaactcctagctcaagcgatcctcccacctcagcctcctgagtagctgggtccacaatcttgcatcaccatgcctggcgagttttttgtttttttgttttttttttttttttggtagagatggagtatccctatgttgcctgggctggtcttgaactcctgggttcaagctgtcctctcacttcagcctcccaaagtgctgagattacaggcgtaagccactgtgcccaacatgtatatatttttaaatacacacacagatgcatatgcttctatctctatttctatttctgtatctgtattaaaatcatgagttcacactgatacctccagttcctatccagggttatattacagggttcattctctacttccccctattcatgtttatagctgtcttctcaggcagtgagaaacctcctcctgttatccagggctggtggacaggcaattgagttcccacagtggccccatctacagcaggatggcatcatgggaaagagcagagactcagaaaccagacagacctgggtccaaatcccagctcaacgctgatcagtctcatggccttggccaggttacctaacctgcctgatttcctcatctgtaaaatgggaaaaatatctgtaggcactattgtggaatcactggttatagaagataatagctgtctttgtgattgagaatttggagtcagtcagtctgccctattagtgtgcagtgttctgctactaccttccagaagaaaagagaagatggactacaagagggtctttctcagtatttgataagccccttcttttccctcttccttgactgatagctcagccagttaattccagcagacaccctgacccacatgtggcatcaaagagggttctgtctgcactagacagcagcctctcttgctttcttgctttcttgccagaactggccacccccagcccaggctgcgttgtccagaacaccacctgcaatcagtctgttcaccatttcctactgtcactgtcactctggtagccacaggtgacttcttgaaatttctgggcaggagttttctttagaggcgatgacctgccttttgcatgtcctgttcctcaaagttatctctctgttttttctccctcgttccctacaacctctctctgtctgtctctctctccttccctctctctctctctctgtctctctttctctccttttgccttttcccaaaaatgtttaggcttggcaattttttcaaggcatcccaagggcttcatgttgccagcaactgcctctcctgggaaaaagagggctgctttattattgacaacgtgaccacacagggcttgcagactcagcataaaagctggggcttgaactcttgtatctctggactcttagtggctccagaatttctccaatgctgtgggtcatctgagggtacctgccagggagctccatttgcccagtaagcacatgcttttatgtagattttgggtggctggggaggggctaatgggagtccagagggttaagataccccaagccgctccttggagccacccctgggctcggcatgggccccgcttcccataattctcagtcttctccctccccccgtgcctccagctctcatttagaatccactcagctccagggccttctctggctcttttcagtactgagcaggctgtgccagtcgttcatcttgagattccttttactatgagcctagagctcctttcaaataaaatatgctgattctttaccttggaggaggaagagttttctagaacacagaattctggtgatttaggatcatgctttaaggtttacagagccttgaactcccatggaggtggctaggccattcctccacttcacacagggtgtgagtgatttgctcaaggtcactgagccccacaggccaggtttgggacaactctcaatggccagttgagacagagagaaccatgtcctccttaagacacctggtgcctgtcctatgcaagaggaatggggttctctttcttttcaccccaagccatgaggtcccagcacctatctctcctacacacctgcccttcactgtgtcctcagcccagctgccagagcccttctccccttagaggggagagcacatgagctgacagaactcccagagaacaggggccaccaggactctgtgacttgcccatgggggcctggaggatttgaggacagaagctccgttataagaggacccagctgtaccgagtggccagcagcacaattagtgacggtcagggtgcgtgtgcacccccatgggtggagggcatgtgggtcgtctctgcaggaaggctttgcttctaccccacagaataactgggcctccggaagagacactaccaggcctcagttctttccaagagttggtgttgcaaggaagcaacatgtggttttcacaaggaaggattttgtccagcctgtgaaagagacctcctcttaagtcagggagccaggacagttgttcacacccatcctccaaagtgtttgttagcagagatggcagcgttttgccttcctgtctggccgtagtttcgtcttccatgaaatgggcccttgagggaaagagagaggctgccacgtcagggtttttattaatataagctgtcactttaaagaaagacactccaggctctggatgcaaaagggaggtaactagtggccagaggaagacaacgtttggtgtagatgtccctgccatttttttaattcacttgtttcctcccccaaaagtagagaagtcaggcattcccacctgggtcctggaaaaactgttctcactcttccatctccccagccgtgggcctcctctggctacggaaacttagattattttttggaggtggagacaccaagccacaccacacttgtcctccttcctcccttcccacgacagatcgttaaattattccaggggagccagagctctgaggctaaattaccacaacggccgtatcatggcaactgtacctgtctgtgcttctgcagctgcagctaccgagaaactcgctcgagaaaagccattatcggggctgggtggggaatccaagacagtgcgtgttccagaactccctcctgcctcctcagacccattagagcagcgccccagttcaggcaagccttgcgtgtgtaaggaagcaaattgaggggatgatggtgttcaggatgtgatgtgggtactgatgttcacagcccaaaactcacccgcgtttgcagactaagggacatttgatgacagcagtgtttttaggaagggggcaaggcagagagagcctctttctgtctacgttcctgatgtttgccctcatttattcatttcttgagttattgagcacatgagagggtcatgggggatgtgtttttggccaagaccagtaaggcccctgcagtcacagagctaaggtacaggtgggaaaacggaacagtaaattagggggcatcagagagtggtcacgtgacgcaggcttgttatggggcgatggggttgagggagcctgggagtgtagctcagtgggcagggaaggtttccctggaaaggtgtctctgacgggaggctagcagagaccaaggcagggggagtgtcaggtgccccagccctgagtaagtagggctgtagcccagagtctcgccgttcgcagctgtgacatcactctgcttcccctgagaccgaagccacttgaaatatgaccctcatgcagaaaaatgtttacgacaaggctcacagaacaagagctgtcgtacctgtcaggatctcagctagaaacagaattcatgtcgctgtgttcattacttaccgaatggatctttacagatgtaggcaggatcatggaacccacgaggaaccagtgagggtaggggaggtactcagcatgcccagagaccaaccacagcaaacagaatctgtcacttcagggggtatcagagcaaataaaacgacaggattccccatttaatttgaattttagataaaattttttaagtggtttttttgttttgttttgttttgtttttttgggcataagtatgtcccatacagtacttggatgtacatgcaatacctatttgttctttttctggaatttatacttaagtgggccttcttcattttatctagtggccttcatcaccacccccgggaccagagtgacgggctttggggagacagtcagaaccaccactgagcacagaggaggggctgcccggggagctgtcattttgtagggcagagctgctgccagagaaggggcttctaagcaagaaggcaccaggaagaaatgcctcagcccctctctgctcaccctctgcctgcccaccaggagtcacagtactgccctccattgggcatctgggaaaaggacaaatggagccatgtacaagctggggtggaggagggtgctatttgtgccaggagacttaggctaaggagggttcctgcaatggaatgctggatgtagcccgagctccccagcagcctagggaggaagggaagcaagtgattctcctgggcattatggatacagggatcaaggcagaacagtgttttgtatgcactaagctcttaggaggaaggaatgggtgagccatccagccatggtggaagcggggcgtaggaggaaggaatggacaagccatccagccatggggcctaggaggaaggaatgggcaagtcatccagccctggtgggaggggctagtgtttgaagtgtcagtgggttttctttttccccttaaaaaaagaaaagtccatatatatatatatatatatatatatataaaatgtatgtatgatcatttttacagaaaagagtatggaaaaatgctaaatgtctatcttaatttgttctctccaaaccagaagaccttaggtacagatgaccccagggagctgggacagcaggacagacagggaagggacaggtccatatataggtgtgtcattgcagccactgcaatgaacataacatgcaagaaatgtacagaatgtggtccagaattgcccactggtgtcctgtgccctggtggaccccacagaggactgccccaggctttcactttccttccccatggattgagcaagctcccagggcaggatgggtggccaggaggggcagaatgctggcggggacggggaagccaagtgctcacaggaccatccaccacagctgcagccacactgcaagacggcggggatgggacacacggtctagttcttagttctgcctcctacaggcagcccctgctgtcactccagaactaattctctgtgtgccactcactcgcgtgtgtgacacacaacagatacacatacatagacacatacgtacatctcctcccccaatctcaccctctcaccacccccccctttttttttttttttttcaattctttggcacctggctttttttcttttcactcagttgcatgccttggctatggtccagtttagggaacagttttctaatgggcctccgcataggtgaccttgggcggctttcctgccatccccgtgctatgggacgtttgctgagtgagggtgtgtgtgtgtgtgtgtgtgtgtgtgtgtgtgtgtgtcagggagaatggatgtacctctttcttctgggccccatgtcttgccactctcagggcagggtggtaaggtggcttgtcccttctcctggtcacttgcagaaaagaacccgcttggggcctgcgatggccgatgccaggttcagctgtctgcagtggcaggatccctggaaacttatccatcattaaggccccctcaggtaaatgacacattgggaggcagaggtggagaggcctaatgaggctttgtgctaacctccctaattaccaattgacttgatcttctcacggcttctaataagtgccccctgtaagtacctgattaaggaaaacaaatagggagtgaggaggtcaagacaccgggtgtttagggtgacatgatgaggacacagtggcagagaggggccctgggctggggatacagtggtgatgtgatgcctaaggatggagtggggtttggatggggaggagatgagttgagaacaagggtcgtcgatgtttctgtaaagggccagagagtaaataccctagcttcatgggccatgtgatttctgtctcagatcttcagctctgctgtaacttgaaagcagccgtagacgagacataagagaataagagtagccgtgttctagtaaaattgtatttaccccaaatatttagtaggccagattctgccggtaggccatggtttattgagcccttgtcgaaaagaaccagtcatttttttccttttttcctctgtatcatttaaaatggtaattgctgtcccagtggacattagagagcaggagctgggcctcactcgcccatccgttctgaacatagtaggtgcctgcacatagtaggtgatttgtaactgagtagagaaccaaacccaacttggattctgaagaccagtctacatgagctctcatcctggggctgctgttcttgcagctactgtccttttgcatttctcttgctttcgttgctgcctgctcatacccatcctgatcttcccttcagcacttcctttttgaggcctgttttagtcaggagggactagatgcattgcagtaacaacttagcctcaaacttcagtagcttaccttagctacagtgtatggacgcatccaggaggctctgctccacatagtcactcaggcccccaggtttcaccatggccggggagaagacagctgcagccccacactcaggcctctgctcacacctcatgggccagatctggccacagggctccccctaactccacctccctgtagggtctgggaggggtagtgggggccatagatacttggcaagcaggtaatgcttcttctgtggtaacgggacccccccgcaatgtactgtcagtaaaagttcctgggacagcacagttccaacctgtgggtctttgtggttcacggtcatcagtggtcactggtgtatcagaggaggtcctctccctgacggaaaccttgtttcaagtaaaatcacctccacaccctagagaagcttccctgtcttgatttgcagagagtgagacaagccacgcatccttgtggctgcaggggcagcccagtgggggcatgggaccttggtgggctccaagtgccatctctgtggcttgatattttgcacctaggcaggggcaagcaccttccctttcctcatgtgtaaagtgggatttcagtcctggcccttcactggctccgaggacacaggtgtcagaacactctggagggagggttattcttaaactgccccacatgtaatcccaaagttcatcctgtcattcactcatttaatttgtccattttacttcttttttcttacattttttattgtattattactatttttttttggagacagggtctcactgtcacctaggctgtagtgcagtggcacgatctcagctcactgtagctctaacctcctgggctcaagcattcctcctacctcagcccctacggtatctgggaacacaggcacacaccaccacacccagcttatttttgtatttttggtacagacggggtttcaccatgttgcccaggctggtcacaaactcctgagctcaaatgatcctcccacctcagcctcccaaagtgctgggattacaagcataagccaccatgctcaaccccattttacttcttcttgaatactcactatgggcccagctctgtgttcattgccatagatttattatctgttttaagccttaacacaactgttgagcatggagaccattgtccccatttcacagatgggcaagccgaggccaagtggaggagagaggcttataagcactggaggcagctggactcccaggttcacactcatgacccccacctcccagctatgcctctagacttaccttcttcccagtgtgggtggcagccactcccagcataggttgcagattctgccctgcagttgcgggagcagccccccacccagatataggaaacacaacatctgatccagacagaatttctgtttaatgcgggacttgaatccagtcagagaatcctagtctggttttaattatttcccaccttgccccatgagggtgtgaaaacctttgattatttttcctctaacaataaattccccaccccacacccaccccaaggcacacgtcaccacaggcctgctggaatagtcactgtgcctcagaaaaagctgtgaccacacttccccatcttccaaatggaatggaggaggaggaagtgaggacaggggaggtgtggccgagattcacacaaacggcccctctcctgtgtgtgcacagagaggcagctgggagatgaagcacatcctgggctttgtgcgtcgccagagacacgatcattgacttttccctctgcgtgaactttgcaaatgacgctctttaacgcacttgtgagataaacagtggctgttgcaaggggcctcctgaccattgatttttctcgtctttctcttcacttctgcctcaggctccttggttttgctacaccccaaatcctatctggtcctaactgggtttcttattaagaaaagagactcccacctacatacaccaagatgtccaagggctgtcccgacttgggctgtcacatttgcgtgctctgactcacatgttctgccttttcctatcaccaccaggaaccagccttccagagtccattcctctcggtcctggactccaggccacgcacagacccgattagacctcttgggctctcagcttctgactcaccatccaattctaaacttttgtaattgaatcgagttctttgttggtttatttggcctcaaacaaatggtccaactcgcagattcatttcaacccttccctgcatcttaaaactcaccagtcatcctgagctcggcttgttttattgttgttttctttcccagacttttaaaaataatatttgtcccagcagggtgattcgttctcctccccatgagcactggcaggctctgcggcatgaatcactcgctcccgtgctccctgtcccctgacatgtccctgggaggcctccaacgctttctgtcgaacggtccgcaccgtggcttcgccgcttgcatcttctgcagaggtgtcttggctgtcatctcctggttgacagtaggcctggctttcttgagaagctcagatgttgaagctactcaattacctgaagtacaccccaatctgtaccccactggtctggaaaagtggtcccctcatggctgtgacctcttggtctgggacttcccagggagactcagtgaccatgcccgctccctcttttcagccgttgtgtagggccatttggatgctttggccttttgccaagaggatggggagcatctgaactgggctttccaacatcatgggggttctggagtgttcctcctcatggcaggtgtcagaaacctctagaatgctagctcttcagaagccgccttccctatccatcatcatctcctcagcctctttttccacttctgccatcatttcccagtggctggcgggctccagctagaacataaggactgagttcaagggctgaagctggttactgtccccagggtggggcacagtgtgccaaagcaaaatccacagtcagacagacccacacgcaagtcctgtgacctcagataagacctcccctcgaggtctcacatgcgtcctgggaggcctgccgcccagtgggtctgctctgggcctaaagggaggcagcgcgtgtagagcatttggcatggccagggcaggtgctcagcaagtgccgcttcctcccactccccgtttcttatttcaggtattgagagcccgatcatgagaggggccagaaatcagaaaatccaggaaaagacaagcatccattaataactccattcatcagcactccacagacactttttagtgggcacctactatgtgccaggtgctgttggaactgttctgggtgccggccattcagtagttagcaaggaagaccaaccataaacaaatagaggggaaaaaatgtgcaatagaatgcaaagtcccataacatcgaggtgacaaatgaagcagggtgacagcaaatgctagtcgtgtgcagacaagcagcctgggtcggagcacctttgaggtggcaccctccaccttgctgctgttctctgtttccatttagcagggcggttgggtttctaggttcatctgtttgtctctgtgctaagcaggtctccagggtgatggcgagatatctggctcttggccctctggggcacagcactccccacttggtccagacacgtgtaactcagctcatcacccgcaccatgcgtctcatttctcccatcactgaacaatgaggggtttccccagtaagtgactttgccaccttatacctttaagtatcagccctctgaaaatgttgaccattcagtggaaatcttcctaaaatacacagtgccttttcttttttttttttttttttaatttatttttttattgataattcttgggtgtttctcacagagggggatttggcagggtcatgggacaatagtggagggaaggtcagcagataaacaagtgaacaaaggtctctggttttcctaggcagaggaccctgcggccttccgcagtgtttgtgtccctgattacttgagattagggattggtgatgactcttaacgagcatgctgccttcaagcatctgtttaacaaagcacatcttgcaccgcccttaatccatttaaccctgagtggacacagcacatgtttcagagagcacagggttgggggtaaggtcacagatcaacaggatcccaaggcagaggaatttttcttagtgcagaacaaaatgaaaagtctcccatgtctacttctttctacacagacacggcaaccatccgatttctcaatcttttccccacctttcccgcctttctattccacaaagccgccattgtcatcctggcccgttctcaatgagctgttgggtacacctcccagacggggtggtggccgggcagaggggctcctcacttcccagtaggggcggccgggcagaggcgcccctcacctcccggacggggcggctggccgggcggggggctgaccccccaacctccctcccggacggggcggctggccgggcagaggggctcctcacttcccagtaggggcggccgggcagaggcgcccctcacctcccggacggggcggctggccgggcgggggggctgaccccccccacctccctcccggacggggcggctggccgggcggggggctgacccccccacctccctcccggacggggcggctggccgggcagaggggctcctcacttcccagtaggggcggccgggcagaggcgcccctcacctcccggacggggcggctggccgggcgggggggctgacccccccccacctccctcccggacggggcggctggccgggcggggggctgaccccccacctccctcccggacggggcggctggccgggcagaggggctcctcacttcccagtaggggcggccgggcagaggcgcccttcacctcccggacggggcggctggccgggcaggggggctgacccccccccacctccctcccggacggggcggctggccgggcggggggccgacacccccacctccctcccggatggggcggctggccgggcagaggggctccccacctcccagtaggggcggccgagcagaggcgcccctcacctcccagacggggcggctggccgggcggagggctgacccccccacctccctcccggacggggtggctgccgggcagagaggctcctcacttctcagacggggcggctgccgggcggaggggctcctcacttctcagacggggtggttgccaggcagagggtctcctcacttctcagacggggcggccaggcagagacgctcctcacctcccagacagggtctcggccgggcagaggcgctcctcacatcccagatggggcggcagggcagaggcgctccccacatctcagacgatgggcggccgggcagagacgctcctcacttcctagatgtgatggcggctgggaagaggcgctcctcacttcctagatgggatggcggctgggcggagacgctcctcactttccagactgggcagccaggcagaggggctcctcacatcccagacgatgggcggccaggcagagacactcctcacttcccagacggggtggcagccgggcagaggctgcaatctcggcactttgggaggccaaggcaggcggctgctccttgccctccggccccgcggggcccgtccgctcctccagccgctgcctcccgggcggcgctcgccggcgcggcggcaaagactgagacacagtgccttttctaaccagtgcaaggaatcctgagcccaggccacagtctggggacactggtcagatctgttgaggtgtgtctgctgtttgcccctgtcctaaatagccccagactgctgtgcttttccagtggttttaatatcatgttttgatactttttgtgtaatcaagggatcaaaaaactaaagcctacgtccccgtcgtccgtttttgtaaataaagtttcactggcacctagccatacccactcatttacatatcatcaggggccgctttcacgctacagagcagagtagagtagtcgcaaagctaaaattattgactgtctgaccctttatagaaaaaatgtgtgcatccctggtctaattcgtggctgctagttgtcacttctggaagtcttttaggaacctgccactattaatcccagtgcccttttcaactcctctgggatgagaaattaaataaacgagtttgtttctaaaataaaagtaaataggctttcagtggctgggccacggggcagggccaagggctttcccataggtgacaggcagaagcttagtatgtgggtttcaggcatcattttgtttgccaggggctcttttctttattttggcttctctggagtcttgaggagtgcgtgacaacatctccttgtgcaggctgtagtagtcacatagccttaacatcatgtgacttgctttgctctaagcttcttgttccctgagtctctgtgctggcccctaaatggtggcattgcctcacattccatttgtgccctgcaagaggaatctggttccctgaaccatatgcaggggcctcctgctgccattggagggcccctgtcatagagatgccctctggaaaccatgtagatgtgtctggatgttgaggtgtgtcaccttgtgcttctcagagaggtcagcaccctgatagtcacaaactgctatgtcacgaatctcaaatctccctgggatgtcttcctcttgaccagtaagcagaagccggtgttggtggctatgggctgctgcttggtgctgttagtgcggagacgatacatggagagttttctaatttcctagggactggaactttctacctacccacctgtgcccctcccttgatccctgcaaaaccctgcaaaaccctgcaacctcagtggacattctccctgtatttgtaagatcttgttgctctgcttttccattgatagcccccttattctcatcacctgccctccttgttctctaagtaggaggatccaggtctttggaagattcctgccttaggttgaggagtcaaaacagactgggagagcagcacagtacaggactggtgcaaggcaacccgaggccatctggattcatgctctgcagaccacattagggttctgagcattgaaatggatcttaaccaaataaattgatagggccctttcagtgtctgtaggagacgtggcaggcgaaggagtgggcacagagtggagatagcaggtgctgcgaagttgagcggccaccctgaatccagccttttcaggaggcgtggccatcagcaggcagcaggcagcaggagtgggtgtgagccggcgacacagtgtgtctccctgcttgccatcgcctgctcactctgaaacagtagatccagctccctgctctgttttacaagagagctcaccccatcttctcctcctgcctcatcactaacttggtttccaccctcagccttccaggatcctggaacttcatcttcatggcaaccccaggggtagttaaatccagtaccagaggtttctagatttggtgttgacgtggagcagccctgggagcccaggagttcaccccatagtggcttttcttagagtggcagcagaaatgggcaaaacaaagggtgtcaagttaggcacaatgttcaccacagctggtgacttcctggattctcttcatctcctcttggagtttctggagttaccttggagatatcaggcctgatggagataatagcaaaaagcaagatatgcggctgattaattcttgaaccatttttaagataacaagcaaacggctgggttttttttttcctctttaatttttgtccttcctcttttcacatttcgtgtactgaggataacgacaccaaagggtgttaaattggttctgaatgtccacctctggctggccacattttagtaacgatttcattagcctgaattatccactttattttcttgtaatgggattagctgtacttgaggcagctgaagactagagggggagaaagtgggggagagcatccactgtgtgtttcattaactcactcaggcagaggggtggaactgaccagaatgcagtaccccaggccagaaatcgtgcctccatcctctcctgagaggaggagcatgcacagctatcccaagggcttgccctgcccaagggatggcagaggtgcctgggtctggctgagagatgcctccttggggacaatttcttccaattatccatgtggataagagggagatccactgcttcttcagagttccacgaatcacagaatcacatctggcctcttttgcttaggcccctttgccatctcaggtcttttctgggaactcctgatgttcactaggaggggtcggactctcagccagttcctcgctttgacccaaaataccataagggcttaggaggggtcacctgcttggcaccaatatagatccttttcacagataagcacattactcacaacagttcccatttcttcagttcctgatacatgccaggaacctggattcaacgacattgtgtgggctgggggacgttggttggagcccattttataggtgacaaaactgagcctcagaaaggtggtggcaggtgccgggctgggatctgaaccaaagtctggctccgcacttaggttcttttggtgatgctgtgattcagcccctcactgtcagagctagacttcctctgcagaagctccctgctgtatacagtccctggtgagttagaagtgttacctgaatgttagttaaagaccaaggccttgtgccttaatgtgtatgttcggcccttctgaagtgactgccttcttctcctctcccatatcgtacctcccagctgtattccatggaataccagtgtcctgagagatgctaatagctttccttgtttgggagtttgagaaacactatgtcttttcctttcccagagaaatcctccatgcacctaacatcttaaaggcactgtcaaggtctgcagcagaaaagcttgctgaactctgtttaaatagatgtctcccaaacttaccaaatcccagaagactttaaacatagaatatctatcaatatctttcaggacaagttcaagaaacactgttttaaaaaagttatctctgatttttaaaactctatttttatgaaattctctgcccgaggactctattcaggttcagcagacagggttcccccttcagttgcttctaaactgtacgcacagatctaccccgtctactgtgaggcaacaggtaaggagagcataggctttggggtttcatcaggctttggtgtgagacctgtctcaccatttaatagctttgtacattttggtaaataccttaagcagccagagactcatttttcctgtatgtaaaatggccacacagctgcctcacagagttactgaggacgcataagagtaatacatggactatatttagcacaatgcctggcctgctgtgtgctcttaaataaaggatgtgactaccgaaggtgcctgcgatggaacaggagaaaaaatactagaatgtccatttctacttaggttttatttcatccttctacatttcctatttatttatttatttatttattcagacaagagtctcactctcaaccaggctagagtgcagtggtgcaatctcggctctctgtaatctccaccttccgggttcaagcagttctcctgcctcagcctccccactagctgggctgtttacaggtgtacgccaccatgcctggctaatttttgttttgtgtttttagtagaaatggggcttcaccatgttggccagggcagtctagtactcctaaccccaagttattcacccaccttgggctcccagagtgctaggattacaggtgtgagccaccgtagctggccttaaatttcctaatttttatttaaagatttacaaagagaatgaaatagcagtacatatgcatattatttatcagttttaaactgtacatatattggagatgcatgctgaaaactattttgctgagagtgtgcaccaaccctgggttggaggggattgaaaaccaccggcttaaaatccacgccccctggaggccggagcacatcaggtccacatttctttcccagcccagagcttggtgcctgcacagaggatatgcttgggaaatatttgcctggtgatgattgcaggatccatagtatctgaatgatgagtcccatgaaaattcctaccaagcttcaaattgtgatttcggtgctggagattggcgagggatgattcaattcattcattaagtgtagccacaaatgtgttcacatctgaggtagatgctgtgcagcaaattgccatggcaagaccctctctgtccccaaggagcttagaatcctgcagaggctacatgatgtgaacacaactgagagggctggtaggctgcaggggccaaaggagaggtcagaaagaccctgttgcttgtcccaagacctaaccccaggtcataaggaggtaagaggattccttatttagggatatagaccagctcttatgatctcttgaaaccaaaatcagaatggagcccaaatgtaggacgtggtacccaaggcagcccacagactccttctgttgtttttggcaacacggtgtcttgactttgttaccaatattttaaaatctcatttcttaaaataatctggaccactagcttctttggaagaaggggaagatctgctagtcctgggcccagatgtccacctggctatctagcttggggctgagtggcccctgtcccttccagtggggcagtggacctcaaccctgagcaggcccacactcacctagagggcttggtgcagcccctgagctgatccagaaagacaagaggagggcagaacattgcatttttgacaagctccctggtgatgctgatgctaccagtccaggtatcagtccaggctggaaatgatttgcccaggttcacccagttggtgagggcagagccaggccaggagcctactttttgcatgccaaatccgccccatccagagcctctcaggagagtctgtgggttccatctgaaacgcaggccctgactctgatttagaaataccatttaagtgctcatccctgggatttctcatctagaaaatgagagagggtcatgcttgcctggaaaggaccccaaggaaacgctattgagaaaagctaaaggccctcctccacacctctttttttcactttcttggaatctaggccatttttcagcctccaggaggcaaaaatgaaagggaatattgcgttgatggtgataaggtaacctttctacacctggctctcaccatgatgagcagtagctggagaagttcagtctaaaaggcactctaagaagggagagcaagaacagaagaggaagaaactccactcctaaatatgcctccattaaatggcttccaaagccattgcctcttgtcagagcaggcttgaccctgcactttgtacacactcatcaacataaccttctgcgggagagaaaacatctcagtgcagggcaaaccatgctgaaactccttatttgtgtctgcatcttggccagggttgcctgtgaaggagccagtgtcttctcgttcccaccaagcagcacatgatttgaacatcattatccagacagtattcccttggtaaatgatctagctggcccccctgccccttttttttttttcttgctgtgatgattcattgcctggaaggaataaacatggatactttggaaagagtgttgattcttgaggaccaaatgctccttgtaatagcatatggttgcactgcataaaagagcatcatcctatgggacagaaagactgaatatgttgcccccaagtgtgactatgcttccacaagaacatacagttatatgagataatgcatgagaagtatagggacctggcactcggggagatgtcaatagatgatgaattcatgattaaatgaatggatacagtgttttctgagtgctagacacagtctcaggttctgtagacacaacagagtataagagccatgacatcttggagtccactttcagtctctagcaaaatgagaggaaagataaataagtaaacaagccatttcagacagtgctcagatgtgacaggcaggggtgggtgtgcaaaggaggcaacgttagataggatggtcacagaaggcctctttgaggaggtggcatttcagctgagaattgaatggcaagaaagagtcaattgtgaaaacatctaggcaagcagggttccaggtgatacaaaaagcaagtgcaaaggccctgaggtaagcatacgtttggtgggttcagggaatggggaaagccagtgtggattcttcatagtaaatgagggggtgcagggcatgagataagattggagagcaagaaaagtatgtctgatcaggcacagccttgattcccaagtaaggagctcagaaattattctaaggatgcaaaaaccattagagagttaagcaatttggaagagatgatgactggcacatacacacagaactccaggcagtagtggccattgaaacccactgtgggaatggtgatgactgacagatattcatgaaactggggacagtagtagccattgaaacccactgtgggagtggcgatgactagcacatatttgtgaaacttggggcactagtacccattgaaacccaccagactgattggattagcctctgttagagagttggatgagacaggcttgagacaagccctcaccaaaggctttagtttgtatgtatctcaggaaaagtgagaattttagatgatagttctgttcccaagcctccctccactacagaaattgcccattatagatgaagggataggtttgttcctagctgtgcagttggtctatctctccaacttgccacaactggggcccttggccacatgggaactctgtaagggaagaggaatgtgagacaggacaccatgcaaggcagctgccatcttaccatatttcttgctcagtgggaatggttccatgggtccataagttcactggtggggcccttctttaggatggggccaggggagcagtaagcaaagatcaggcatcctcagctctatacctttatcagttgagataagtggctttatcccatagtcttcttgagcatctgaggaagaggggagggagctcactggctgcttcccagctaagaggcttcccatgcagctgcccccaatcaaggtgagggcaaggttaatacttgacctgctggtgactccctccctgcactctgcatcatctttggctgcttgtagataggtggaccaatcgtgtgagctcttagcaaagcatagacctgtggggcacaccgcctactttgagcctagctaagcctgatgctgcccatggaaccatgggcaagtcacttcgcctgttgtggtaggtaagggctcaccgagaccttggagaaatcatgttccttctttgagcctcagttttctccatctaggaaatgggattgacattgctcagctcacatgggccttgtgagttcatgtccagcaggtgctaacatgctgcagggcacgtaagcgctgaggaagtacccagtgaatggacagatgtgcgtgtatgtgcatcatgtgtgttagaaaattggtaggggtggcatatttgaaaggctttttaatgccaagagattgagctattttttcttacctctagaaggagcagaagaagcttgtagtttattcttatcatgaaaccaccccttcatcttgttcagatcacaccgttgttctgattctgggtctcttaggtggcagcagactttcttttctcaacaatgccttgggcgcaggtggggagaagttatgccagcaaactcccccacatgactcagcacttctgctgggattctggttcttccagcagatccgaatagtgagggggacttatgtcctgggagcagaaggccctaggtttgacccccacttggtgccagcatgcaggctgtggggttaagcaggactcccagcctgcccaggctccaggtaccagcacagctgcaaaactgtccagctccgcatctctggagggttctcgcttcctctgcttcagccttcctctcacttctttccccctgagcctgtcgcttcagtcagggagggagagagagacccaagatgattcatcccttttcggtagcagctgctggccagggctggggcaagaccagtcagggggcacgcaatttgcacggagagaggaaatccccacccacccatacgctggccccacacacacacacacacacacacacagacacacgtattgtgtctgccttcaggcctgtgtgcaaacacgatttccatcccccgacttgtttatgagtgctgggcataattggcttgcctcatgcaacacctcggagccccatcccacctcctcccccctcctcccttctctccccccaccacacacctcaaaagaaattagaaacgtgacaacaaactctagttgtggaaaacccacaaacccaccaccaatcatgctcctggcatggcagagggggtggggctgcagggtgggggagtaattggtgaacccagggtgaatgaaataattggaaaagtgaggtgtgagtttgttaccgaagtgtgagcctggtgggggagggaaggagggctgtgtttaaaagcccggtatgtcctctttattcacagcttctgatacagtaattgctactttgtggtttctattatctgcacagtggggagtgtggtgtgcatctccttccccccgagcggcagagttgggctcagggaggagttcctgggtgccctgtgattttcttcctccccagtccctggtggccctgcgcagcttcgccccaacactggcctcagctcccaggagacaaaggttcatgcacaacttccttcaaaagctgctcttaaaaacagcttcgtagaccttgctgtcagataagaaccttaataatggctggtatttatatatcgcttatctccaaggagctaaaggtacttcatcgatttcttctcccccaacctttttttttctttttaattctctttcgatagctctctgagatcattagtattggccttatatgatcccacaccgttatacaagcaaccaagccactcactgtccagctttgttcttgggctgggagaagcagcccggatgagaaagatctcgcctcgattttgagttcctggggccatgagacatgggcaagtcgcttttcttctccgtcccttggttttcccatctgtaaaacagaggcatggatatgatgtatttaaaagactgcatattgcaggcactcattggtagcggaaatgatggcagcaatgatggtgtcttgaagcctcatccatgcatttcaggaagtgtccacagacatcgggaagttccttctaagatctaaccctgatctttcagctcctccttaagcttcagttctctcatgtcctgttcttagaaggaggaaagaaacctgctcactgtagccatttctctgactctgaagaataataggatttctgaagcttctagagtcttcgtgggtggcgtttcatttgtcatgctgatgtctgcctggaaacccccaaccacagctgtgacctcccccaaggcccttcagctgcctgggatgggatccccagctccctgatccctgcctacgatccctggtagatccagggtgcccttctgtcccagctttccctgctgaactctcaaatgccacttttgcaggccacaaaagcatgtcttctgtagcctctcctcaacagcgtttttctctaccttttaattatttttctcgcctttctccggacccttagctgcttaccatgcacagagcatccacagcttgcagtgtgctgcagagagggaggaattaaccccaacagtctctttctctctctctctctttctctccttctctctttctctctcacaccaccaccccccgaccccttctctccttcacacacacacacacacacacacacacacacaaccgagtctggcttaccagaaatctgggcagaggtcattgagaccatcaagggataggagattatagcccttgtgggcagaagtagagggtttgcacacagtgtgggcagaaggaactgggactcggtctacccccaccttgcctggtggtcttagggaagtcactggacccctgggagtccacacagggcattcctagccaccccgtatggggccttcctgcttcacctcagacctggccgagactcgggaagaaagaggccccagctcttgcaagtggccagtccccgtccagatgatgcaagcgggttgagtcattgtgcagcagaaagagagcttgggcttaacgtcagacatgcctggattcacattctaaccctgttgcctgtgaggaaggatccctggctcccagagccttggtttcttcatctgtaacatgggaatgataaggctaacaatagttcacatttgtgctatgtgtatttcatttcaccctcatcaccgccctctgagggtaggtgtaatttacccgtggtaatgtctaccttccagggctaccatttgcttgtttattcgttccaaaacaccttcaggcttctaccctgagcccgactcctgggctcactgacacaggtccagtgatgagcaagagagatggggcctggactcttgcggagctgagccctagccctggccagggaaggcatgcaccccacagagccctggtcagggggcacagtgagcggtgacactgtggatgggggcagtcaccccagcctccaggggtcaggaaagacatctcggggctagtgcagttaggtgaggccaaggcacggacggaggaaccagctcacccagtggctgtctatggccgtgttgagaaagcacccagcctggtcttccatgtgcctctcagttgcctcataccagctctgaacgctctcaggctccagccccttagctgccggatgtgccatccctgtagtcccagtgggcttctgaagacttggacccaaagaaccattcatctgaacgagcttacaagaaaatttgtccacgcccttccctccctgttcaaagccagcatggcagaggggctttggtggagggaagagagactgtgtctgtcatgggatgcatccgcctttaggtggcagaatgaagtagggtttgtgggcttgactcctcagctctccaacctcaccttgtccccacctgcccagcctctggtccccagccctggcccccctccagcagggaaacctgaccgggctccactccccacgttcctggctccttcccctccccgggaggctggccttgtcaccagtgcctctctgccgtttctcgttgcctgcacagaggaggcaccaggaggggggagcagagctgctggggagagctccgaggagacgtgcagattcattttgaggattcataatgccgcatttacacactgtcctgccttcagaaattgggctggcagatgcctggtcatgctggcagggctgtgggttaacacttcggatttagcttatatcatttcacgagagcttacggcctttactgtgttttttacccaatcggtctttggccccgaagcatcctagaccatcgtgcatatgtgtgtgtgcgcccaggcggccgcaagtgtgtgtagattttcaaataaaataatacctctcttcagatgccgtgcacattaaatatttatcggtagcaatttgtgcatatatatttgataaatggacattagaaagggattgggaggtgggaagtgagacagggaggcaagggaggcctgagaaagccctatccctttgtcctacaatttctcaaaggtttaacctggaggagaggagaggagggaaccgggggggatggtccaaggccgtggttaccagtttgatccctatcaggaggagccaagccattttcttctccagagctttgcctgactttggcttagaagatatcgaaatgaaagctcacagggaggggaagcagggtttaaagggagtagctgcgtatcatttgagcgctgaagaaatacatgtcccaggtcccaggtccaggagaaagggccccatcccatttgctcagcctggggtcgccatgtgctcagctcagacatacaggcagtttggaaaggtcaggcaaccctgctgatcacatgtccagagcccctactagcacacatgggcagccccttgccctggccaggcccctcaaccggagcctggctgcttgtgtactaggcagggtcctccccagtgcatagttaccccacagggaagtggggccccatgggggcagggagtctctagctggttgcagaggaactaaaaattctccattcacatctccagcctgattgttccctccctgccctgcctgatggcccgggcctgggaggagaaggctgctcatgcccctgagctgacatgtgtgagcgtgtgtgtgcctgcatgcacttgtcttttataacccaaagggatttacatgtgagaatcagtcctgccttcccgacctcccttgcaggcctctattcttaaacccctatgtcttgccttttgtttctagcacctttggggagttgaagacggtccgcctgccaaagaagatgactgggacaggcacacacagaggcttcggctttgtggacttcctcaccaagcaggatgcgaaggtgagaccgtgaatcccttccccacctgtccaggcctcccctttccagtacccattgtaggagagacagccaggcctctaacacacacagagtcacctccccatgcaggtgttctttttttgcctttgtttctgcttaatgtgtacaacatccttggagaagatcctggggggtttgtatttggaggaaggggcagtttctgtgtccccttccctcccctagtttcacatatgcaggaacctgggacataaactggggatgggaagcaaatgggtttcccaggcctctccacgtcatcaagaaaattcctcagttcaggtggccccctggggtaggcagtatgggaaatgccacgcagaacagtgcagagagggcagggcgcttggagagtaggagacacccaagaagcagccacgggaatgcgtcttccccttccttttttccgctcatggccagggcttctgttttgtgctggttatctgtgagggcagcccctgcaggtgcagctgcatgcaagcgtgcataccgaaatccctccaggctccttgagaaccttttatttttgaagcaaggcggcatctccaaattggttcagtacagcacagccaggctttgctcctgcagtgggtgctgggcccagcctccaatgtggggcagaggctgtgtgaacaagagcctggctgtacccaaagccactgccctcgtggcattgagctccaggtcagaatccagaaggaatgtggctgcagagctgtcacagtgggctgccttccgtgagctctgcccacaggtggcctgtcccctctctcagcctcactattcctcaaggctaaaataaagtgacagggaggtctcattaatggctgggatccccttcacctctgacgagctgctcctcagaagaacagtgaacatttcctggagtcacagccattgggctttagcaggctggcatcacaagaggcccagggggtgggtcagctgtgcagagccaaaggtggcagctccaggacacagctgcggcctttgtgggccctgggaacatgcacaggcagagaaggcgcatggggaccctcggagagcctcgccagccacctttgtctccgagtcttgagctcaagtgcctgttttgttgacacatggccatatttgtctggacatctgctcctctctcctcctggctggcagcctttccctcgcctctcatcagagacagcaggggacacaccttgcatgcagcaggtcatggccctcaccctcacagcggggcaggcacgtggtgccctgtgttggctcagggcagcagcggagggctgcctttcagagctcccacccacggcagttcaacccacactggccttccctgtgccacagttttctgatctgtgaaacgggaatgatggctgcgcccccctcccagggttagggcaggtgatgcatgggagacactgactcggtcctggcatgtggtgggtactcgataccagtacaccgtttccttctcattgccaccagcctggttcccttcagagccacccttggtctatggattcgtgcacacatgtgatgctctgtggatagaagagagtacagggcagcgtcttttctccactgcattccactgagctctgggtatccaaggggattgggcagtgatggtgtagaagtgttgtcatctgtcttatatcagagttcctataggaggctgtgcttgggggagaaatgagggattcactctctgctcctaagaaatgtctcttacaaagaacaatgcaagagcttgttgttacaatacaaacttcaaagccagactgcctgagtttgaaccccagagctgccacaaatctcccgtgtgaccttgggcaagtgacatcctttctgtgtgcctcagtttcctcccctcgtaaaatggtcacagggttttccatattttcatagagtcattgtgaggtttggatggggtgataatttagaacagggcctggcccctacatacgggctattggctgtgatgaggaggcggaaggcattggtggtgacagtggtgatggtctgaaataagaaagggtgttccccttcttatttggccacccactgggcctcttttctcacccacccactgggcctcttgtgatgtcaaccttaaatttaaagcccaatgggtgcacctccaggaaacgctcactgctgttctgaatggcttgtcagaggtggaggggatcccagccattgatgagagcagagagcaaaggcgttggagccccttcactggaagccctctttcagcaccaagaggttgatgccgagttgacacagcccttgggacatggagggtccaaccagggctgggccccagccatgagccctttgacatgtcaccgttggctaagttttgctcttcagctttattaggacagaaggtggactcccaggtaatcaaggcagtgagtgccattgaggaagttcaccaagtgcccaggtggctcgcacttggcacacccaggcccggctgtggatgttccttctgaagcccagcacagccctctagtgatttatggaggtggcagctcctccccctccatcccttccctgcctttactccgggctctgggaggagaaagggcagccgaggacagtacaggctcaactcacagcctctccgggactggcccttctccccatcaggtggctatttctggcccctccatccctgtagtgacttccctctcccacactggggcttgtgccatggaacgcactcgtcttccaggaaggaggagcccatcacaagcacatctttcctgcaaggatccctttgctctttttgtttcctagggaagctgccattgctttctccctccccagctccaggtctgtctggagaactttattgtcttctgagtggaacatttagcactctccactgacccgtagaatcgtgcacactgcatattagtgaataggattctgaatattgtaaatatctagttagctcttgagggtgggcgtgagtttgaagagggagagcaatactgccagagacatggagtcaaaagcactggtgatcttttttatctcagcagaaggaattagtgagaacccagggctggtagaggatcctccatgatcccagcctctcagggccggctcctgtgcatcctccccctgttgaagctcttagggaaggagatttccttcaaaaacccttcccagggctcagttcaaccctgacccactcagatcccccgccaagggcattgatcccatttcctgtcatggcaccctcgatgaagataaatagtcgccccctgtgttggcatcggccacctcttaagccaggaggtctgccccagcaatcgtcagatgggaggaaagaagggaccaggataggctgaaaggagggggcagctaagctcattgtagaagttgaggctggaacaggaatggagaaatgaatggtttctgggaggggccagtgccgcggcttgctccccggtatctcaactcccagaacagtgttctttccccatcatccaccagtccgtttgcctgctgacagaggatagaagagttaaggcatcccctcaacaccacagtccctgctgtggccctgagcacatgccgtctccaccgtccccgaactgaggggttctgagttgtctgacccttctccatgagacccacgtcccactgtgcatatcctcgagggctctgtgatatctatcaagccctttttggattcagcacacatacccccaaactggaaagagaatcctagccagaggctcctcaaaggctgttgtggcagagctcagagtaaccaggcaactgatgataatagcaagaggctcccgcgagcgcgctggctttgtatgtgacattcaccacactcgcactgccccaccccaacctgtggcagctccagcatcgggtgggagatttgcatccagtctccctccccagtctcgctgagcatttgctaaactccagcactgaagccaccgtggagccctatgaattgatgggaagcccagaccccggtctgttactgagctgctccagtgaaccgggggtgggtcctgaccatctgccctcatcacgggccctggtgaccagaggcctgctcagaggaagcaggatcgatgagctggcatattctcccactctaggacattctatcagcccctgatgtcccgggcagtaaatgtcagtccctctgaaaatgctggtgttatctaaacctccaggtgtgatgatccggcatttcttaaagagccttccccacatgtggagggaagcaggggacagaggttgatgggggaaggagaatgggggtggtgtaggaagtcaaggactcaagcaggactgcatcctgaatgcagcggtctcctgggtggcctgggtctacaccgtgtgcacggctgtcagttgtgtcatcaacgccatgcaaccaggggaccacacgacctggaagtttctaaaagggcaatatctttgagttgataaaaactgtcaacttctggaagcccgtctttggcagggatggtgtaggatatttgcatatataagttttaatcctcatgggactctaggagataggtggtaggaggccatttgacagctgggaaaccaaggctcaaagggacaaagttgcttgctgaagatcttatagtggcacttggcagagctgggaaaaatctaattccaaagcttgcattcagggattcctcctcccttcattcactgattcacttaaattctgtgtatctccacgccaggctctgggtagctccccttctccctaccatgcccaccacctctcacccagccctgacacctcaccaaggagaaggactctccaattagagggacactttggaggaaggccaagaggttgtcccttaaaacgtctcttgggaacaagtccagaatgaaatcaactccccccagcccccagaggaggagtgggcattcagtcagctgcccccactagcacactctaccgtgctgccttccaaccctgccaatccccaggagtagcctcactgaggaggcagcagcctttcacctgggcagctataatggggactccctaccaggtacactcatccccattggctgagtggccaccaatagccattgggattccagttagaagctgccacctcctctctctttacccagaccgggctggtcctgaaggaagaaaggaagggcaacacggaaggggaagaccacaaagaatagacttgcagcccagaagccagaatattaattttttcccatgcaatgtgcctttaatttttcccttccccaggcctgccgtgcctttgtacttttgcagttgcagctgtttttatttgccaccgctgctgttgttttaaaaggtctattttcacatggaatgctatccaattagcagagcaatgtgttggcttaaataaacacttggggggagccggcagtagggagacgcggtggtggttggcgttggcaggcagagctgttctcactgtggtaaacaaccacagctttcattgtagggtcgcaccagttaatgtctccttcctcatttctcacttttccactctgccaagggttggggcagaggaagggatgtggacatgtggcccaggccctccccagcctgggggatgccagtgttttggcagaagctcgcactgggcctctcgaggagtgttctgtgagcctactgtcttcacctggcagattctagccaaacaggacctgtagtggaagggaccaatgatgagcgagccggacaaagctcattaaggccgggacagccttcctcctcgccgggtgcccagcgcacccagcacagtgctgagccgtgttgtgtgcacagtaaaccatcgctattagattgtcagtggcgtgcgttcaacacgtttgtttaaactgagtgcagaggaggaacgtgctgcacgctggttagtgtggcctgtgacatcaagcggcctctttgcagctgtgcgaacatggacaagggacttcagatccctttagcccaagtgacttgtccccacacaggcaataataaggctgcccttgaggcgtttgtgaagatgaagcagaatgttgcatgcaaagcatttaacacaggctgtggcacgtgacaccaaagaagtgagggtggctgagtgttcctctgggcccccagggatcagaggtgctgcagcctgaaacctaggtgtccattgtcctgtgtgtcccaaaatgttaaccgaaagcaaattcaggaattggagttttgtccccacttttctgttcaggtgtgcatgtgacgtgtgtgcgctcatgactgttttgtaattgtgggctttttgccaagttttcttcagcagagccctggaggaattgaaaatgtgtttgaatcccgagcttgcatttcaaggcaggctcagccagcacacatgtatatgggctgagacctgggatcaggacaggctgccctcctcagatgggcaggtgagcagcccttgtggccaagactcagtgccaggacggacccccctgctaattgtgtccctggagcttctgtgcggactgaggactgcacagtcctacagagatcagagtgagaaggactcaggttcagacgtcctcatttcagatttatcaggcaggccgtactagtcatcaaggaaaggtaaaactcccagccaagtttgacagccttcctcccttttaacagcattaaaataattttttttttttgagacaatctcgttctgtcgctcaggctggagtgcagtggcatgttctctgctccctgcaacctccacctcctcggttcaagcgattctcctgcctcagcctcccaagtagctaggatcacagacgtgcgcctccacacccggctaatttttgtatttttagtagagacggggtttctccatgttggtcaggctagtctcgaactcctggcctcaagtgattcccaccgcctcggcttcccaaagtgctgggattacaggcgtgagccaccgcacccagcctaaaataatttaaattaaaaaaaaaaaaaaaaactttaccacaaatggcaccagcaacaggtaccaggaattaggcccttcccattatgccaggcgttgggctaaaggaagagttgctgtcttatttatgcttcccagcagctctgagaggctgaagcacccccattttgcagttgaaaaattgaaaactcagagaagtttattgaaagcagcaggcccaggcctgtgcctgaggggagcccagagcctcagctgtccgtgctgcccgtggccttgtggcttggtgcccttgggtccctggcattggccctctctccctagtggctctctttcctctcccaggggtgctataaacttgcagaggtccaaagtgtgtcccacttttgtctcctcgtctcatgtttgcctcacaatcagctccccagagactttgagccgaatcgcactgagctgagcgagctagggaatgaatgaatgagagggagaggtgcctctttgtctgaagagttcagacagcatcacccagaagctgaccctggatgtctctcctagaagttcaccctcagctccatggtgtcatttctgggaagggaccgggatgggagtcacccaagattgtgcagggagcttaacttattctgggcaaactcctgcctagcagacagctaccctgtgaggatggaagcagctagtgaggtttgctgagagcttactcacaggacagtgggagccttgggaccgaaggaaaggatctatctctctctcagggtgatggcgttaaaacaccccagggaggcagaccctcctcccagaagtccttggcctcaattttttgaccacctctgcagagagcccccaacagtgccagccacttactctaggtgttgggggcacagcaggtttcggaggggttgatgtcgtccttgttaggacagatttatcgtctgctgagagatgcagccctctggctttgccagggacagctccctgaggagcagaaggggccaggagaatgccttagagttctaaagacaggaatactgtcctcagctctgcccagaagccgtggccctgggcagttcttcgcagccccttgggatggaagtcctgccaagggcatgcaatgccttttgttgctgagaggaggtctgtctccagggaagctgcagaaaggtcaggcccagtgctgcaatggcagccttccaatgccttcccagttcttgaaagaggccaccaggctgggccacagtctagcctgcagctgtcaaccccacaccaccttagcagattgccttctaagggaattcagaaaaggcggcaggaggccaggcctcttgatgcctggagtccatggcttgagtcagaggagctcaaagagctgtgatttcaggacagcagagccagagagctggatcatgagggcagccctggagtctggctagacctgctcagagctttcctgggtaggcctcaaattctgagtagggccaaggcatgcgagacaccccatctgaagtaggaaatccacctgtcccccggtcaaggcaaagggactccagatcctgccagggatctggcaagaaacagaatctacccccacccccaggtggtgtgaatgaagaggtatttatggaggcataggtagggctaagggattccccagggatggcgaagcccccagaactgtcatctcccttaggccaagaggagggttggaaggaaagccagggctggagctgctgaggagaggccttgagcaggagctatagccctgcagggagggggaggtacgcagcaccaacctctctcctccctcttcccctctttcctccagtctcccagaagtgccacccatttgcttcacctcagtagaaaccagaggccaagggagccctggtcacactgtgcagagttggctcctaaagcgtagaggatgggggaggagggaccaggaataatcagccctggccatcaatgatggcaggaagtgctcccaagagcagaggtggcttctcttctgtgacgttcgttttgctggactcctgcatcctcggggttctgtgctggatcttcaggcctctccagcagaccatctgggggtctgacatgcgatctctcgagccatagtggtgcaggttactgttcccatcctgcaaagccccaagccaggcatgttgggagcagagccagacccaagattatttgtgtatcgtttcaaaaggccaaatgtcccactcgtctggatggtcaggcactgcctgctctctcagaacgggacatactcctatccccgttgcgtttgtagtctataaagtgcaggggtttgaagggaactgtggcaggacgtctaagccagccctgcgtccccagctaggaccagcctaaccatctaccccagtctggagacgtgttctcaagacacccagtgaaggagacgccacagtgtgctttgtgaacattgactgagtggcctctgccccagcaccaggctgaggatcttaagcatggagcgccttccctccagggttcaagattgagtcaggaagactggcacacagaaggcattatggggcagggagcaggttctggaaacggaggccaggtgtccagggcacagggagggtgcctggctgttgcctgtgcaggaggagcagaaccctccctgggccgtctgtgtaaggggccagagacaacgtgtagaggccaaaaggaagaaggagaaggaagttgacctgcatacaaaccttggccagtgcctcagtttcccattcattgaaataggagaataatgtctgttctcaggagtaggctgaggtcatatgcttggagtgccgtggagctaggagataggatcatccatgctaagaaggccttcgatgccacaaaaggaaaatcagacagcaggagccagacttggagaggaacaaaggtgcagtaactcctcagtctcctgagatgaacaagcccaggggctgttttggcagaggagcatcttgcccgcagctgaggtttagaaaaacgcttgggagaaggtggaggtcaagtttcagtggggtcaagtgtaggtagacaccagggagggagctgctagtggacctctctggcttgtgcttttccctctgtgatggctggaaccttccaagctcctcacagtcttttctgtgccaacccaaaagccccttgagacccgggcctgcatcttcctcctcctccccacctgccttgcccctagaatgtgtcaaatataacaagctctcgttatgctcttttaatgaaacacaattactctggattatccaaggcctattttagcctcaaatcactgtcctcacactgcctgcgacagtttgaggccaccacattccagccacccaggcagtgggcacttgggaatgcaacctgatttcatattaacctgcagggactagaactcagcagggtaattctgctatttttggagaaccacgtattgtgctctaacttcaaatacaaaagagcttttgtgtcttaccttcccttctccccactctttagcctgataatgaaaagtggaggcatacatcatcataataacagccaatcttaagtgacacatgttatgtgccagtgttctaagtgtcagacttaacagttctctgaattctcactactctttgctgctgccctccttttacatatgaggaagctcgggctcagagaggttcagcagcttgcctgagatcacacagctcataagcactggagcagggatttgaaccaaggcaggccagcagcagagcccaccctctaaactgccatgccaccacccctcttaccatgaagagctcttccagagagaggccaataacgtgtcagaggagtgcagagggaagagagaaagatttgtgagaggtgatgtcgcaaagaagccaaaagagggaatttttagtgactcctgcaatgaatagagatctcctgggctttctgtggtacgggaatagagaactggcttccaagggagagaaagaaacattgaaatctgacagtgggaaacagagaggctggggttggggcctctcacccggacctacctcctgggatcttattccgttcttgagagttccagcctagcattcaccagatgcatccccttggccacccccaccccaccgtgtccccgggaccacagctcctcagggaccctggcacgaggatggaacatccgccacaccagactccccaccaattcctctcccccatcttaaaaccccagctcccccagtcaagccatttctctgcctcgccagctgagaacgcgtgtgttttaaagctctgaatgggccatttcggctcagagtccagatgcatttttatatccacatggaaaaaaatgcagaggctctgctggcagtcagaaagagttttttaaattaaagttaaaaaaaaaaggaaagaaaaagttttctgcacctggtccttcacagaacagcacagaagagaacaaagcgtttctttaatttggctgcatgtctagttttaaaaagatgcatgttctagtcacctcccttttgtctcttcggattcatttgtttattgaatgtgtattatgtgctgccctctgtgctcgttttgtgtaaatctcacagccagccccaatagggatgaggaaacggaggctcaagatgtggcagttgattacccaagggcattgcgtcctttccctagggctactataacaaaacgccacagaccggatggcttcaaaccacagaaatgggctgggtacagtggctcaggcctgtaatcccagcactttgggaagctgaggcaggaggatcactagagttcaggagttcaagaccagcctgggcaatgtagggagaccccgtctctacaaaaaattaaaaacttagcgaggcattgcagcatgtgcctgtggtcccagttactcggtaggccaaggtgggaggattgcttgagcccaggggttcgaggatgcagtgagccatgatcacaccactgcactctagcctgggtgacagcgagaccttgcctcaaaacacattttaaaaatccagaaatgtgtctcacagttctggaggccagaagtccaaaatcaaggtgctggcaggattggttccttccgagggaaatcctgtttggtgcctctcccctggctgctggggacagttggcatccttggtttgtagactcatcacccagtctctgcctccatctccccacggcatttgccatgtgtctctgtcttcacatggccatccaatgacactagtcattggctcagggcctgctgttctccagtatgacctcgtcttgactgattacatctgcagctacctatttccaaataaggtcacatactgaagcacagggggttaggactcaacatggcccctcttgcgggacagggtctgaccataggagctacattgtagataaggagcacagttggatgggttcccatccagacccttccagttatatgattcttcacagcataaaagaaacaagagcagcaaacccctcctcttcttgtacccactggtgctctctgcaacccagaagcaaagcaaagggccttcttagccaccgttgctctccactgccaatgctcaagcacctggagcctactgctctttaaactaatgcctgcccgaaagctgtctgctgagagaaagcagctgcaaatgtgatgtctacggtaacaaaacaacagcaacgagaagtagcatctattgagtaattatggtgtgcccatactgttctagacgctgttaactcatttttgtccctagaacccttgagattggcatatatgaacatacccgttttatggataaggaaacagagtccaggaagatttctttaacttgcccaagatcttcaagttaggacctgcggggtctgtccttcctggtcagggtgacctcagactccaagcttttggccactaagctcacggcctctctgtgccgtgggagtgtttggggatgagcccatcaagttagggcgtccctgtgcagtgccattgaacttgagacctagcgatgtttaagacggtactgatcactaccgtatgattccgttcctatgaaatgtccagaatatgcaaatccatagagacagaaagcagactggtggttgccaggggctgggggactgctagctaaggggtgtggggtttcctttgggggtgatgaaaatgttctaaaattgatttgatgacattttgcacagctctgcgattatactaaaacgcattgaattgtcttcagacaagcagtgtatatagtatgtgaattctgtctcagtatagctgttaaaaagcagaaagagggaaccaggcagcatgtgggagtcgggaacagcaaagagtaagcgggaacagcctgtgccaggacccaggctgctgagctgggggtgggagctgggagcgggagttgggagcgcagggctgggggaaccagcgaggaagcgaagggcactggcagcagagacagaaggggccccttcaagagcagcgtgggggacagagtcaccagggcagtgaaggagagcgacacccagtgacacccagaggcctgcacgcttgtcatccagcagccggccagggctcggctttctcaagtggccgccatgcagacagccgggtgggaggcgagcccactaatggggtcgccctccacagatcggatgacacacggcaaatagacggctgcctcagcccaggcaccaattacagcccagacggcagatatattgactgctcagtcacttgcagctttctccctgggaatgcaacccactaattaaatagatgtgcccaaccgctccccaaaccctcgctggagatcagatgtcacggggccagaacctgggctttggcatctgagacgcaggcaggcagctggcaggcagagtggagtgtctgccgcactgatccagctgatgtgcagtttcgtttcttgtccctctgcagagagccttcaacgccctgtgtcacagcacccacttgtacgggcggaggctggtgctggagtgggccgactccgaggtgaccctgcaggccctgcggcggaagacggccgctcactttcacggtaggagcgggacggtcttttgggctgactcatgggccccctggggaacacaagaggtgggtgggacatctgagagaactgccctcgacccagcaggctatgggcacaagggctgccaagcacctcctgctgggcatcctcccacagcccctccagacctgctgtccaccttccttgggcactccctgccgggagactggcctacatggaagcatctgggttctgtgcccctttgggttgcagtcgggttaggtcactgggggccttggcaggaagagacagaggtcagagtgtttatccctccctgcctgccaggttgccaggtcacagctcgtggccgttggctctgtcctcacagtgctctgtgttcagattccggtgtccgcagggcagggatgctcacggccttcctggtggccagccctggggaccacactcttgctgatcactttcctccatgacccggtccacttcctgccggagggctgatgcccacaggtctcactcacctcttacccaccttggtggtgtcatgtggcctcagtgactattcaggtggtggccagaaaatactgagcgcccgctgtgacctcatgcacccacatgacagtaaccaagcagggccctaggctcaggtggaagaggctgggacacattcctcatcaggtgggctagagaggcttcactgcagaggtgacatctgtacccaacaaagggctgcctaagcaggaggccaggggcaggggagacccccaggttggagcaagctcggtatgtgtgagaaacagggaggacagcatggctggaggtgaggggaggagagagggagcagatgaggtcagcagggcctcgtcttctccaagaggttgtgttcagtcaggtgaggagagggtgagacagccccaagaatcgctccaccctggacacatggaaagtatggcaggtgccccttgctgtcaggtacacaccctccaaacttgggatatcaaggggtacttgaccttgatccccatctccacacctccgcctcccatcacagaagtgcttccactgtggcctgggcccggcagcaaaagggcagctgctggctttccacccactttggatcccgcttacttggcgatggttcacccagctggggagcttctctgccttttgcatgcccagaaaagccaggctccgtgatggggaacagtcctgtctgtggtgccacccatggtgctctgaggtcttcctggcacgccaccgcattcctccccacctcattgtcgcctgggtcccaggtctcaggacctttcctggatggagccaccattgtgccctcatccatcccttctctgtggggcagctcagggcctcgggtgtcacctgggtacagactaggggtgtttgctgccagcatcccccaaccccacttctctgcgtagacatggaacctggagccaggagtgattattccctcgcctgaccggtgcagctctgttgccaaaccaggcagcaccttgggaacagtttctcttatggagataggagccttccagtggggccactggtcttgcttagggcgaaacgactgggcttctgagaagcagcgtctcagcaatgcagcaggactgcatcccccacaagtggacttggaactccagagatagcagggaagccccttgattctagcccagctgccacacgcttcagaacactgcctcctgcccacactgtggtcttcccagactcctccttcctcccaccacacctcccacagagttcattgttccccagactccagacaggattctgtgcctttgcacatgctgttccctctgcttagaatgccttgcccctcactttttttttttaacctgataaatgccttcaaaacccagatagaatgacacctcctccaggaagccttcgctttccctccccctccacaggtatcagtaatttctccatcctctactctcctcttctgtcaccgtgccttcttgccacgttgtaacttatttctttacggtttgttatcctctctggacccgtgccttccccacatgggggctgtgtcgtgctcatctctcttagtgatcagttcttccctgggtcccccgtgcccagcatagtacctggcacatgccaggctcccagtctcagactggggaatattcgagctgaggcaaatgtggaaccagagaaatgaaggctaaatacacagttgcaagctcacaactcaataagaccccaaatcctgatgtgcagaaagagagcctgtccttatcgacaaccattgacaagcccaaatgcgcccgtcggcaaatgtttgtgtaagggactctccctggagtggagacgggggcccatctgccccgccacccccatcccccaaccccggggccagccgaggagtgcaggctcagcggttctgccctgccttagagagaagcccccttcaataaattgagttccaaagacagcactattgcctcgccacagtggaaagacttagctggcagcatttctgtgggattgactgtctccacagccacttaccagccaggccaaggcccagacaggggcagatagaatgataacagtaacaaagacagttcttcatttgcctacatcttcccattcactccctagcagctctatgagatggacactattagccccatttcacagatgagagaactgaggcctgccaagcactgcagtaatttatgacgactactgtttattaagcacttactgtgcatcagggggccatcctcacaccggcatcatctcagtgctcacagcaactgtagcagctgtaggcagtgctatgtctactcagcaaggaagtggcagagctcagacttgatctccagaccggctgtagagcctcccaccccacccactggccccaactatgttatactagcaaacgtcactcaagaaaaaactcctggccaggcgcagtggctcaggcctgtaatcccagcactttgtgaggccgaggtgggtggatcacttgaggtcaggaatttgagaccagcctggccaacatggtgaaaccccgtctctactaaaaatacaaaaaaatagccaggcttggtggcgcatgcctatagtcccagctacttgggaggctgaggcaggagaagcacttgaacccgggacgcggaggttgcagtgagccaggatcacaccactgcactccagcctgggtgacagagcgagactccatctcaaaaaaaaaaaaaaaaaaagaaaagaaaaagaaagtcccaggccgtcactaaacctggggtatgtgagtgttcactgacttcatggctttggcccttctaactcatcgggaccatgaacccaagatctgcagggttccttcagaaactgagagaatgaataacaaatcataatgacaaacactgctggcccttcagaattggcacagcatgtgctcatagaaggccctgttatgtgcatgtttcattgtccccattgtacagatgaggaagctgacatgcataggtgagataaggcccctcagggcgggcttgagtgtcagagccatgtgtttccacccctctgagtccctctgaaagagcactgccctcccaggttctggaaggggacatcagctctgggctccccgagtatgtcaaagatgagcactaacgaacccttccccagtgccacgggagatgggccaaggccccaggggggagcagaattcgcacaggagcctcatagaaagaccctgtcatgcaatggcagcttacgggggtataggcagtgcccatggagcaacaggttgctggggctcccagagcggagtagtgtcagagctcttaaccaccccaggggctgaaagggcagggggaggaagtgatattcctggggtccagtgaggacaggagcctaggagcagctaccagtgggcactgcagtgtggagggacacagcccctgccagagggcagcagcaaagcaggaagaaggggctggggacagaacagctgcagctctctctcctgcagccgtctgctctccggccacggcctcccatcaggccatcccacctgtcggccacaggcccaaattgtccctgtgacacgttcagtagggttcagccttccggggatggagcaggacagaggatggatgtggagggaccagacagagaatgtccagtgtgtatggtaacctacgtacatgtcagggcatgttgccagaggtaggggttatgttttcccgggggcaggagcagccctgagaaacgatgcccaggttggagaggatgctgatatggccctggatgtgacccatccacaggcatcagggccaagcacagcagagtgtcagacctccctgctggcctcacctgtgtggaccaggaagagggggcaagaaggtggcctgagagtttggagccaaagagtctgaattcctcattgcatttttcagcactcttttccaaagaaacatgataatcccttgaaaacaaaagaacaccctctgtagaatacagcaagatgtaagatggggattgttttttaactaagaatccatgaaactttgtcttccagtatggctggcctcagaggaactgggaacgcctggtaattgcattacctgggtccccgtatggctggcctcagagggactgggaatgcctggtaattgcgtttgtgtctgcgtgtgtggcaagaggatcttttgttttcatcagatttctaggaggtcatgggccccaaaaggtttaggaaccaccagcttaggaaaaagagcatcaactttggagtcagcaagacccagattctgcattctggctgtgtgttccagggcaagacctggattccgcattctggctgttgtcctggggcaagtcgttcctccctgtgagcttctgttttctcatttgaaagatgttaacaggggtaccccttctggcattgatttgacagtgatcagggaagtaacaaaagccatagtagcagctttccttactggggaccaggaactcttctaaatcccttgcagtgaggggtctcatgtcattcacacaccaccgctgtgagtgaggtgctgttcatctccccattctgcagataggggaactgaggcacgcagagatgaagcaccttgcccaaggtcacacaggtagtgaatggttgaacttgaaacgatagtcaggtttacctctctatccgtcctcccctgggagtgtgacactggattgggaaagtgaggtgatgcctggagtgtgtccagcacagagcaggcgtgctagagatgtcagtctctctcacccactgaaacacctattgtccgattgatgtctctgggacacaggaggtgcccacagcagcctcaaatgttcagaataggcctgctggcctcctgccctcctggccagacccttctccccaccctgtgcccttttcccatggagaaaaataactcagttcatttgtgtgaaaatccgcattgttcagagctcctggggccctggcagaccctaagagcaggtggtgtccatgcccagttccctcccctggctctggcctcggccctgaactctgccaggaaggcactcagatctcaggtggagactgccgagctctgaggccacaacaaagagctctctgcagaatgtgggccacagaatgaaaggcaggcaggcatcttaaccattcggcagggcctggcaggaagatgccggtgacaccgtagcctgtgagccgcactcagggacagtgggaagtggccagagcagatagagtggagctttggcaccagccgaagcccttgatgtggtccgtgccccaccagcgtgaattacccttgagtgcccctgcccctgggctcagcttcccagctcccaggactggcctcatcttccctgggtccctgagcacctaggtcatagtagaacattcaatttgtagttcaagctaaataataccaattattattatcgttactgtaactagcaatcttcatgggtcaagccttacttggcggccaggtactatctgcaagctttcatgggaacgagtcctgcagaatcctgggaggtaaatacaggtcctcagataacatcattttatcataattgataagaaaaaaatagcttcccatccagggccactgtctgtgtgcagtttgtgtgctctccctgtggtgtttgtgtgctcaccctgtggagtatgcatgctctccccatgttgtttgcatgttctccccgtggagtttgcatgttctccccgtggagtttgtgtgttctccccatggagtttgcatgctcatcctgtggagtttgcatgctctccccatggagtttacgtattctccccgtggagtttgcatgctcaccctgtggggtttgtgtgttcaccccatgtgggttttctccaggtcctctggtttcctcccacatcccaaagccatgcacgctgggtgaattggcaagtctcagtggtcccagagtgggtgagtgcagttatgtgtgtgatcggtgccctacccggggtgggttccctcccagtgtcctgagctgccaggagaggctctggccccctgcagccctgaactggaatcgttgggtaaatcattatcttccttgtttttactgatctgtcttaaatgtatatatagctcacatttatttcagtgtttaatatttagacgttttggtgtctttattcagaagtttggtgatgtttttgttactagaaatacattagtgtgtaggagtttagctcttgtttacatccaaggctaatgcctgtggtaacattgagtttgttatacatcttttcactaaaagttgtgagatttccaataatctatgaacctgtcaatttactgtactgtcgcaatcctctgttttaaatatgagaaaactaaggcacagagagggcaagtaacttgcccaagggcacccagctactgaccacagagccaggattcaaacctgtgttttccaccatcctgctgtaccgagtatttgtatcagctgatctgagcggctgccccttgcattttacctgaatgtgtcctcatacccgttctgtgacctcaggcaagtcgctctgcctcagctccgtcattggtacgatggggccacagcgcccacctcgttagggaaacggtggggctccaagggaaggatgcctataaaggagatggcgcacagctcctggcacatcacgtgcagtcaacaaataggattgttgaggggcctcatggtccttcggggcactcactcttccttttctgagttgccaaaaatactcccactttctttgcattccagtcaggccaggctaagggaggatgctctctgggcaaaggaccaagacacagagatgagccctggtgtttataagcctgggcagtagcacacgtgtgtgtgtgtgtgtgtgtgtgtgtgtgtgtgtgtgtgtattaggaggatgggttataagcctgggcagtagcacgtgagagtgtgtgtgtgtgtctgtgtgtgtgtctgtgtgtgtatattaagtaggaggatgggtatacctgacacagaagcattgcttgggacgtgtgtgtgtatgtatgtatgtatgtatgtatgtatgtagtaagtagggggataggtatgcctgacacataagcattgcttgggacgtgtgtgtgtgtgtgtgtgtgtgtgtgtgtgtgtgtgtatgtagtaagtaggaggacaggtatgcctgacacataagcattgcttgggacacgtgtgtgtgtgtgtgtgtgtgtgtatgtggggggggggtgtgtatgtagtaagtaggaggacaggtatgcctgacacataagcattgcttgggacacgtgtgtgtgtgtgtgtgtatgtatgtagtaagtaggaggacaggtatgcctgacacataagcattgcttgggataggatgtttatatctggccacagatgccacctgttctcccttgtctccatggcatagcacagagcctggcacctagtaggagcttattagtgcccaggtgccatgaggagaaggaggaggactcactgctcaagcagcaaccgtaatgtcctgccttccaagtcagttacagtaactcattatgctccacgcccagactcgagctctctgcttatccaggttccttattggcagacaaaagaaacttgttgtaaaccccccagcccctccccaccaagcggaagccttcattttatccattgtccctgtataatggcagggcattatatttttccttgcaagttgatgcttgcaaaacacctgtcaaattgaacagcgaaggacagggctttgaaagtcattgtaaaagttggcctgagtaggcaaagaccttgacaccagacagagatgctttcaaaagggaatagcaagacagacgttttccaccaaactgccctccccatctcccctgtcctcttcctgcccctgcccactgccccgcacctccctcccttccttgctggccaagaatcaggtttctcatctccagcgcagcagccccgtggtaggtgaagtgctattcttcactgccttgcatgtgggagtttgaaaagagagagcaaggagggaagaaagaggaaagtccgctgctggctgtgtccttttcttcctgagcgtgttacaaaccagcagggtcacggcatcgggaagctttcagggccgcggcaggccacagtacctgcgagcgcagccgagagaatataatggtatggaagaaatccgtgcgcagaaccctgtgttttacagcactcacagccagggaggctgggcaaacaggcttttatttggctgggagcgtggctctgcttcccatgttgtcttattccagctggggaggactgatgggctgtggttagcgtctctacctttcacctccagagctgggagcgcagacatgaccagcatggcgagtggctggcagtggggccttcccccgcctgcccaagccaggttgggctggggcgggagatctatgagcagagtgcccggagaagtgctcttccggcacagacgggtggctgtccccatgggtcgccggcctccagcaaacagtcaccctcccagcctcgcgaggagcagggaaggagcctgcttgctagagccctggtcccggcagcccccactgaccccggcccccactgcctcccagccagagtgtcaaagatgcagcttttcccccacacctctccttttcgtgattcccttgtcatgcccctcccctggtcctcctcgagtaccacagcctgccgtcaggtgctcacgtgtgcaattaagatccttctccgtgtgacactttatcctttgcgggggtacaaggccctttgaccaacctgcctgggccccacatctaacagagaggaggcactcagtgaccatttgtggggtgaaaaaatgaacatacataagaacctaatcatcagaatgatgattagaatttaattgagcatctaacaggtgctggacactgtgtgagcgttaactcagttcatcttcacagtcaccccacaaggaaggaagccgggctcagaaaagctggctaatgtgctccaagccccacacttagccaggtgtgcggtcggcactggagccctgtgtggtcgaagccagatattcctgactgggtgcttcgaagcaccgctggtctgaaaaggcaatcatgtaagttcttataaagatcaaatcagagggaaaggaaagaaagagggcaagaaagctttgtcatggacctaccatgtgcagagagtgatatcaggtggttttacgtaactcagtctcatttcaggctcacagctcccttaagaacagtgttgcttccattttactgaagcacaaaccaagacccagagcagttagttcccggtctgaaggcataccggtctggacactgcagaactgtagttaatgtctatacctgggtgttccatcgtaccctgtatcctcagcacctcctaaatcccaaattgccctctctttattggatctgggctcctgatccagctacagcagcagttgcaaaccacagcctacaatctgtttttataaataaagttgtattggaacacaggcatgcccatttgttcatatatcgtctagggctactttcttcccctgcaaggacaaagctgagcggttgtgacagagaccctatggcccaccaagcctaaagtatttactttctggctcttcaaagaaaggccttgcagcccctagggcttctgaagtggctgcccttattttatccaaaagccaggggtggctagttcctcccatggtgactccccactttctcagagcatataactctagaggcctcataactgcacccccagtgccctgcacctggagtcctgtgcttagatctccagcttccctggataggaggccccattcattcattcattcattcattcaacagttcttcactgatgaccttattagcaagccgtgctctaggcactgagggcaaagcagtgtacaaaagagaaagtcctccctcatggagctgatttgagtgagggagacagatgattgcccccctcccctgccctaccaaaaaaataaataaatagcaacaaagttctaatgataccaagtcctgcggtggaaattagaaagggtaaaatatggttgatacagtggctcacacctgtaatcccagtgctttgagacgccgaggcaggaggatcacttgagcctaggagtttgagaccagcctgagccacatagcgagaccccgtctctaaaaaaaaactttcaaaattagccaggcatggtggcacacacctgtagtcccagctacttgggaggctgaggtgggaggatcacttgagcccaggagttcgaggctgcagcaagccatgattacgccactgcactccagcctgggcaacagagcaagaccctatctctttttaaaaacgaaaagaaaagaaaggatagcctaatgagctcttcaggaccaccagagaggggaaggagcgattccaaatatgatggttggaaagtctttctgccaagtcagcatttctgtgtgattcaaagggaccaactagccaaggatctggggagaaccatcccaggtagcagaagccatgggtgccaaggtcctggggtcagagtgtgttcaaagcaggcagagaagccagcagggtttcctcctggggccttgtctggcctggcaggaagcccagcttgtattcaaggtgcagtgggaagctcccagaagatttgaagagaagagtctcaagacccaattcacactgtcagacctcatcccctgcattgtagaggggcaagaatggagggcagaggtcccatccaggccaataagggccatggagcagaggctgtggaggtggggaagcaggtggattgagcattttgggtaaaggtagagccagccagacttgcttctggaaggcaggagaaaaatcaaaactggtgcataggtttttgctccaagccactcacgggatggtggtgctgcatggtgagcagaggcccaggaagctgggaagaacaggtggctgggcgggggtgttctgaacgtgttgaagttgagacacctattaggactcccctcgatgtcaggcagatagatctatgagttgggagctcaggggcgaagtctgggctgagatataaatttggaagtcatcagcagacagatgatatttaaagcctgcaagagttaaccccccctccccacttccataacttaatcattcacaggacagtacattttcaaaagactggagaccaagagagcccgttatccccacgtcagcctttgcgaataggccaccttgatcttgcccatgaaaacataatcatcgggctttaaaactcacagtcaggaaagttcaagcaaagatgtgaagccacagaatttgttattcaaaatatcctttggtcgtggttccttccatccacctggagacagaggttttctgtaagcttcccattttcattccttcacctgggtccttcttgctttctcctgaagacttgactgtagcagcccttcctccagaggtgttgaaggcctaagcaggaggcgggcaaagagggaaactgtcccggattgccatagcgggtcctgacaggaaaggccgagactgggtggggtgtgggaatatgtgggtgatttatccctgacctctttgaaatgatcactttacagccaaaagtggcggctcatgcctgtaatcccagcactttgggaggccaaggtgggtggatcacttgagcccaggagttcgagagcagcctggccaacacagcgaagccctgtctcttctaaaaatacaaaaattagccaggtgtggtggcgtgcgcccataatcctagctactcaggaggctgaggcaggagaatcacttgaaccagggagacagaagttgcagtgagccgagatcacaccactgcactccagcctgggcaacagagtgagacttagtctaaaaaaaaaaaaagaaaaaagaaatgataactttttgtgttcagggtagtgtgttttaacctatctccagctcctggtcatgttgggaagtggttccaggagaggttgaggttgcctgggaaacccactctttctcacacccctggctatctcagctgctggaggctgaatccagaggagaaaaatcaaggagagggaattctttcggtcaaggcagttcccaagtgtgcgcccaagtggtgcacatggctggccatgcagggagccatgatcagagagcaagatccttctccctgcagcagtgcagggaggctgggggtcctggaggccagctggagcaggtatcgcccagtcaccccctcctacttccttccactccccacgcctgagcctcgctgggcggtgttttggaaataattccaagtgcttcggcaatatcccgcacactctcttccccttcccccgggagcggctgtccgtgtggggaaggtacttgctcccaatccagctaaattgttattgacttgtgttctctgtgttccgcaaacatttcactcagccgtcgccagcaaggccaggaatccctgctagggctaacggggaagccagctgtgccgggccatttctcgtgctcttcctcatcgatcacggaattaaactgacagaaggagaatttcagagcgacttgggaggggcaggggctgggccgggattggacgagggtttggggacttggggaccacagtgctagaaacagggacaggaggaagggtgggtttccctccagggttgtagctggtggtagggggtggccagttttatttctgaactgtaggctggcccagcctggagaaacccaaggaaaacacacagacaaggtttttattactgcttcatgaccacaaatgaaagtagtggggttttgtagacagagaggagagagagaaaagagcagagaccacactggcaagttgtcggctgaaattagatctttattttgcctaccagttatgaaaacaatggttttgaatgaatcatcactattttcctactggaagatttgacctgaaaatcaagattctgacctcttctgaaaaatcagatttggccagcctggttccacattcccacagggcaccaggcccaaggaatggctgcacgtttatacgaaggctgggcttccccttacgcacaatgcatagccctccctgtagtctcccccgaccccctggactgtttgatgccatcatattcctatctggaccctcgagcctttgcacttacacagcctggtacagacaccactataccttggccctatgagatgttaccagctgctccctttcagcctctgctttccaacccagggcctatgccaaaagaaaagagatcagtaactaatgtggaccaaaccctaagacttgggggattcctccagacctgaggcagaggagtaggggatgccttcccacctttcctggttctttttcccttttccctctgcagtgagtcaccctcaccgggacactccccttgcttcccagccgcacaggtctgccagtatctgtaactaatacaaacatgtgggaccaagtctagaagcccccaggcatagcccaccccccccccccccgccccgcagccctagctcagggtaactccatgggtatcagggctgcagcaccttcaccagcccctgtgtatggggttgtgcgtggccagtcatagaattctgcacacacacaagacacccagagcacagagggaagttactccacccaccgacccactctccagccactcagggagcccaggtcctcagcaccaagattaataacatcagtcatcatagcagtcatcatatcccgtgctcaccccaggccatttgcatcagaacctctggaggtaggatccaggcatcagtgggttcctagctgatgctaccagacagctggattgagaaccaatggcctttgaaaaggaaattgctgctacatagcctgggtctgttcatgcttttcctgttgagacccccatcctagggaggctgggctagtgtccccctctgcggggcaggctttgctatgctgtgccagtaaggctggagccaaccctatctgagctcaaggtcctgcttggaaagtgtgaccacttgactcttcagagtcctagtgcggctgcttcctcatctgaaaagtgggacaatgatgttgcctagctggtggaatttctgtaggaaagtccagagccagcctgctgcttagagccagcaggcgcctgaggagtggtccctgcggctcgccccttggccttatcttgggcagctggatttcccctttgctgggcactgcctgtcctctggggtggcctcacaggaccctttgattgttagctttcatgtttgcctggcacctcaacgggccgggccctgggctaagtgctctcatgctttatctcatcaaatcccctgtggtgggtgctactactgtgtcctgtctgcagaagagtaactttggtaactcagagaaggctgggaccaccaagtggcagcactcaggtcccacctcgtcctgtccaccctgagccccagtgtggcccccatggctggtggtttagtttatcctgtggagttttgttcactgccatatccccagcatcattcctggcacatagaatatgctgggtcatgcttgctaagagtgactgaaggcaggaatccttacggtccccatgagataagcagagcaggcaccgtccccgtttaacaggtgggaacactgaggtaaggagcttagcagctcctgggagtcccacagtggcagaggccagtctgcggcccaggctcctgcccacccgctctgcacaaggaccctctcagatcatacctagttcttagaaggactcgctgtgttttaaaaaggcacaactggctggacgtagtggctcatgcctataatcccagcacgttaggaggccaaggcgggtggatcacttgagctcatgtccaacatggtgaaatctcatttctactaaaaatacaaaaattagttgggcctggtggtgtacgcctgtaatcccagctacttgggaggctgaggcacaagaatcactcaaacccggaaagcagaggttgcagtgagccgagatcgctccactgcactcacctgggtgacagtgtgattctgtctatttaaaaaaaaaaaaaggcacagccctaaaacagcctcctgtatcaataaagggacattggcttggtcttaggagccaggccagtctcctgaagagtaccctttattctgtgcgtacctgatgtgtgcctgctgtacacagagccctgagatgcagacctatctgggtaggagagctctgcccgtgggggctgcaagatatgaagccagggaggacagggagagacccatgcagaggcaccagcagctgagggtgggggtctggttcagccagccttccagagcaggcagcctcccaagccaggccagcccccgggtgcccagcccccctgcggtacccacatcatggcaccctcatactccccaagggtgggagctacaggtggctggtgtcccccagcagcctaggactgcacaccactgagtctgaagattgtggagcctcattctggcctccacactctgccccaacctccttcctcccctcgcccacctgtgcccccgccccctgcccttcaccccggcctcttggaatcagttctgtctccgacttagcggagtttgtggaagccttgcctatcctgtgtctcgggaagtagcaactcaggagcctccaggaacaggaagaaaagcccccataagtgaggctgcgtgtctccaggggcagctagtgcacagcctcatcagttacctgtaggcagggaggggacaggtctgccacactcacaggttagccattccaggttcaagagaaacgagaggtgcagattcttatgtagcatctccctgtttttgaacattagtcactgatttctgtattcatggcaaatcatgtcagcaaatccagacactcttctgtgggcccacagtgggaggccctgctccatcccattggtcacttttttttttttttttttttttgagacagagtcgagagctgctgttgctatcatcgtgttatagaggaggggagcagcccaccctcgtgctctcagtaacagattccatcaacagcagtaagaatgaccaacctatattgacagcttgccgtgtgctaggcactattgtgagggccttacatacatatattcattcttttaataccctcacacaccctaggcgtgtagatttcatcaccattcagtaactgcagaaactgagaggagcccagagaggtgaagcaacttacccaaggttgcccagccaggagcagcagggtttgatcctggcagctcacccacccagcaccctgcatctagcaccctccaccctgtacctcaggcctctccactcagaatccagccctgggcttcctggcccagtgcttttcccctccccggactgttcacgcctgcctcatcccagggttcctttcagaactcccttctccccttatcagccacgctcttctcccccggcttgcctttcctcaacgtctgcttccagaacaaaaccccaagaagcgctttctcttgtcctcccgacgcacccccccgcccccccgccctttctccctgcctgcgcctttctccctgcctgcctgcgcctcccatgcagggccgacagcgccagccagggaagggagagacacaggctggcattctgtcaaggaattaattgaaaaataaaatcattaggtgggaactccagaaatgcaaaaatggtggttggaggttggtggggaggggggcaggactggggggttgtcgggggatggctgagctttttgtcaagttaatttctcgggtattgatgtttggtgacattcacttgttgtttatcttcgggtgcagctgtaatactgaaagaaaatgcacagcttgtttcgtttatttattttacacctttctccggttctgcattatgtttgtttggtgaaaacccactgaggcttttgatgtcggggaagtgggatttcagcagctgttcgctgcaaacagggtgctcctcaaggaagcagggccagcgggaggtgcggggtgtcattcggtgggaactcggggcctgacatgtcctccagggggcagttgggggcccagcctgaaccctggcagatatgccaggcccaggagcacggaggctggcttatgatacatgagtacatagttggcaggtaaaggaatgagatgttttggttcatcaaggccgcaaagccaggctccgcgtaagagcccccgccccatgagtgctcactgccccaaagaccaagagagacacgaagtcaacacctttcctatcaataatagtaacacaggtgttggtctcagcaccatcgactgagccaggggctgggcattgccctttttactcatttcagcctcaccacaacccctagtatttccattttacaggttagaaattgaggcacaactatctggttctttctccatctccccctgccagaccagaaagccttaggtggggccaagccaggcttgttccccaccatgcccgacccagagcaggtgctgcaggtgtctccgtcatgtgaggggatgagagcatggatgaaggctctgaacaactgctcttggcctcgtctcagctgctgtttgtccttcagcaacctacactacttgaccctcaattttccctgtcattcactccctcagtcgctcagcacacatttattgagcatctactatgtgccaggcacagttctgggcattgggaatggaacagtggacaaaacaggcagaaacccctgccctcctagagcagatgttccagccaggaagacagataataaagtggaaacatgacacacagtgagaccgggagacatgctgtgggggaagtggacaggaaagggattaggaagtgtacatcagggcactctggaggacttggaattttaaataaggagggaagcttcactgaaaaggtaaggcccctgagtggctccgtggaggaagagcattccagaccaaaggaacagcaggtgcaaggccctgaggtgggagtgctggaagccaggagccagcaaggggcccgagtgcctgagcagagtgggagggaagcagagaggtggcagggcctgctcagtagccctggcagccgacgtgacagctttagcttttccccaggtgagatggtgcccctggaggcttgagcaaaggaacagcatgccgtgatggaggatttaacaagctccctctggctgccgtttgagaccagactcctgggaggagggcagaggaagccagaggcaatggtggcacggcccaggggtgcaggagcatggggaagaagcaccccaagtccagctctatcttacaggttgagccgacacaatggatggggctagaactcgcccctcgccagtccctccaagttgtcaggatgtgggagagaagaaaaagtcccatgccgccaccgctggccatcccttagaccccaggccaggcctggcccaggaaggcagggaccctgccccaggagtgagctgccatccccaactcatattagcagatgggaggggcgtcagtgatcgcctgtgggccctgttttgttgcgttctattttccagttcctattacctgcccacaaattcaatttccagaggccattgtgcacctccagggctggcgattataaggaaaccaagagtgtctaggaggtcacaaggaaggagaggaagccggagtccgagccccgggccgccagcccccaccaccccagcccaccctgtccccctctcccttttcatgattaacaatgatgggtagagctgcaaggccttgaggctctcaggtggcaggcaggtgggcacctcccgcaccttctgcacgctcaccatggggcaggctctgccgtctctctctcacccttgctccgtccgctcattcccctttctgggatatttcacaagcacttgctaggcaccaggcagtgtgctaaggccagggacacagcagtgagtgagacaacatcccacacaaagaaaggcctgcggcagtgtgggtaataaaaagtgccagggggtggggtggcattggagctcagaggtagagggagagggagatctgggtgctgccggtgcaaaggtcttgagcagggggaggtgggccagctccagtgatgcctccagaggaacttggggctttcttagggagtggtggatctgacgcacatgttttagagggatcccttggtgggaggggggtctctagtgaggggctgagaggtacttggattggggtgcagccgtggagatgatgagaaacgggttcaatgtttgaattgatttgggagggacgagattgaagaaacaggctcagagaggtgaaatcgctcacccaggaacacgcagagggaaaccaagtcttcatctctgggccaggcactgtgctagccctggggaggtctcagtagaaaaggctaggccgctgctgtgagctccagggagctcacagcctgcggataaatggaggtaaagggcctcagggtggtttatttggggaggtgtttgagccatggaaagggaggggatttggacagcctctttacactgcctctgtacaaatcaagccttatctgtgagcaaggctgctcatcgacaagtggttagactagcagagggactgacagaggaagccagcctggattccaacctcgctcttttcctggagggccaaggggccccacacgtcctctcctgccaccattgatccccttggagttctctgcctagaacccgagactttcataaaaagcagaaagactgtgggcttaggtgtgactggggttcgaatcctggctccaccgcttcttagctgagtgacttcagacctgcctgtccgtgcctcagttccgtctcctacaagaggcagcataccacctgcctgtggggttgctgacaggagtggagccatggttcatgatggtacctaatcaggaggtgcttgtggggctaagcccaccatgccctttcctacctccgtgcttttcttcatgaccctgaatcccctctcctcacagaaaactcctctgcattcttcaaagcccaagtcaaatagtcctcctcttcaaagccacctctaattgtcattccctccacgcctcctctggaatccttgagctttgcatctgttctattcacccaccacttatcgagcacctgttgtatgccagccatgtactgcaccattagcctggcctccaagaaaacagaaacaacttctacttgtctccccagccgttgtccactgcttggtccagcctctctgaagggtttcagcttcctccaagccaagctctgacctgctgtgaggaagcagcacaggagaccctttctctcttttttctcaagggaatcctttcccctgcgggtagaagatggggaggggatggccagggaagcaggagagtttctgggggtgcgagggaggcagccccgccatggtgatgctgagactaactctagtgtttctctctcctcctcatttcccctttgattctctcccctactccttatctttcttcattgccccatcctctctccacctccctctgtatcttctctccctccgctctcccccacttccctctcttgcattctctcgcttctgttctgtctccccgcacccgtgttctgctcatctctcccctctccctccttcctctgtcatttctctcttcctgcctcccaaccctctcggctgttcttttctcctctcttgccatctgggctcccacagagcccccgaagaaaaagcggtctgtggtgttggacgagatcctggagcagctggaaggcagtgacagcgacagcgaggagcagacccttcagctgtgagctggcaccgagagggtgtgtggctccggggccctggggaccgggacagccgctccagcttctgcactcaccaccatgtgggctggggggcggggcggggagcggcaggcggccccaccctgcactggtccaaggtcggaggagacaggggatgaggaaggcctcaggccactgcccagcggcccaggcatcctgggtttcaccagtgacgcgttctagcagacactgactgcgcacctgctctgtagcagacacggaagagtccaagggagcagccacgttaggaagagagacttgggaacagctacacagggagctagaacccctgctccccctgtccccaccccaggagagtaaggggacgagggccagctctctggcatcaggctgcttggacatgaaaccccgtctccaagctcaagctgggagaccctggcccagtttccttatctccttgggcccagccttccccttgctagctagttcttacttcataaggttttagagagaaataaacgcagtaatgcatgaagagtgccgggcatggtgctgagccctgttcctgctctccctccagggctgctgagctagaattcccacctatgtctttccaagggactgttcacggcttgggacttggtctctgtcctgccccatcctcgtcacttgggaccacgagccctggttcagtcacccagggaagcctcccagcggctcatgaagcatcgagctccaagcccagatgccaagctccctggctgagctgaatgatgtcactcatggtggacgcgttctgctcacgggcccagagccctgtgaaatgcatcaaggtcctctccgctggccagcagcatccccaggcttctctcaggcgcccgtgttcacattttctccagcctgagacgcagcctcccgcctggaagggcctgtgccagcaccaggcagagggcaagacggagagggcagagcaagaactgcactgcatctcactgcagtctgaatctagacatcgccattccccgaggtgcgacctcagactaatgacatcctggctgagcctctgtttttctctctaggaaatgggggtgataattgtgcctacctcagatagacagtgccagaattaagtgagtcaagccaagtaaagcccagagaagattctcatcagcacttttgttttcttcttcatttagagtcactgggtgggcctccaagtgagagtttgggaatcttcagactctgtgcataaaacatggtctgtgcattttggtggggatgaggttccagtcttcatccagttttctgagtggcccagagcccaggcaaggcaacacagagctggcagcctgcacgaccaagcatgcgcctcgtgtcctctagggcaggcacccccttagccatccaagctcatccctgagaattcgtggaaacaaaagacacagaatggctcgttccccagccgtttatttttaatttttttagagacagggtgcagtggcatgatcatagctcactgcagcctcaagtggtcctcccaccttagcctcccaaagctctggaattacaggtgtgagccatcacgcccagccacattctccagcttttatagtggggtggctcacagagtcacatcgaccacagccttctggatgtgggggctgaacagtgtctctgttaaaccacacccaggccgaccctcaggtgaccagggtcccaagttgccgtaggtcatgcggaatgacagggctggagacctaccccatgccttcccactgctcagatctgtgagctggatcgtgtcctgttcggcggcacatggctccttctggctgaaccttctggtctatacaatttgtactcacatttccacaccaccagagccagcagggatggctggctgatcaccaaaactcaggtgtagacccacgggcctggtgcagaggcaggcatcttttggcactgacttaactggcccagaggatgcttctagaacctccccccagagcaggattcagcatcatccagggcttggtgcggggtgagcagacatgggctctgtattcggatctgcctgggctccgtaacagtccaccactctccagcctcgtgagcctcggcaagtgacttaacctgctgagtcctcagtctcctcatctttaaaatggagtgatgcaagtagcatctccgtcacaaaagcgttatcaggcccaggcagctgcaggcccctgccagggctcacacagtgaaatgatgggaatcagggctgtccaacccttcctgcgtcactgccttccctgtggccaaaagaaagctggtgagctggggaaggttcaggaactgcaggagagtgaaaggtagcaagaggagggagagcttccagccactcgccaggcctggcctggaattggcagtggggagtgaggcagcctagaggccatatactgagcctggcccctgcacccctgccccaggcacgcactgtttggaaggggcagatctgtgagcacacaggagtagtggagtccactcccacagagatctcggggtgccccttcatgccgcgcccaccagactgcaccctcatctcctctcttccggctcagctgtcctcgtgcagccagtgtggcctgactgatccgtgagctggatcatgtcagtctgcagcttcaaaccctctagggcctccctgacgcatggaaagtcgagtcccgctgctcaccccagcaccgaggccccacctcacctgaccctgcactcgctgtcccggccttcctccctgcaggctcccaccccagggccctcgagctgcctcttccctctgcctgggatgcccttccctcacattcttcctgcgtggcgcctttttattttcctttgagatcttaaatcacgcttgtccaacccaagcttgggctttgaatgcagcccaacacaaatttgtaaacttccttaaatttgcaatttttttttttttttttttagttcatcagttatcactagtgttattgtattttatgtgtggtccaagacagttcttccagggtgacccagggaagccaaaagtttggatgccccggtttaacttctgcttcctcactgagggagacagactcctgatcagttcgtctgcagtaaccacacccagctcctctttacacccagccccaaccccctatcccccatcccctgtccctctcagtcacagcactcagtacaggggacaacctggagtgtgagcaagatctcagtgacccagagccttttaccctgtcaaaaataactgttttaaacgggaactaggaaagcaattaagatttttgttacaatcatcatcattgttctagaatgcagtaaagtacagccaggtagccataaagcggagctcgggaaaagtcgtttgcctggcccagaggaggggcttcatctcttcttcctttggagaagagggactggtgaaagcgtcttacgagaaattcctccatccagcatgtgggggttgaactgggagactctaagcctttgagccaaggcagcaagggactgagtcaccgctgtcactgggagggggacacgggagctttctgaaaggcggcttcggttgtttttgaagcaatgatgggacgttggtagacacagacacccagaagatctgggagagaaactccagaaataacccacagaggtggcactgaggagggagcactcctccagggcggtgagcctcctgacccggctcaggactgactgctgcagggggcaggaaactgcctcagccacatctcagggggctgtgacccttccctgccgatatggtcaccagagagccgggaaagagaaccataacaggctggaccagagcacttgcgtaggaaaggagaggtgacaccaagaggccagaggggccaaagggacacagggaggtgggaggtcagtaggacacgtgcctcagaaaagccagaggcacacatctggatgaggcctgtgacccggtgttcagagtgtggctcagttagctgggaggaacggggacaggctgtttccagagtggagggctggctggaaccgcatctgctgtcctcacgtccgtctcccacccgctgtgggtctcaggggcctggccccttgagctgtgtctctgaaactcccttatcaagaggcttgtgttcagtttggccagcagtgggcactagcgggcgcctggaaggctggtagaagagaaactccaggcatcccgccctctccctctgtcccacgtggcgtctccaccaagggtccacccctggatgggtgaggagggccctggcatctctactataggatacacacagtcagactgcaggagggagatgggtggtcagacaggtcctggagaacagacaggggtgagggacagtggggcctggaggagggacaggagtgagagacagtggggacgggaggaggagagcggaatgcacaggccctgactccaaaggcctgcgttagaatctctaggctctcagtgtctccaggccttgcgttccatgtctttcaaatgggtgcaggaattcctgcctcattggattggttaagacagaaacagaaggtcatgaatggaaagtagttagcagactgtgtcatgcctagtgagtacttagtaatggtagttgccatcattattgtgaacataacttcaaaacaaggcaagcttgtggggctgcacccagcagatgtcaggccagctgggcccacgtccagaggctggggcgggatagggactcacagggcgctgcgccatgttggggaggagcctatgatccaggaaggagcctgtaggaggtgcccccctgcccactggccccagtaggcaaaccagcacctggctcttcctgcacagaaccaaagttcaagcccaaatgggccaatggttgtggggaaacaggtgagcacccccacaggagcagctgcctgtctattgctgtgtctgtgtgtctgttcctaaccctttcttttttttttttttttttttttttgagacaaagtctcgctctgttccccaggctggagtgcagtggcgtgatctgggctcacctccctggttcaagcgattgtcccgcctcagcctcccaaggctgggattacaggtatgcaccaccacgcccggctaattttgtatttttcatagagactgggtttcaccatgtagaccaggctggtctcgaattcctgacctcaagtgatccacctacctcggcctcccaaagtgtggggattacgggtgtgagccaccacgcccggctaattttttgtatttttagtagacagggtttcaccatgtgggccaggctggtcttgaactcccaacctcaagtgatccacccaccttgttctcccaaagtgctgagattacaggtgtgagccaccatgcccagcctgttcctaaccctttcaactggggggtctcaagtgggtgaggactccatggccacggcagcagaactgtctcttctgaaaaccagactccggggcccctgggtcagcacctctaggtcattccacagacttacacagtttaaagaaagagccagcgaacatggggtgatcctggggtgccactgggatcccaagccaggcccggaggtctgcctgtttcgtccccagaaacttgagctggcatcctccgctggtttgcactgggcacggggactggagagccaccaggccactgagcgcagcatgctatcacttctcaggaagttgtgagggtgaggagaatagccgggcccactctgcagaggggaggaacaggcacaggctagaggcacgggctgatagagtgagtcctctccctcattcattcattcattcattcattcatccatcagacacctgctgggcatctgctgtgtgcgagacactgtgctgggtgccccagacacaagacagaaactcgggtcgctctgtgtgcctccacactggccttccctgctgcgtggacgcaggctctgtctcctaggctttaagccccatgcatcaggtggaagacaatttccagcagcctctgcccgcttgtttttcctcctctccttttcctgccgccttggtcttttttgtcttttgtgcagggccgtctctcgcagcgcccgtctgtgctccgcagcgtctaggaaaggattagtgtgagcagagcatgcaggctttggtgaacagagccgagcttggtttcaacatctaattcaatttgttctgccgagattgaaatatgaaatggttgccagtcaaacgttcaaaggacggggaagggagagtgagcgcatgctgaaatttaaattttaatgaaaatgactttaaccctttggtacaccttgcaaaatgtaacccatcctcccatcctgtgaaagcggcctctcgggttagagcttttccacccacttctcttccactgagcttcactaataatatgtaatcatttttttcagccgtcttaataataaaagattaatagaatgcttgcataataataatttattcacccatgccgcctaggccattgaaatagtcaccttgcctagatgactttcccaagccccatcctagacaagccccggcccctcgttagattcactcgtcacaccgaacacctccctagctccttacagctgtgaacagtttctgtgtttttatttcatgtctgacctctctctctggaccggaagtcccaggagagcaaggtctgtgcccattttgtgcgtgctgcatcgtggagtagatgcttagtaaatactcgaggaaggaatcagtggccccactttgtccttttagcaactgtgagaggtaagttgatgggagatgtagaaatggagaggtgggtgacattcccaagatggcgctgcacagagggctgccaccaggctcacactcagctcgctctggcacaagcccaagcccctacctccccagagcagtgagggcagttcccacatgcagggggcccggccctatgctgggtttcagaggcacaccctgtgctctcgctcctgctgcagggcctgaactgctgtctcctctttacagcgagggcaggcccaatgtgtgccagctcgagccttatcctcaaggcagcaagagcaggcccaatgtgtgccgactcgagccctgtcctcaaggcggtgtgggtgaagggctctctctcctcacccccagtgagattctcctattcagctcctgcttgccatggaacccctagtgtgttttttgttttgtttttaaatatcaaatgccatcagtgccggaccagtgggcatgcgtggcagctcattatggctgtggacagacagtgccaggcattgaccaggcatcataggttttcagggtagagtgggatgatgggggcagccctgagaccaccttcaggacagttggcttccaaggactgagtccttggcttcatcctccagggctcatacagaccaggagcgcaagggagaggttcaaacctgaaacacccagcaaatgtgtgttgagcttatgtgcaccaggcatggccatgatgctgggaatgcaggagttgacacagcagataagactccctggcctcgaggagctggtagtcaaatgtggggagacccagacatgagtgggtggaggattgcttccctggcactgctgaggctccattctctctggggatgtctggcagggtcaaggaagggctccctgaggaggtggcatgtgagcagagctgggaggaaggggacagctctgtgtgctcaagggagagtgagggggacagcccgggccccagaaaaagccagggagagtgggcaggggcctgccaacccggctcaggcttgggtgtcaagtctgggcctgtggaggggagcagagccggcccagtctgccaccatgttaaggatcaatagcagaaggtcaaggactgaagcagggacaggtgttcagaagccattgcagtggccaggagagcagggaggtggtgactcagagcagggaggtggcagtggaggggtgaggtggcccaagcctgtagacagactgaaaatgcagccagtggcctaaaggtttggctgtggggtgtgcacaaccaaggctagcgccctggctccagcccaagcagtgggaagaaggaagctagtgtgcgctgagaccattgcaggaagagctggcttggagggaagcaggaactggctttaaactcggtaagctgttgactgctaagaggtggagaacacaccggaggatacgtgtctcaggttgaggagagagggttggaccgaggtataacaggaaattatccttctttggttaagaaatctaaaaggggccagcctcggtgcttcactcctgtaatcccggcactttgggaggctgaggtgggaggatcgctttgaggccaggagttcgagaccagcctgggcaacatagggagaccccatctctacaaataatttttaacattagccggctgtggtagtgtgggcctgtggtcccagctactcaggaggctgaggtgggaggatcacttgagcccaggaggtcgaggctgcagtgagccatgatcacaccatcgcactccagcctgggcaatggagtgagatgctgtctcccaaaaaaaaagggaaaaaaaaagaaatctaagagtcagcatgggaactaacagccccgtgtagacagacctgggaaatctcatagcttcaatgcttcaagttaatttttttattttattttttttttttttgagatggagtctcactctgtcgcccagcctggagtgcagtggcgcgatcttggctcactgcagcccctgcctctctgggttcaagcagtcctcccacttcatcctcccaagtagctgagattacaggcatgcaccactatgcctggctaagttttgtatctttagtagaggtgaggttttgccatgttggccagactggtcatgaactcctgacctcagataatcctcctgcctcgtcctcccaaagtgctgggattacaggcatgagccactgcacaggcctcaagttcattttgaagccacttctagatggttccaaactcctttggccccagaacccgtttcccaaacaaatgtcttaaacagattaagcaaaactgctttgttccaagtcagggtacaggcctgacctcccccacccagactcctcttccccctcaacacctcagtgatttgaaaaacactgacctaggcctggcgcggtggcttacgcctgtaatcccagcactttgggaggccaaggtgggtcatcgcaaagtcaggagatggagaccatcctggctaacatggtgaaaccccatctctactaaaaatataaaaaattagccgggcatggtggcacgtgcctgtagtcccagctactcgggaggctgaggcaggagaatcacttgaacccgggaggtagaggttgcagtgagccgagatcgtgccactgctctccagcctggacaacagagtgagactccatctcgaaaaaaaatatattgaactaaaaaatgtctcccaaagcacagagcacggacctctgtgcttcaggagatggtttaggtggcccacacacttttctttttaatttttaactcacaagtttattttcacatgtatgccacaaatacaaacctgtatttgtttaggtcatcaaacctatggtgttgctaagctctaaggaataccggtgaattcgtataaagaaaagtattaaaaacatgaatttcgtgaggcaaagtagtaaagaagcgacgtgaatgatcaaaatcaggggttggcaaaccatggccctcttttttttttttttttttgtgctgctgttgcctggttttgtgaataaagttttattggaatacagccatgcccattagtttacatattgtcaatagttgctgcatgtaacagagttgagtagcaacagagaccttatgacctgcaaagcctaaaatatttaccatctggccctttgcatcaagtgcagtgaccccgatctaaagcaaacccccatcattttacagattagaaagcccagagtgtcttctacaaggtcacactgtggcagaattccccgttccggctctttcacctctgctatgctgcctcggcacatgtgctgagtaaaactttattgacaagaccaggcaacagtagcaggaaaaagaaaaacgagctgtggtttggcgacccctgatttcaatcattcataccccttctttactactttgccacttagccacaatgtgaccttgagcaacctccttgacctctctgtgcctgtgttctcacctgtgaaccgagaacaggacagactcctgcagatgccaggatgaagtgaaggctgagaatggcgccggccccacatgagcactacacaagcctcagctgttgttaccccatccccccaacataaaggcagtgtccttctgcaccccgacaggcttgggccatcacccgctgcccaggaggccagggtatttcagcacaagccccgggccaaggccttctggatcgtcagcaaagtaaaaggggccctgcaatctaattatagcattgctagaagccagggccgcattcccctccagcttccttaataagccccacttccccataattgcagatttcatggaagcggtccactggggccaccatgtcccatccttgggcttaggccaatagcagacattttgttgtgcagatttctggatagcagctgctcctgcctttcctggaaactgtcaggagccctcccttctcctggtccccaaaaagattccaggcgataacatcgctgccaccttgtacacctgcagtttacaaagcactttcgcaggtgggagctgagtcactaggcaggggctgtcactgccatggcacagatgaggaaactgaggctccaggaaaggaggggagcagcccgtggccgatgttccagaaagaaggcagtcccttttcccaggctgtggctccacagtcaaagaccctcctctccttcccctctggctttgtggaagaggacaggaagctggatatgtggcagtccgtgcaagggatagcaggaaacactgcgtcccatgaacgattctcagactgcattccccagagatgctgagatgtggggctgaggagtccggcacccttaacccctccacctcccaggattttatattcctaggctcaattgcccaaccctcatagtgtaagcatctcactgcagtctttgtgagctgcgaggtattttgtgaaccctgaacacaagtcaacaacttcacccaatgctcaaccaaagaacagcagctgccccagtgctgggggacagcctgctgtgttcgcctcccagagcaacagtgtatataggtcagggaatgtgttggttcctgtgacagacccagacattagtgggcttaaatgagatggaggtggatttctgtcacatgacagttggaaggtgaacaggcctggtctgacagcagcaggggcccagcccctctgaactgtcactctgacacgcctccatggcccagacagcaccccgctgtgctgccatcacccagtcactgggagtggggaggaaaaagagggcttgccctgcccttcaaggacacagcctgtgcattctcatgtcactttgaccagaatatggtcacctggttgagcctagctgcaagagatgctgggaaatggtctttctcttgggcagccatatgctccccaaaacatacagcccctccttctacaggaagcgggaaaacaaatgctgggggcagccagcagcctcagccactgatcgttgggtgctgcctggggtcttcccagggcattttcaaggtcaatttgactgtccttgatttccaccttttgagctgacgttagaacctaaccccacataagcattgtttaaagactcatgtatcacagccgtaaaaaagaatgagttcatgtcctttgcagggacatggatgaagctggaaaccagcattctcagccaaataacacaggaacagaaaaccaaacaccacatgttctcactcataagtgggagttgaccaatgaggacacatggacacagggaagggaacatcacacaccgggacctgttgggggtggagggctaagggagggatagcattaggagaaatacctaatgtagatggtgggttgatgggtgcagcaaaccaccatggcacatgtatgcctatgtgacaaacctgcactttctgcatatgtatcccagaacttaaagtattttaaagaaaaaagaaaaagactcatgaatctaatgtgttcatcagatttttggggtttttttttttcttttttcttttttttttttttttgagacagggtcttgctgtgtcacccaggccggagtgcagtagtgtgatcatggcttactgcagcctcaacctcccaggctcaagtcatcctcttgcctcagccttctgagtagctgggactacaggcatgcaccaccatgctcggctaattttttaattttttttagggaaggggtctccctatgttgcccaggctggcctcaaactcctgggctcaagcagtcctcctgccgtggcttcccaaagttctggcattacaggtgtgagccactatgcctggcctcatcacattcttaaaccaagaaaagttaacccacttttcttaacccactgtgttagacactagtgctggttgtcagtgaaaaactccaaagtaacatgtggatcttgttgcttacacattaagacaaaatgccaattttgggggctgggggaataaggcatcaagtttgccccatgtgtagattcactcgtgtctgaccaagtgcaccctcggagtgttgcctacacagaggctggcttttccctaacgtccttcttttccgcagatcttcagaaaggctttctctgatagggcagtatgttaattcctgtgattgctgtaacaaaatacctcaaactggggggcttaaagcaacagaaagttgtgctctcacagttccggagtccacaggtctgaaatccaggtgtgggcagggccgtgctccctccgaaggctctaggggaggatccttgctcaacttatttttgagacagtcttgctccctcacccacgctggagtgcaatggcacgatctcggctcgctgaaacctctgcctcccgagtagctgagattacaggtgcccgccaccacgcccaactaatttttgtatttttagtagagacaaggtttcaccattggccaggctgatcttgaactcctggcctcaggtgatccacccgcctcagcttcccaaagtgttgggattacaggcctgagccaccacgcccagcctgcctttcttttctgaggacagttggcacctataatctcatctcaagatcgttagttatatgtacaaagacccttttttcccaaataaggtcatatttacaggttccaggtggacgtatattttgggggaggtcaccattcaaccctctgcagaccatctgagtcccctttccttgctctacaagcatttaatgagcacctcctattggccagccctgaactggcggccagggatccagcaatcaacacaacaggatcagccaggcccggtgactcatgcctataatcccagcactttgagaggctgaggcgggcagatcacttgaggtcaggagtttgagaccagcttggccaacatggtgaaaccccatctctactaaaatacataacttagctgggtgctgtggctcacgcctgtaatcccagcagtttgggaggttgaggcgggtggatcacttgaggtcaggagttcaagaccagtctagccaacatggcaaaaccccgtctctactaaaaatacaaaaaatgagctgggcattttttgtatgaggcgggcgcctgtagtcccagctactcaggaggcacgagaatcacttgagcccgggaggtggaggttgcaatgagctgagatggcaccactgcactccagcctgggcgacagagcgagactctgcctcaaaaacaaacaaacatacaacacagtaggctcactgctgctgtgaaagttcacagtctgttgggagatggctaagtaacaggtggtcatggtgccaaaggagaagtggggcaggtgtccaaaggaagggtggggagggcttcccaaaagacgtggcttctaaactgtgtcccaggaggtgagtaggggttaccctgagaggtggacttaccctgagggcagcagagagcccctgaaggtccaagagcaggagagcagccatgcccagctgcctgtgaagctgccacctcctctccctccacaccctgacactcagggacacgcccccgcagcccacactcccaggaaaagcattcctctagcggaccttctggttacttttatagataactttgtggccggccctccaccacctctgcagaaacaacaccctcaccccacgaagcccgacctgttctctccctggctgactttgaagccgtggttgtagcagagtgggtaggttctgatgatgggtagagaaggcagaggccagagcgaggcagccaaggccaggaacgccaggagccaccagaagctggaagggccgaggaagtatcctctagagcctccaggggagcatagccgtgctcacacctggatttcagacttgtggactctggaactatgaaagcataacttcaaagcatgttcctgagagtggggcaggtaccactccagggggcctggagtgagttgcagggaatgggaataggtagagaaggcatctcggggacagggttcagctgagggcaaggctaccttcaggcgggaccatgacttgcagccgcacagcacaggacacatagtctgagctaaagaatatttgcttaatgagtgagcttacatcatatgtatataaaatctagaaacatgtctggtttgctgaagactgactacgtgggtgggtgctgagccccatttcaactgtaaatgctaactcattgcaagagacagaaggtcattgtcttttaagcagaggcctgaaagccagttccggcatcggaacctaacgaacaaacacgggaatccaaggccatcatagcagcagtggtcacaattactgagccttactctgggccaggcactataagccagggagttctcacgacagccagaattgatggggttgttgtccccatttgacaagtgaaaccggtgcagagagatggcatgccttgcccaaattcacaaggctattagtgggaggagtcaagagactttaagggccctttctctgtctacgaaagcaataaacaatcaaagataaagcataatgttattcaaagaacagtcagtgactttctttggttcataggaacctggctatggttgggatggaagggggtaaaatcccaattaccaggccctccttgtaccaaatgaattaatactaatgaggttgagtcttaagactctgtattgaaccaggcaccttctcccctacccccatgatatggtttggatttgtgtcccccaagtctcatgtcaaataataatccccagtgtggggcctggtaggaggtgattgaatcatgggagcggtttctcatgaatgctttaacaccgtctccctgggtgccgttctcatgatactgagtgagttctcatgagatctggttgtttaaaagtgcgtggtggctcttgcctgtaatcccagcacttttggaggccgaggtgggcagatcacgaggtcaagagatcaagaccatcctggccaacaaggtgaaaccccgtctctactaaaaatacaaaaattaactgggcgtggtggctcatgcctgtagtcccagcttctcgggaggctgaggcaggagaattgcttgaacccgggaggaggaggttgcagtgagccaagatcacaccactgccctctgacctgggcgaccgagtgagactccatctcagaaaaaaaaaaaaagaaagagaaaaaagcatgtaacaccttccccctctctctcttcctcctgctctggccacgtaagatgtgcctgcctccccttcaccttctgccatgattgtaagtttcttgaggcctccccaggagcagaagctgctatgcttcctgtatagcccatggaaccatgaaccaattaaaacctcttttctttatgaattacccagtctcaggtatttctttatatcagtgtgagaatgcaaatataacccacccctgccatttgtctgtatcccagtttgggatccaccattgtgaagtgtacatgtatattttctgccttcaggaatcagattctttgctgtaaacatagaatgtaatgtacctcctttcaaacaatcatgggaacatgtataaaagagcaccatctataaggctaccaaagaaaacctcaatacattccagaaagaggaaataatattgattacatcctttgactacatgcaataaaagtagaaatttgtatcaaaacaggggaaag

SEQ ID NO: 1720 - DNA, 3918 bp, Homo sapiens
aggtctcagccacgtgactgtgttccggctcggtaaagatggcggcgcccagggcggtagcgtgaaacttggtggaagacgctgaccagtcgtgttggaatcaaaacagcggggaccctgcgccatgtcgcgactgatcgtgaagaatctcccgaatgggatgaaggaggagcgtttcaggcagctgtttgccgccttcggcacgctgacagactgcagcctgaagttcaccaaagatggcaagttccgcaagtttggttttattggcttcaagtccgaggaagaggcccagaaggcacagaagcatttcaacaagagcttcatcgacacatcccggatcacagtggagttctgcaagtcattcggggacccggccaaacccagagcctggagcaaacatgcccagaaaccaagccagcccaagcagcctccaaaagactctactactccagaaattaagaaagatgagaagaagaaaaaggtggcaggtcaactggagaagctgaaggaggatacagagttccaggagtttctgtcagttcatcagaggcgggcgcaggcagccacttgggcgaatgatggcctggatgctgagccctcgaaagggaagagcaagccggccagtgactacctgaacttcgactccgattctgggcaggagagtgaggaggagggagccggggaggacctggaagaagaggcaagcctcgaaccaaaggcagctgtgcagaaggagctgtcggacatggattacctgaaatccaagatggtgaaggctgggtcgtcctcttcctcggaggaagaggaaagtgaagatgaagccgtgcactgtgatgaagggagtgaggccgaggaagaggattcctccgccaccccagtcctgcaggaaagagacagcaagggtgcaggccaagagcaagggatgccagctgggaaaaagagaccaccggaggccagagccgagacagagaaaccagcaaaccagaaggaacccaccacctgccacaccaccgtgaagctgcggggagccccgttcaatgtcacagagaaaaatgttatggaattcctggcacccctgaaaccagtggccattcgaattgtgagaaacgctcatgggaataaaacaggatacatctttgtggatttcagcaatgaagaggaagtgaagcaagctctgaaatgcaaccgggagtacatgggtgagaccaagggcagcgtggccgtgcgcgtggctctgggggaaacccagctcgtccaggaagtgcggcgttttctcatagacaacggggtcagcctggattccttcagccaggctgcagcagagcgaagcaagactgtgattctggtcaagaacctcccggcaggcaccctggcggccgagctgcaggagaccttcggccattttggcagcctgggccgcgtgctgctgccagagggcggaatcactgccatcgtggagttcctggagcccctggaggcccgcaaggccttcaggcatctggcctattccaagttccatcatgtccccctctatctggagtgggctccagttggcgtcttctccagcacagccccacagaagaaaaagctccaagacacaccttcagaacccatggaaaaggacccagcagagccagaaacagtgcctgatggcgaaaccccagaagatgaaaatccaacagaggaaggagcagacaactcttcagcaaagatggaagaggaggaggaggaagaggaagaagaagaagagagcctcccaggatgtactctgtttattaagaatctcaattttgacacaacagaagagaagctgaaggaagtgttttcaaaagtggggacagtgaagagctgctccatctccaagaagaagaacaaagcaggagtgctcctttccatggggtttggatttgtggaatacaggaagccggagcaagcccagaaagctctcaagcagctccagggtcacgtcgtggacggccacaagctggaagtgaggatctcggaacgagccactaagccagccgtgacattggctcggaagaaacaagttcccagaaagcagaccacctccaagatcctggtgcggaacatccccttccaggcccacagccgggagatccgagagctcttcagcacctttggggagttgaagacggtccgcctgccaaagaagatgactgggacaggcacacacagaggcttcggctttgtggacttcctcaccaagcaggatgcgaagagagccttcaacgccctgtgtcacagcacccacttgtacgggcggaggctggtgctggagtgggccgactccgaggtgaccctgcaggccctgcggcggaagacggccgctcactttcacgagcccccgaagaaaaagcggtctgtggtgttggacgagatcctggagcagctggaaggcagtgacagcgacagcgaggagcagacccttcagctgtgagctggcaccgagagggctggagtgcagtggcgtgatctgggctcacctccctggttcaagcgattgtcccgcctcagcctcccaaggctgggattacaggtatgcaccaccacgcccggctaattttgtatttttcatagagactgggtttcaccatgtagaccaggctggtctcgaattcctgacctcaagtgatccacctacctcggcctcccaaagtgtggggattacgggtgtgagccaccacgcccggctaattttttgtatttttagtagacagggtttcaccatgtgggccaggctggtcttgaactcccaacctcaagtgatccacccaccttgttctcccaaagtgctgagattacaggtgtgagccaccatgcccagcctgttcctaaccctttcaactggggggtctcaagtgggtgaggactccatggccacggcagcagaactgtctcttctgaaaaccagactccggggcccctgggtcagcacctctaggtcattccacagacttacacagtttaaagaaagagccagcgaacatggggtgatcctggggtgccactgggatcccaagccaggcccggaggtctgcctgtttcgtccccagaaacttgagctggcatcctccgctggtttgcactgggcacggggactggagagccaccaggccactgagcgcagcatgctatcacttctcaggaagttgtgagggtgaggagaatagccgggcccactctgcagaggggaggaacaggcacaggctagaggcacgggctgatagagtgagtcctctccctcattcattcattcattcattcattcatccatcagacacctgctgggcatctgctgtgtgcgagacactgtgctgggtgccccagacacaagacagaaactcgggtcgctctgtgtgcctccacactggccttccctgctgcgtggacgcaggctctgtctcctaggctttaagccccatgcatcaggtggaagacaatttccagcagcctctgcccgcttgtttttcctcctctccttttcctgccgccttggtcttttttgtcttttgtgcagggccgtctctcgcagcgcccgtctgtgctccgcagcgtctaggaaaggattagtgtgagcagagcatgcaggctttggtgaacagagccgagcttggtttcaacatctaattcaatttgttctgccgagattgaaatatgaaatggttgccagtcaaacgttcaaaggacggggaagggagagtgagcgcatgctgaaatttaaattttaatgaaaatgactttaaccctttggtacaccttgcaaaatgtaacccatcctcccatcctgtgaaagcggcctctcgggttagagcttttccacccacttctcttccactgagcttcactaataatatgtaatcatttttttcagccgtcttaataataaaagattaatag

SEQ ID NO: 1721 - protein, 769 aa, Homo sapiens
MSRLIVKNLPNGMKEERFRQLFAAFGTLTDCSLKFTKDGKFRKFGFIGFKSEEEAQKAQKHFNKSFIDTSRITVEFCKSFGDPAKPRAWSKHAQKPSQPKQPPKDSTTPEIKKDEKKKKVAGQLEKLKEDTEFQEFLSVHQRRAQAATWANDGLDAEPSKGKSKPASDYLNFDSDSGQESEEEGAGEDLEEEASLEPKAAVQKELSDMDYLKSKMVKAGSSSSSEEEESEDEAVHCDEGSEAEEEDSSATPVLQERDSKGAGQEQGMPAGKKRPPEARAETEKPANQKEPTTCHTTVKLRGAPFNVTEKNVMEFLAPLKPVAIRIVRNAHGNKTGYIFVDFSNEEEVKQALKCNREYMGETKGSVAVRVGETQLVQEVRRFLIDNGVSLDSFSQAAAERSKTVILVKNLPAGTLAAELQETFGHFGSLGRVLLPEGGITAIVEFLEPLEARKAFRHLAYSKFHHVPLYLEWAPVGVFSSTAPQKKKLQDTPSEPMEKDPAEPETVPDGETPEDENPTEEGADNSSAKMEEEEEEEEEEEESLPGCTLFIKNLNFDTTEEKLKEVFSKVGTVKSCSISKKKNKAGVLLSMGFGFVEYRKPEQAQKALKQLQGHVVDGHKLEVRISATKPAVTLARKKQVPRKQTTSKILVRNIPFQAHSREIRELFSTFGELKTVRLPKKMTGTGTGFGFVDFLTKQDAKRAFNALCHSTHLYGRRLVLEWADSEVTLQALRRKTAAHFHEPPKKKRSVVLDEIQLEGSDSDSEEQTLQL

SEQ ID NO: 1722 - DNA, 3632 bp, Homo sapiens
aggtctcagccacgtgactgtgttccggctcggtaaagatggcggcgcccagggcggtagcgtgaaacttggtggaagacgctgaccagtcgtgttggaatcaaaacagcggggaccctgcgccatgtcgcgactgatcgtgaagaatctcccgaatgggatgaaggaggagcgtttcaggcagctgtttgccgccttcggcacgctgacagactgcagcctgaagttcaccaaagatggcaagttccgcaagtttggttttattggcttcaagtccgaggaagaggcccagaaggcacagaagcatttcaacaagagcttcatcgacacatcccggatcacagtggagttctgcaagtcattcggggacccggccaaacccagagcctggagcaaacatgcccagaaaccaagccagcccaagcagcctccaaaagactctactactccagaaattaagaaagatgagaagaagaaaaaggtggcaggtcaactggagaagctgaaggaggatacagagttccaggagtttctgtcagttcatcagaggcgggcgcaggcagccacttgggcgaatgatggcctggatgctgagccctcgaaagggaagagcaagccggccagtgactacctgaacttcgactccgattctgggcaggagagtgaggaggagggagccggggaggacctggaagaagaggcaagcctcgaaccaaaggcagctgtgcagaaggagctgtcggacatggattacctgaaatccaagatggtgaaggctgggtcgtcctcttcctcggaggaagaggaaagtgaagatgaagccgtgcactgtgatgaagggagtgaggccgaggaagaggattcctccgccaccccagtcctgcaggaaagagacagcaagggtgcaggccaagagcaagggatgccagctgggaaaaagagaccaccggaggccagagccgagacagagaaaccagcaaaccagaaggaacccaccacctgccacaccaccgtgaagctgcggggagccccgttcaatgtcacagagaaaaatgttatggaattcctggcacccctgaaaccagtggccattcgaattgtgagaaacgctcatgggaataaaacaggatacatctttgtggatttcagcaatgaagaggaagtgaagcaagctctgaaatgcaaccgggagtacatgggtgagaccaagggcagcgtggccgtgcgcgtggctctgggggaaacccagctcgtccaggaagtgcggcgttttctcatagacaacggggtcagcctggattccttcagccaggctgcagcagagcgaagcaagactgtgattctggtcaagaacctcccggcaggcaccctggcggccgagctgcaggagaccttcggccattttggcagcctgggccgcgtgctgctgccagagggcggaatcactgccatcgtggagttcctggagcccctggaggcccgcaaggccttcaggcatctggcctattccaagttccatcatgtccccctctatctggagtgggctccagttggcgtcttctccagcacagccccacagaagaaaaagctccaagacacaccttcagaacccatggaaaaggacccagcagagccagaaacagtgcctgatggcgaaaccccagaagatgaaaatccaacagaggaaggagcagacaactcttcagcaaagatggaagaggaggaggaggaagaggaagaagaagaagagagcctcccaggatgtactctgtttattaagaatctcaattttgacacaacagaagagaagctgaaggaagtgttttcaaaagtggggacagtgaagagctgctccatctccaagaagaagaacaaagcaggagtgctcctttccatggggtttggatttgtggaatacaggaagccggagcaagcccagaaagctctcaagcagctccagggtcacgtcgtggacggccacaagctggaagtgaggatctcggaacgagccactaagccagccgtgacattggctcggaagaaacaagttcccagaaagcagaccacctccaagatcctggtgcggaacatccccttccaggcccacagccgggagatccgagagctcttcagcacctttggggagttgaagacggtccgcctgccaaagaagatgactgggacaggcacacacagaggcttcggctttgtggacttcctcaccaagcaggatgcgaagagagccttcaacgccctgtgtcacagcacccacttgtacgggcggaggctggtgctggagtgggccgactccgaggtgaccctgcaggccctgcggcggaagacggccgctcactttcacgagcccccgaagaaaaagcggtctgtggtgttggacgagatcctggagcagctggaaggcagtgacagcgacagcgaggagcagacccttcagctgtgagctggcaccgagagggtgtgtggctccggggccctggggaccgggacagccgctccagcttctgcactcaccaccatgtgggctggggggcggggcggggagcggcaggcggccccaccctgcactggtccaaggtcggaggagacaggggatgaggaaggcctcaggccactgcccagcggcccaggcatcctgggtttcaccagtgacgcgttctagcagacactgactgcgcacctgctctgtagcagacacggaagagtccaagggagcagccacgttaggaagagagacttgggaacagctacacagggagctagaacccctgctccccctgtccccaccccaggagagtaaggggacgagggccagctctctggcatcaggctgcttggacatgaaaccccgtctccaagctcaagctgggagaccctggcccagtttccttatctccttgggcccagccttccccttgctagctagttcttacttcataaggttttagagagaaataaacgcagtaatgcatgaagagtgccgggcatggtgctgagccctgttcctgctctccctccagggctgctgagctagaattcccacctatgtctttccaagggactgttcacggcttgggacttggtctctgtcctgccccatcctcgtcacttgggaccacgagccctggttcagtcacccagggaagcctcccagcggctcatgaagcatcgagctccaagcccagatgccaagctccctggctgagctgaatgatgtcactcatggtggacgcgttctgctcacgggcccagagccctgtgaaatgcatcaaggtcctctccgctggccagcagcatccccaggcttctctcaggcgcccgtgttcacattttctccagcctgagacgcagcctcccgcctggaagggcctgtgccagcaccaggcagagggcaagacggagagggcagagcaagaactgcactgcatctcactgcagtctgaatctagacatcgccattccccgaggtgcgacctcagactaatgacatcctggctgagcctctgtttttctctctaggaaatgggggtgataattgtgcctacctcagatagacagtgccagaattaagtgagtcaagccaagtaaagcccagagaagattctcatcagcacttt

SEQ ID NO: 1723 - protein, 769 aa, Homo sapiens; identical to SEQ ID NO: 1721

SEQ ID NO: 1724 - DNA, 50307 bp, Mus musculus
  misc_feature (1)...(50307): n = A, C, G or T/U
cgggctcccagtggctttggatggtaagaaaggaggaagctgggcctttaaattgctgagtcacctgggcagtgccaacagccacctcagaggatgacgatggcagtcctcatgatcactgtagcacctcaattgagagactgagatcggtcattcagcaagcatttcctgagtgcctgctgtataccaaacacgtggcaggtcaggagaatctccagtctgaggtaatgagatccgaaaggtgacgtgaggagccaagactgaaggtattcaagagagagagacactactgagctgggctgtctgaggaggtgacaaatgacttcagacctgaatgacagtttagaagttcctgaagaagtggagcgtgccagctgggggtgcagctcggtggccatgtgacctaaggagctctgttctagatgtttacccggaagaaatggaaacatctgcagaaatccacacacgcattcctacatctgccggaagagctacaaggtgggcgctcgcagactcttctgtgtatgcagtggaaaagagttcacgccagagcatggactgcttctaaactacgcaagggagagaggcagacactaaggcactaggcacagaaagtcacatatcctaggactggcctccgccaccacctcccccgacctccaccccacccccaccctcatcaacgcatccttcatacctcccagggcagaggacagaacccagggccttgaacatactaggcaagttttgttttgttttgttttgttttgttttttgagacagtttttctgtgttgctagccctggtggtctttgaactccataaaacaggttggtctcaaattcacagagatcctcctgcctctgcctcctgagtactgggattaaagatgtgtgctaccaccagtttgggccaattttgttttgtttggagatagggtctcattatgtagaccagggtggccttccaaactctgcatgtgagccaccacacccagctttgtgtttgatctttatttgttctatttagaatcttcaaagcgatagaggcagaaagcaaaatagtggctgtcacaaacagggagagagactgtgtgactgtttaatggagtgatagcagggggttatggaatggtgttttcaaactcaggacttgtggctgcaggctcacatttttgagctttaaaatgtatgagattttttttttcatctcattaagagggaaaactttaaaaaaaaataaagaaagaaaaagatgaaatgatcatagtggcacaatctctgtcatcccagtactcagaaagcaggggtgggagagctaaggccagtgtaagtctacataatgacacagttctgaaccagtcagggctacagggtgagactgtcacaaaagaaaaatagaaaaaaagagagagagaggagaggagagaagagaagaatatgtgggagatagctatcttgccaaggaacagtgaggtcaaaggtcacaaggcagggccatctgtggggcaggcaatggtgtcagtggacggaaagtggaggatgtgaggtagaaaggacaggaaggtggttaggcagggaccagtgggctacccggaggtggctttaatgtaggaagacagagggcagtggagggttttggtcagggcatgccacaatcacacattctggctcagtgaggtgaatgtatttgacaggggctgagagaggcctcattttcttgctgggctggacctgcgctcaccctcctctgtctatgaggaaatgtggcctgggggggagtgtttgcagcgagaattcaggaagtcctgctgttctgtatgactgagggagtcttacaagaagaacgtgctttgaaacatatcaaagcctcctgcgcagtaaatgtggagggagcagagcccccgggcagcacagtcgccccaccaatgcacggcggagccccttacatgctctggcgacagatcggcagtggacacacctccaagtgatgagagagagagtctgttaggcaagcaccttgaggctttgctgacaaggcctgcatgggttccctgacctctgactctcagctatctgggtatttctagacaaggcctagaaaaagggaaagttttctctaagcaggagcctggcttcctgtgtctctgcagaacaggaannnnnnnnnnnnnnnnnnnnnnnnnnnnnnnnnnnnnnnnnnnnnnnnnnnnnnnnnnnnnnnnnnnnnnnnnnnnnnnnnnnnnnnnnnnnnnnnnnnnnnnnnnnnnnnnnnnnnnnnnnnnnnnnnnnnnnnnnnnnnnnnnnnnnnnnnnnnnnnnnnnnnnnnnnnnnnnnnnnnnnnnnnnnnnnnnnnnnnnnnnnnnnnnnnnnnnnnnnnnnnnnnnnnnnnnnnnnnnnnnnnnnnnnnnnnnnnnnnnnnnnnnnnnnnnnnnnnnnnnnnnnnnnnnnnnnnnnnnnnnnnnnnnnnnnnnnnnnnnnnnnnnnnnnnnnnnnnnnnnnnnnnnnnnnnnnnnnnnnnnnnnnnnnnnnnnnnnnnnnnnnnnnnnnnnnnnnnnnnnnnnnnnnnnnnnnnnnnnnnnnnnnnnnnnnnnnnnnnnnnnnnnnnnnnnnnnnnnnnnnnnnnnnnnnnnnnnnnnnnnnnnnnnnnnnnnnnnnnnnnnnnnnnnnnnnnnnnnnnnnnnnnnnnnnnnnnnnccctggggagaatcagccctgctctttccatcccggctagctccttctgggagtttccacagctccttacactcactgcagaggaaaggaggcctcttgaggattttgtccttaaacctgttttcctcccacaccggtgcatctgaggtaatggagttgtgcggcagttgctggagctgaaactaatctaggctcccgatccggctcgtctctttctgcaggccccagaattcatatccaggcaggagctgactgtgtcaatcattcctgcttgctgagaggatcctgtttcctcttggcgctgctctaccgagcgagatctgaattactctctccccccaggatcagccatctcacccttgggccctgctctgcccaagcaggcgtgcagatttttacctgagagttaattatttatttgttgtatatatgtgtgttacatatgtacttgtttgtacgtgtatacatgaatgtgtgggtgtgtatgcataatataaaccagagattaacttagggtgtctctcttgactgccctctactttgttatcttttacatttagtgtatgggtgtgtgctcctgtgtgtgtgtgtgtgtgtgtgtgtgtgtgtgtgtgtgtgtgtgtacatgcgcacgcaggtcagaggacgagtgtgtagaatcagttctctgtgtccacagtagaagctgcagactgaattcgggaggtagtgaacacttttgacaaatgagccttctctctcttttatttatttatttacttatttgtttattatatgtaagtacactgtaactttcttcagacactccagaagagggccatcagatttcgttacagatggttgtgagccaccatgtggttgctgagatgtgaactcaggacctttggaagagcagtaggcgctcctaaccgctgagccatctcaccagcccccgagccttctctcttacactcctccttatcctttgaggccgtgtttctcactgggcatgagggttacataatcctgtagactgggtcagcaagccccatggttcctcctctttccacctccccagagctgaggttttagtaaaaaagccacatctggcttttataagagtgctggggctgagcagtggtggcgcacgcctttaatcccagcacttgggaggcagaggcaggtggatttctgagttcgaggccagcctggtctacaaagtgagttccaggacagccagggctacaagagaaaccctgtctcgaaaaaaacaaaaacaaaaacaaacaaaaaacaaacaaacaagagtgctgggacctgaactcaggttctcacatctgcacagtcagccgcaccatcttctcaccctttagaccttacttctcagaacagtcagatttatgaaagagatgctaacgctagttcagagagttcctatccaccacgtaccctgttttcctcttcccctctctctttcccctttacagttctgggatggatccagcatcccatctctcagctgtgccttccactttcctattcacaactttgtgtgtggtgtgtgtatgcgcacgtgcgcacacatgcttgggcaggtgtccatatctatgtgcacatggagaccagagttgacatcaggtgtcccccagctgaagctggagcttgagtttgggcttggctcagtgagaccctgagcaccaaggatactgatctatgctgccccagcctcttcctggggctgggctcagaacttaggtcctcctgggtgtgcggcagacactttccacaatgagccgcctcccagtccctgttcttaggtcttccaagcattttccttccttcacatcttacaaggcacatttgttaccattactgagacatcaagtgaaggctagagtttgtttggattttgggtttcctcagtttccccatttttgtctgttgtcctaacaccaggaaagcataccacatttagttcatgtatctctttatactcctttttgctatttcttggacctttttggggggagggggtcatggtaggcagtgtctaatgtagcttggattggccttgaactcactgtataactaaggatgaccttggactcttgaccctgctgtctccacccactaaatgctaagattacaggcatgcacaaccattgctggttttatgtagttctggaatctatcctgggactttgtgcaaactagacaagcattgtaccaattgagctgcagcctgaagatttgcttgcttgtttgtttgaactgagacggggtctcgttctagtcctgtctggccttgaactcctggcagtcttccttccttgtggtcttgtgtcaccacacccagcatccctcggggctttagaaagggtcctttcctgcaatctgctaccctggttttctctgggatggcaggttttagaaggaagagctgtcctgccttatcaaaaaggtccatacagatgccagcactctgcagtcacaacaggaggaccataaattcagagtctcctcaactacatagcaagtctgaggccaaccgnnnnnnnnnnnnnnnnnnnntgctttgaaacatatcaaagcctcctgcgcagtacatgtggagggagcagagcccccgggcagcacagtcgccccaccaatgcacggcggagccccttacatgctctggcgacagatcggcagtggacacacctccaagtgatgagagagagagtctgttaggcaagcaacttgaggctttgctgacaaggcctgcatgggttccctgacctctgactctcagctatctgggtatttctagacaaggcctagaaaaagggaaagttttctctaagcaggagcctggcttcctgtgtctctgcagaacaggaaggtggctgatctgggcacacccagaaagcacgctctggcgccccactcctcctgggtgtcccacttgtctccttagtagcctttactgcttccccagcacactgcctgttctcttagcatactggacgtctctcacagacagaggctggacctcgcaaagcaggtgctcacacattaacccctgggagaatcagccctgctctttcctcccggctagctccttctgggagtttccacagctccttacactcactgcagaggaaaggaggcctcttgaggattttgtccttaaacctgttttcctcccacaccggtgcatctgaggtaatggagttgtgcggcagttgccggagctgaaactaatctaggctcccgatccggctcgtctctttctgcaggccccagaattcatctccaggcaggagctgactgtgtcaatcattcctgcttgctgagaggatcctgtttcctcttggcgctgctctaccgagcgagatctgaattactctctccccccaggatcagccatctcacccttgggccctgctctgcccaagcaggcgtgcagatttttacctgagagttaattatttatttgttgtatatatgtgtgttacatatgtacttgtttgtacgtgtacacatgaatgtgtgggtgtgtatgcataatataagccagagattaacttagggtgtctctcttgactgccctctacttcgttatcttttacatttagtgtatgggtgtgtgctcctgtgtgtgtgtgtgtgtgtgtgtgtgtgtgtgnnnnnnnnnnnnnnnnnnnncagtaggcgctcctaaccgctgagccatctcaccagcccccagccttctctcttacactcctccttatcctttgaggccgtgtttctcactgggcatgagggttacataatcctgtagactgggtcagcaagccccatggttcctcctctttccacctccccagagctgaggttttagtaaaaaagccacatctggcttttataagagtgctggggctgagcagtggtggcgcacgcctttaatcccagcacttgggaggcagaggcaggtggatttctgagttcgaggccagcctggtctacaaagtgagttccaggacagccagggctacaagagaaaccctgtctcgaaaaaaacaaaaacaaaaacaaacaaaaaacaaacaaacaagagtgctgggacctgaactcaggttctcacatctgcacagtcagccgcaccattttctcaccctttagaccttacttctcagaacagtcagatttatgaaagagatgctaacgctagttcagagagttcctatccaccacgtaccctgttttcctcttcccctctctctttcccctttacagttctgggatggatccagcatcccatctctcagctgtgccttccactttcctattcttcacaactttgtgtgtggtgtgtgtgtgcgcgcacgtgcacacacatgcttgggcaggtgtccatatctatgtgcacatggagaccagagttgacattaggtgtcccccagctgaagctggagcttgagtttgggcttggctcagtgagaccctgagcaccaaggatactgatctatgctgccccagcctcttcatggggctgagctcagaacttaggtcctcctgggtgtgcggcagacactttccacactgagccgcctcccagtccctgttcttaggtcttccaagcactttccttccttcacatcttacaaggcacatttgttaccattactgagacatcaagtgaaggctagagtttgtttggattttgggtttcctcagtttccccatttttgtctgttgtcctagcaccaggaaagcataccacatttagttcatgtatctctttttttttttaagatttatttatttatttatttatttatttatttatttattatatgtaagtacactgtatctgtcttcagacacttcagatgagggtgtcagatctcattatgggtggttgtgagccaccatgtggttgctgggatttgaactcaggacctttggaagagcagtcagtgctcttacctgctgagccatctcgccagccccatgtatctctttatactcctttttgctatttcttaaacttttttggggggagggggtcatggtaggcagtgtctaatgtagcttggattggccttgaactcactgtataactaaggatgaccttggactcttgaccctgctgtctccacccactaaatgctaagattacaggcatgcacaaccattgctggttttatgtagttctggaatctaacctgggactttgtgcaaactagacaagcattgtaccaattgagctgcagcctgaagatttgcttgcttgcttgtttgaactgagacggggtctcgttctagtcctgtctggccttgaactcctggcagtcttccttccttgtggtcttgtgtcaccacacccagcatccctcggggctttagaaagggtcctttcctgcaatctgctccctggttttctctgggatggcaggttttagaaggaagagctgtcctgccttatcaaaaaggtccatacagatgccagcactctgcagtcacaacaggaggaccataaattcagagtctcctcaactacatagcaagtctgaggccaaccgagggtaaacaaaactctctcaaaaaaaaccaaagcaagcnnnnnnnnnnnnnnnnnnnngggggagggggtcatggtaggcagtgtctaatgtagcttggcattggccttgaactcactgtataactaaggatgaccttggagctcttgaccctgctgtctccacccactaaatgctaagattacaggcatgcacaaccattgctggttttatgtagttctggaatctaacctgggactttgtgcaaactagacaagcattgtaccaattgagctgcagcctgaagatttgcttgcttgtttgtttgaactgagacggggtctcgttctagtcctgtctggccttgaactcctggcagtcttccttccttgtggtcttgtgtcaccacacccagcatccctcggggctttagaaagggtcctttcctgcaatctgctccctggttttctctgggatggcaggttttagaaggaagagctgtcctgccttatcaaaaaggtccatacagatgccagcactctgcagtcacaacaggaggaccataaattcagagtctcctcaactacatagcaagtctgaggccaaccgagggtaaacaaaactctctcaaaaaaaaaccaaagcaagccttattcatttagccttctctttgtgaagttactcttctcccttcccaaacggtgctcttggaagaaagtctctctgcacttcccacacctatgacctgtgagtgagtcatgagtctcggggctgaaaatcaggtcctcccagtcctggcccacaccctctgttcctctgagcttggcttagctgacctcctgggcctcacatgccctggcacagcagcccctctgtggcctcatctgctgccacttccctgttagtcactgccctcaggcacactacctcccttgtccctcgatgtggtctggcctctaggcctgtaccagcctctccctctgcctagagccacttccgcctcctgctcaatctgctttcagccagtttctgtgtgtgatcattcaggttacagcatgggcatctcctcggctggagacgtcggaagatctctgctcatgacctctgggagtcctcaccacagacagtttgtccataaggcactgccaatccacccactcagccgccagtgctaaagccttgcagaaggcacagtgcccttgaacacagctagggtgcactggtgaggaccctgacaaagggcagagagtaagagtgtctttcaaacacttgaaaggtggaaaggagggctgagtgtggtggcacgcacctttaaccctggcactctggaaagagtgagttccagggcagactggtctactagcggttctagactagtcaggccaaagagggagacccccatctcaacagaaagatagaagcatccgcacccacacaccatgggaactagaactgcagctcagaggtatagcacttgctaacattgggtttgattctcagtaacacacatagatagagatacacagagagagaaggagagagctggagggagaggggtgaaaggagagggagggagggaaggagggaaggagggagagagagaatatgaagagccaagtgtgggtgcatacacatctgcaacttgaggcagggggattactttgactttgaggctgtctggagcccacagctagtaccaagccaaccaaagcaacaagatggtggcggtggcatgcatctctaatcccaacacttgcaaggtggtggtgtgtcaggatttcatagctggcttttgatttatagcaaaaataaggctgacctgcaaaataaaaataaattaggaggcaggagatgccttttatctcagcactgggaggcaaaacacatacacacacacagacacacagacacacagacacaccacacacacacacatacacacacacacactatcactatatatatatatatatatatatatataatattctatattaaataaaacacaataaataataattaaaaaagcataagtacacataacaataaaataggggaaaagttaccagtcaccagtgcaggaggattcacaccacaggcagcagccatacccagaatgggaagagtttcctgcgtacccctgagagacaccaaaggctccagcctcgggggatgagtgagacattggatccagaccaaccctggagaagaaaacagaggaacatttgctacagccctgcctgcctaccataccctccagatggttgtctgggacctgggcctagagcttcatgtgtgctggtcgtgacagtatcagccccttccccggcttggcagaaacaaatgaacactctccccgagaggccagcccatcattctaggtccgaggggatcctggacagactttctaaaggctcacgagcagatgaagaaagtctggcagctctggtttatctgtggctggagtgcagctcctgggcttcatgacaggattagtctctgtagcccccgttgtgagccaccgagaagcaaaatcaatcagctaaggtgtcaggcatccaggctctaagaagtaattcgtttaggaagggccgtgaaagaggagtccccatgactgaaccctgatggctttataaacagtgagacagagcgtgagacccacacaggtgcatgtggcactgtctcttgccacatgtcctgtgcttcctcaggactctggaccagcactttgttatactgatggaaagtgtataatatgctggcgcccacatgaggggacaaggcagtctgagcagaaacatgagcagagccaggctgcacagagccccggaccgaacatttccagcacagactctaagatcattataacttaatggttaaaatagtaagtacccagctggctttgttttttattgttgttgtcattattgtagtttttgtttttgtttttgtttttgagacagaattttgtacagcccaccctgtcctcaaactccccaggaatcagttcctcctgctcccccccccccaagtgctgggaacacaggtatcatggctggttttatgtgttgctgaggggggaactcagagctctgtacttgttaggcaagtactttaccaaccgagctacatgcagggcccttaaaaatgtttacaggagccggggccgtgggggtgcacacctttaatcctagcactcaaggcagaggcaaggaaatctctgtgagttcaaggccaacctggtctatgaagggagttctaggacagtaaggctcaggagggagggagggagggagggagggagagaggagggagagagagagagagagagagagaaattgagagagattgagggacctggagacatggcttctgacaaggacatgagaacactggctgcccttccaaggaccctggtttggctcccagcacccacattgtctttgtcagggtttctattcctgcacaaacatcatgaccaagaagcaagttcgggaggaaagggtttattcagcttacactttccacattgctgttgatcactaaaggatgtcaggactggaactcaagcaggtcaagaagcaggagctgatgcagaggccatggagggatgttctttactggcttgcttcccctgccttgctcagcctgctttcttatagaacccaagactaccagcccagagatggtaccacccataataggccctccccacttgatcactaattgagaaaatgccccacagctggatctcatggaggcacttccccaactgaagctcccttttctgtgataactctagcctgtgtcaagttgacacaaaactagccagtacacgcatggtggctcataactgtggggttcatttccaggagacccgatgccctcttctggtctctgtgggcacctgctctcacaggaacatatatacatacagccaaagcattcatacacataaacaaataaaataaagaaaaaaccagaataaaggaatagaggccgaagactgcgtgagaaatttcgttctatatttgttgcaatttccagacagacagatggagaaggcagacagacagacagacagacagacagtgtggggcagaagcaagctgatggctcagagcccaacctagagccaatgaaaagcagcttccagatcccaggaggccagggtctggccggatgcctgccccagtgctggaaggtctttgaatgtgggccctgactctgccctccccctccaatgtgggcatccaggggctcagagtcccttctttccctgaggccgcacacagtgggaaccagtccccatcgtgaaagcctgtcagcctgctgccagctctccctgccagatgtccttcacccactgttcagtctttgttgtcctgcctccgcctccctggttatctgtgggtttaaaatagacaggcaagcgaggaatgctgcctagctactcagctgctaccagccctgcttgcagcctcagatctcccaaatccttcccctgcagcaagaggaaccactcgctccacctctgtcagagctttccctactaagttaaaaggaaaactctgagttcagaaaaccagccaaaacactactgcaactgagaggctctcaaaggacacattagaacatagctcatgatgattccactctaaggctattatggtcctactaagggtcaaggacacacatcaggaccaggctgatagagtccaactgatattacccatgctcttttgtaaagagaatgttttatttttacataaaagagccaagacgcagtctcacttttcagataggagcacagagtccaaaaagcaaagaaggcttatgcatgaaatctcaggaacctgagtcatgagtttgaggccaacctggtttatatagcaagttccaggccagtctgagatatagtatgtgaccctgtcacaaagcaaaaaaatgaaaatgacaaagcaaaacaacaactacacatacacatacacacacacacacacacacacacacacaaagactgggtgtggtggtgtatacctttaatcccagcactcaggagtagaagtagctgggtctacatgagttcaagaccagcctggtctataatgtgagttctaggccaaccagagttatatattctctacatagccccagctgtcctagaactcactttgtagaccaggtcagctcaaacttgcaggaactcacctgcctctgcctcccaactgctaggattaaaagtctgagatgccaggcgtggtggctcacacctaacacttgagaggcagaggcaggtggatttctgagttcgaggccagtctggtctacagagtgagttccaggacagccagggcgatacagagaaaccctgtctcgaaaaaaccaaaggggggaaaaaaagtttgagagtatgtgtgtagaccacatcactctcactgacctctgacctatttctacaccttgtctccttgattatcacacagttctttctttgagactttattatttaattatgcataggtgtgtgtgtgtgtgcatgcacacaagcacaggtgacttcatgagccagatgtgtcagattcgtggcagctggagttagatggttgtgaactgcctaacatgggtgctgggaactgaagccgcggactggagaagcagccagtgctctccatttctgagctgtctgctgcccctccatacatgtcctcacccttgtatgtaaacttcaggagaaggccgggcctgttgtgttcactgcctggttctgtccctacaattcccagttgtagaagctgctcagtaaagacgcatgagacgagggatgagtgagcgcacacttggggtgtggaaggaacaatggtgcagggctcagctatgtctcagctatacatgtcctctgatagtgaaatgctggatgctttgtgggagcctctgaaacaacacaacacattattaatccatctctctctctctctctctctctctctctctctctctctctctgtccctctctctctcggctgccttatcccatttaccccaaacctgctctttccttcaaactacagagtttggtggttttgggtttttttgtttttgtttgtttgtttgtttgtttgtttcgagacagggtttctctgtgtagccctggctgtcctggaactcactctgtagaccaggctggcctcgaactcagaaatctgcctgcctctgcctcccaagtgctgggattaaaggcgtgcgccaccactgcacggctttgtttttgttttaatgtaacgtgtgaagtgtgcgatgtgtgtgcccaaactacagcatgcactggaggtgagaggacgactctcaggagtcgacctggagagcaaacttgggttataaagtttgtacagcgtgcagttttcctggctgagccatcatgccagcctttgttttgtttttgagtcagtgacccccatcatgtagcccagaataccttcaaattcctagtcttcttgtgtcagccctgggctgggattgctggcctctgttgttgcactgggttcctagtactttccatatacggtctcatgaggccaaactgcagggaaagggtgtgacaaagaaaaaatggcaaactgcccatcacatcttagtgggcggacttctgggaccccgaggaaggatggaagggtgaggggtacacgaggctgaagtgtgagacggcctaagaggctcgacaccagcagagcagagccacctccagatgagctgtgaggtgccgtgaaatcagctcccatcctcccacctttcctccccgagacatgcaaaacctcacagtgattagaatgttccagatttggtgcctgaattaacaccttctgttgaaaagaatcttcacttaaggaaaaaaaaatggcatggaattaagacaatagcaatggaagaaacccggccagtactgcaggcttacagttccagttattccggaggcctcggtgggagggcgacaagttcaaggtcaatcttgggcaacttagtgaaactgtctcaaacataaaaagttaaaaaaaaaaaaaaaagtccggagagagggctcagtggaagaacacactgctcttccagaggatgggcggctcacactcactggtaactcgtgtgtacacacactacacacagatagataattttaaaaaagaataagtgaagccaggcgtggtggcacatgcctttgatcccagcacttgggaggcagaggcaggtggatttctgagttcgaggccagccctgtctacagattgagttccaggacagccagggctacacagagaaaccctgtctcaaaacaaacaaacaaacaagtgaaccatttcatacattgagtggctggggatgtagtggatcatttgctagcaagctcgcctaagatgaatgaagccctgggtttgaccctcagcaccgtgtgagaaggaagtacagcggcacaagcctgatctcagcacgcagaggccggaagtcatccttgttcaagcgggaggccagcctgcgctatgtgaagtccctgtcttaaacactagaaaccaaaaacactaccaaagtcttggaggcaggctcaatagtagagggcttagattcttttgagacaaggcatcaaattgaaggccaggatgactgcagcactgtgccaatcctcctgcctcagccttccaattgccatgacaccctaccttgtttagagttttgttttcatttggtagagagagcttgcctggcatgttcaaggtcccaggtttgattttctcatcaggaaggggggcggggagaaagggaaagagagagagagagaatccttcacatgccattaggaaagaaaacactaaagaaatctaaatagggtagacaatagagttaacaccattttaccattttgatactggttggttatccatggcaaatggacacattataagatattagcaagtcagatagtgagggagcagataggctattctgaattatcttctagatgtttctgtccatctgaaactgctgtaaagaagtagggccaagcatggcagctcatggctagaatcccagtgctcagcgggcagaggcgggggaatcacttcaaatttgaagtctgtatggtttatacagcaagaaatacaatacaatctattctactcaccaggtatggtatctcatgtctgcaattccagctcaagggaggctaaggcaggagcctgaaaattcgaagccagcctgagatacagagcaaggcactgtctcaaccggggcttggctgatggttcgctgggtgaaggcagttgataagcctgatgacttgggagccccgtgggggaaggaggcaatgcactcctctgacatctgtgcatgcatgtacaaatccccacctccacagcagaaataattcaatgtaatcaaaaaagccaaaaaaaaaaaaaaaaaaaaaaccaacccattaaaaattaaggagggctggagagatggctcagtggttaagagcactggctgctcttccagaggacctgggttcaggtcccaacatgcacatagcagttcacacactgcctgtaattccagttccaaaggatctgatgtcctcacacagacatgcatgcaggcgaaacaccaatgcacataaaaataaataaatctttgccaggtagtggtggtacacgcctttaatcccagcacttgggaggcagaggcaggcagatttctgagttcgaggccagcctggtctacaaagtgagttccaggacagccagggctacccagagaaacccggtctcgaaaaaacaaaaaacaaacaaacaaaaaattaaggagtgatttggttcgatttctaggaatttcatggatattttttagatgttttgtgttcatgccaacatttggaatgaacaaggaaaaaccaaaatgttgccattggaacaaaggcatactagaaacattagaaaagaatttgggggctgaagaggtggctcagtggttaagagcatgcaccgtttctcccgagggccagagttcaattcccagcaaccctgtcaggtgtctgtaactctatccaggccagagcctctgtgggcacctgcactcttgtgctcatatttacacataattaaataacaataaataataataataatattttcaaaagcattgggtatagttacaaggccaactgcagtgctctgtcttctcacttctgctaaaagagaaagcacatgggaagcagggacctaaaatcagaaaaggttacagctgggagcggtggggcacaccgtaatcccagctatggagaggctggggcagaaggatctctgtaagatcaaagccagcctggtgtacatgatgccctgtctcaacaaacaaacaaaaatctggaacaagaaaccatctgttcattatggttacttttgggatgtaggacaacaaacatttccaaaattttctacatttgaaaaacttaccacacaaaatgcccgtttcatggtctctgcccacccttgttccctgcccgctcactccccctctactttcatatattgggttttgatttgagacaaggtcttactttgtagcttcctctgtagcccaagatggacttgaactcagggcaatcctcctgtctcagctttccaagtgctaggattataaacaggaatcaccacaactgtttttgtgagtatttaatggcaaaacaaaacaagctgggtgtgatggcgcaagcctttaatcccagcactcgggaggcagaggcaggcgaatttctgagtttcgaggccagcctggtctacagagtgagttccaggacaggcaggactacacagagaaaccctgtctggaaaagcaaacaaaaacaaaaacaaaccaaaacaaacaaacaaacaaaaaacccccacaacaacccaaaaaaaacaaaacaagaacaacaaaacaacccctctagtgtgtgtatacatcacattttcttcctcttcttcctcatgtagcctagcttggtttcagattcgacaggcagctgaggatggccttgaattcctaatctttctacctctccctgctgggtcctagaatacagatgtgcaccacaatgtatgcagtcctgggaattgaacccaggacttcatgcatgctaaatcaacatcctaattgagccacatcccctagccaatgcacggcacagcttctttgtccactctgctgttgattgctgttgatgggcccttaggtcaattctggatcttggctttcatcaacattgctataattaacacgctgtgcaggtaccagagtggtatggcttgtttatatagacactcgagctattatacggatttctataatggcagcagtcatttaattcccaccagtagtatataaataatcctctgtctctcccacccaccccacattggtaaccatcattggatattatcttcctcttttccttgttgttggttctccttggttatttattttcattttttgttttgagggtgttattttggggagggggtttgagacagggtttctttatgtagacttagctgtcctggaacttgctctgtagatcagggtggcctcgaacttaccctgagagctgggattaaaggcatatgccacccagctagtttatttttatttttatttccgtgtttgggtgttttgcctgtatgtatgtgcaccgtgtggatctgtggcccacagaggtcaaaagtggaatcaggtccctgaaactggagctatagatggctgtgggtcaccaggtagatactgggaatcaaacctgggtcctctgcaaaagcaacaagtgctctaaccactgggccacatctccagctcctatagctcttttaaaaaacatgctctggagacagttttggtttcaagcttctccctagagtgctggcaaactcagggcctggaagtcaaatataaaggaagtctgctctgaacctgctgagcacacacacacacacacacacacaccaaaagcagaatgtgtccccaggctggggggaggggagtggagacaaaaggacatgtcagtcagccctgtgagataaaggagctctacaacagtgacatggcacgaagtgtacatgtccaaaacgccacacagctgagcatctagtaatgcttagaacggcttacatggcaccgtgacacacgtaggcctttcagaatacatataagtttcagaccagcctagtctacaaaacaaagttccaggctagctggggtatagagaggaatttctcacaagannnnnnnnnnnnnnnnnnnnnnnnnnnnnnnnnnnnnnnnnnnnnnnnnnnnnnnnnnnnnnnnnnnnnnnnnnnnnnnnnnnnnnnnnnnnnnnnnnnnnnnnnnnnnnnnnnnnnnnnnnnnnnnnnnnnnnnnnnnnnnnnnnnnnnnnnnnnnnnnnnnnnnnnnnnnnnnnnnnnnnnnnnnnnnnnnnnnnnnnnnnnnnnnnnnnnnnnnnnnnnnnnnnnnnnnnnnnnnnnnnnnnnnnnnnnnnnnnnnnnnnnnnnnnnnnnnnnnnnnnnnnnnnnnnnnnnnnnnnnnnnnnnnnnnnnnnnnnnnnnnnnnnnnnnnnnnnnnnnnnnnnnnnnnnnnnnnnnnnnnnnnnnnnnnnnnnnnnnnnnnnnnnnnnnnnnnnnnnnnnnnnnnnnnnnnnnnnnnnnnnnnnnnnnnnnnnnnnnnnnnnnnnnnnnnnnnnnnnnnnnnnnnnnnnnnnnnnnnnnnnnnnnnnnnnnnnnnnnnnnnnnnnnnnnnnnnnnnnnnnnnnnnnnnnnnnnnnnnnnnnnnnnnnnnnnnnnnnnnnnnnnnnnnnnnnnnnnnnnnnnnnnnnnnnnnnnnnnnnnnnnnnnnnnnnnnnnnnnnnnnnnnnnnnnnnnnnnnnnnnnnnnnnnnnnnnnnnnnnnnnnnnnnnnnnnnnnnnnnnnnnnnnnnnnnnnnnnnnnnnnnnnnnnnnnnnnnnnnnnnnnnnnnnnnnnnnnnnnnnnnnnnnnnnnnnnnnnnnnnnnnnnnnnnnnnnnnnnnnnnnnnnnnnnnnnnnnnnnnnnnnnnnnnnnnnnnnnnnnnnnnnnnnnnnnnnnnnnnnnnnnnnnnnnnnnnnnnnnnnnnnnnnnnnnnnnnnnnnnnnnnnnnnnnnnnnnnnnnnnnnnnnnnnnnnnnnnnnnnnnnnnnnnnnnnnnnnnnnnnnnnnnnnnnnnnnnnnnnnnncaaaccttaaaaccaaccctctcaataacctcacatcctctattttcacgacacacccaaaataacatgcgctttaaacagtcattaacgtcctctgtggatcttcttactctccaaagccaaaactgtatccacacttttatccttgcggatgactagtgtgaaggtaactctgggtatctaggtgtgtgtgcacgatggcgtgtcaggctgagtcttcaaagggtgcggctcccacacctgatgccttggggaatcattcctccagcacctacgcaaacagctgcacagcctgggccaggcaacaccttagcacattcacacatgctctcccgccttctccaaccagaaccctttccccttatctctgagacaaaaatcttacacaacagccaaagctgctctgggacttatcatggagctcaggtctgaaactcacagtaattctcctgcttcagctctgcaaatgctgagatgacaggaacaagctaccatacctggcttcaaattggacagcatttatgaatattcctaccagtgaccactgaagagaaagaattttgcctaaggttagaagatctttttttttggggggggggggttccagacagggtttatctgtgtagctctggctgtcctggaactcactctgtagaccaggctggcctcgaactcagaaatccacctgcctcagcctcccgagtgctgggattaaaggtgtgcgccaccacgcccagcataggttagatcttatcatcaaataggaaggacttttccctctctattttaaaagtactgtgtgcttgtctagtaactcccaatactgtgtagcaggagataactgcctattttatccagcaacaatgttcctttgagaaggagctctgccaggcatttgtatatgtatatgaatatgtacatgtgtgtgtgtgtgtgtgtgtgtgtgtgtgtgtgtgtgtgtgtgtatgtattaggcccttgatcccttagagcacagtccttgtcaatccacaagtattacaggagagaaacataaacaccacacaagcaaaacaagaaaagagaatgaaactccgccagtgcatcccacaggcgggtctgacatcagcacccaaacccttgacatggttttctctacttctctccgtcctttgaagagcaatgagatgtttttagagtagcagaaacgagacgattttgtggtttgctctgacaaaggaagtggtaggtaacttgaatagatcggtggcagcgcagcaggtgtgggttctggggacaggcaaggctggaatgctggcatgtaagcttcactgaaacccttggatcgttactgtgtgcccgtgagccattcagaaactgccttgctacgtttttttgagacagggtctcatataacccgtcctgaccttcccaagtgctgggaacatgtatgttgtgacctctggcttcctggcttgctcttgatctctgctttcctctgcatcctctgacctttagtcttcctctcatcttctgtgggcactgttaagatgttcgttctaccttaaacctcaggtggattcttcctgagagcatagctatacctcttgggcaggtctgatcttttccaggagagggaaaaagagaaaataccataatctcagcttcctacatccctttctgtctttattgttttctttctttgttctcccctcaggatatttcttgaccaattattacaatttaaagggaagaaaacccaaaagtttcctttctaaagtcggcaaaaccttcttcttgtagttaaagtgaaacacctcttctaactttgtgtgcttgccctgagcacaaaggactaggagactggaaccagtgtagtccagtcaaatgttctactatagagacacatgagctgtcatttccatacagacaggccgcaccagtcagccatcgagcatctactgaatgcctgaccactcaggacagttacaagatcctatgatatgatgctagagtgatagatgccagactgagagtcaggagacctaccaattattcgacttgggggttggagatccgggcttccttgttccagggcctcagtgtccatacatacaggtggaggttagcctgggctgtgggtttcttccaactagaaaccatgatgaagcatgaagcagggggatgaattccctcatccctctttccccaggtatctccagactgtaaattttgttttgtttttgtttttgtttttgtttttgtttttgagacagggtttctctgtatagccctgtctgtcctagaacccactttgtagaccaggctggcctcgaactcagaaatccgcctgcctctgcctcccaagtgctgggattaaaggtgtgcaccaccacgcccggccagactgtaaattttgataccttcaagggcccagtgtggtccacccagatgagtggacaccttccccctggccaaaggggccacccacatgtgtccgtgtttatagcactccagtcatactttctcactcataaagtggcccaagctcttcctgcttcagggccttcacacacattggacttgctgtgtgggcttcctacaggaatggtggtggctttgtaccttcttcagatctcctcctacttcctcgaaggtcacctcttacaagtctcttaagttctttcctattatgttattttggttttggttttgtttgtttgggtatctgttctttgagttgctgggataatcattttgtctatttgggggtcccctggcaggtatatgtaggtagggtgtcttgtcttattcaggactgtacacttagccaggcatggtagttcatgtccatgatcccagttttcagagggtgccctagtactgtgagtttgagactgagttctcggtcagcctgggctagagtgagatcctgcttcaaaaattaaaaataaaagataaaattgtgggcctggagagatgggtcagcagttaagagcagttgttgctcttgcagagaaactatttcagtttccagtacctatgtcaggggttcactgatctccaacttcagctccaggggctcggacaccatcttctggcctgattgatactgtactaaattctgagagtgctgatgggctctggacttctttccagagtctccttcaagactctgagattccatttagactcagaggcttcaggcatttttattttctcattgtttgctttttctttgtctttggtgttggtttttgaggcagggtctctcaatgtggacctgacttgcctggaactcacaagcgtagggattgaagacaagagtcaccaaggccacccagtctgctccttgatagacttgtctgctttttttttttttcttttttaccttgaggggaaaaaaaggctcttatgacctcacaacatactcacctccaccatagtgacatcatgaccgcgtgatggcgtcacaaggctctcgccatcccttccagctcctcctctgaagcctcggactctgggctgtgctttcgcgcgccgatgacgtcacacccagcgctggcgtcacgtgcccccccgcgaggggtggggcttgagggcggcgcttccggtcggcggagcttggcggcccgagtggcggcggcggcggcagggtccgagtggcgggatggcgggcgccgtgagcgaggcgcgcttcgcggggctgtcgctgatgcagctgcacgagctgctggaggacgatgcacagctcggcgacatggtgcggggtatggaagaggtgagcgccttggaacggggggaaggggggtgctgggacggcgcgctggcagccagagtggggccctgacgcgagaatcgggggcaccgagggccccaggccggtttgaatctgggatcggaacctagaaccgagacatgggttctttggggccgggagagggagtgaaggcgccgagattggcttggtaggggtggaagtgactgccgctgaatctcccaaggactctagtcgaccaaagcaggtagactaggaatggatttgggaaggttttgaaaggaaaggttggaaagtcgcggggggcactgaagccagtaagagcggatcggatctgaggaccagctcgtgttgacggaccgttctaagatgggcttgtgcggagcagagatctgtagctgagtctaggatgagattctgagaaaggggtcctcgaagttcaggccacagacagccagagtaaggtgggaaggggcccagtggctgcctgctctcctaaaaggccctttcccgtgaaagtggctttgggagagttggctcaagagttccttcttttggttggtctgtgaatggtttgagcgaggatcccattccccaagcatcccggccttcttgtaaagaaaggatcgagggaattctagcatgcctgtctctgccccacagctgtctgcccacctctttgggctcctgaaattgcttctggcaacagagcaaaagggagctgactgctgaccgctcccccccccccttctctatagcctaacgccggcccagcctctggaaggcatgcagccgcccatgtttctggttatcttcctccacacctcgcctgtggtttgctaggagtgactggcttcacccttgccgatctgccctctagacttccccttttccttctctcccaactggtcctgacgctgatgttaggagtcctggggctgtctaatccagctctctgtggcccactacctcctttgtctgggaagtctaagcttccctaagcccgcagtgcttaggtttttttgcctcctgccagaagctagtattggggggggggctttctttcttttttttttttttttttttggcttgctttgcgaagaggaattgttcagcacccagccagcccccttccaagggggcttgtgagaaggttgtacgttcagaatccctggaaaaccctcaacagatcattgtctgccgctacagagaggccactgtagtaagatggtatcagggtttccattaatacaccccttgtattcacgggcttggcagcttggcacatagatccttgccctgagatgtagtttcctcagtttgtggtctccatgtggcactgtctattttcagagaataataagggaccaaaaaaaaaaaatccatctttcttgactaaatgagaattccatgcctgcacaagaaaggacagtccttgcttggcctcgctgccgtttctgagagacgttttgttggccgtgtgcagggtgtctttccagcttaataataaaatgatgggtatgcctctcagcatgtgaccctgcctgcaagctgccactttgctgtatgtgactcttctgtttcagtgagaatagctcctggagctctgtaagtggaacatctaacaacataaactcgtacttagcggagggatcgctggggagtgagtcaaatagtctgactccagcctcaccatcctccccctggaaacctagaggttggtttgtttgtttggttttctttttgagacagggtttctctgtgtagccctggctgtcctggaactcactctgtagaccagactggcttcaaactcaaagattcacctggttctgcctcccgagtgctgggattaaagggcgtgcttccttacctggcttaaaactggagcttgttagaggaagaaaaaggcaaataaatgtagcaggactcttgattttatttatttatttatttacttatttattttgagtcaaaatgtccttctaccatggatggaaatggggaggactgaccgcacctgagaagactacatagtgaagttactcagcagtagagtgtgtcgagctttaaaaacggggaagctactggaaaaccaaaatatctggtttgcacacccggtgtcctagttaggagcggtgttttccaaagggatgggtgggactccgacattgggtttttactttattttttcggttgtgaaagtttccctcccctggcccgttgtgtcacgcatttgtttattttgggttggtgtcaagagagaaagaggagtctgtgaaccatcctgaactatccactccttatgtgaaagtgttacggagctttgctttggggctttggaatgataggctgcggtggagggtggagtggacttggctgctgtcgttgctgtgtaactgtaggcagcttacagcacctctctgaacagctcttgggaagggcaggatgatgcttcgtagagatgacaagggtcggatgagatggtgacttttaaacaccgaacacagtttatggttagtgttcagtaaagagtaattgctggagctgggcggtagctctgttggcaaggtgcctactggagaagcaggaagacctgagttcaacccccagagcccacataaaaagccaggaatggtgccacacagctgtcatccgtttgtctcccccaggacagggagataggaggctccgtaaggcacactggtcagccagcctagcctagcgggggagctgcagagaccctgtcccagaaaacaaggtggactggacctggtcctgcatgctcgctctgatatgcatgttgcgttgtgtgtacccctgtgtatgactgatgagctgggagatggctcagtggttaagggccctggctgctttgccaggggacctgagtctaattcccagcacccacatggtggctcacaaccatctacaatgggcccgtgcccttttctgtcacgcaggtgtacgtgtaaatagaccactcatatcatattcataaataaatatatgtttaagaaagaaaagagactagttgatgtcaccctaacagatgaataaagttttgggtttttttttttttaattttaaagtaaatgttgacttgctgttagcctcaaacattttatctttctacagtcagaggggtcgtgtgactcagtggttcaaggaatcgttggggagtggaatgggactttcatatagcacagctgagatgaaggctggcgtgctctctctctctctctctctcagctggcagaaggacgcgtttttaaattgtagggtgaggcttctcgcagccggaggggatgttttgtggctgctgtcaagtgtggcttggtgacagccttcactgttagacttaactgctgtgggcattgtcttcactattttaattgcagagtgtgagttttagcacagctcctgggcatctgacatgatggcagtgccctctctccctctctccggccctgtgtgctttcttttttctttttgggggaaaaaaatgtgtgtgtgagtggggaggtggggaccaggactgggacagggatgggacaggttgggaaaccgacatgggggctgagacagggtctgcctgcatagctctggctgccctggaactcattttgtagaccaagcagacctagggagatccacctgcctctctggctgcgccgccatgcctggctgaatttgttttgggtacacatgggtgttgatgcaggagtggggatcagaggacgactctgaggaggaggctctctttccttcctccgtgggacaggaggttctttccttcaaagacctcaagcttgtgcaacaaagggcctttaccacctgaaccaacagtttaacaacctgttgtaaccaacagttgcaacctgtgggtctgcaccctttggaggctgaacaacccctccacaggcttcttgtaagaccatcggaatacacagatattgacatcacagttcacaacagtagcaaaactacacttaggaagtagccgtgagaataactccgtggctggaggtcactgcaaacatggggagctctgttaaatggtcgcagcgtaggaaggttgagaacgcactggcttaaaccgtcttactggcctgctttcttactttatttttacttggcagtggaatgcacccttatctgtccacatgaactcccttgactggcaaggcagtcccataaaaggaacggctgcttgggggattaggcaagtactctggacttctcgggtcgcttctccctgtgtgtcttctatgaaaaaggctgcctggtctgcggctaacggtcacagaggattccgcagctttgttcctgtgggaatgaaggtaccggcacacagacttttcagagtctgaaaagacagcgtgttttgtggaaaggaaaaaaagaactctggcctggaagaagctgcttccgtgaggcctgttgggctgtgactcgtgtgtgacagcagccactgccccagtcataatggctcattgaaatggaacgcaaaccctggactcctttggcgcgcgcgcgcgcgcacgcacacacacacacacacagagagagagagagagagaaagagagagagagagagagagagagaggctgattcactgctggtggtacttaggtttttagaaggcaagaatttgaacttgccgatgattaggcaagtggggtcacactccgtaaccctggctatcctggaactgactatataaaccaagctggtttcaaactcagagagctcctcctgcctctgcctcctgagtgctgggattaaaggtgtgaactctcacacctgggtctttctttctttctttctttctttctttctttctttctttcttcccccccccccctggtttttcaagacagggtttctctgtgtagccctggttgtcctggaactcactctgtagaccaggctggcctcaaactcagaaatccgcctgcctctgcctcccaagggcagggattaaaggcttgcgccatcattgcctggtgggttttccttttttaaatagcaatgttacaggtttatgggaagatatggtaggtaagagtcatgtgactgggtgagtgctttttaagtctgtgcccttcagttttctcagcctttagggagagtggtggtgcctgcctttttagggattttatgcaacccagagggagtggtccccagaggccacagctccctccctttcttagagcctttctgagctgatagattgaagctggctgaattgtctgaagcagctggactgtcacaaatttgagaccaaactgggctcaattgtaagagacggtctctcaaaaatgaaagagactagggtctgggcccggccagtcttgctgccccttgtggcacccgagcataagctccctcagtcaaacatgtcccttggcctcttcttttgtgtcatctgtggcatttgatagccattttataacctgctcacttccctgtggccccatggcttcatttcgtcacatgtgttttccacactgtcaccggcatggtgcctgacatacagggcatccccatcagtgccacggtgagcagtggcctggcttcagtggatgaagagtggcccggatcgagtgcggaagaggggtgcctgtagatgaaatgaggacccagttggaatgtggagctccagcagggcacctccaggacaggagcaagtgtgttaggctctggggctcctccagaccctgagatctgggacttcagccaaccttccctggggcttggaaatcaaagagcctgtaaggtttgcatgaccaccaggtaggcagtgtgtggtcagaagcaaggaggtgccatcaaatatccggaagaagttctgggaattgagtgaccccattttgatgtcttctcacggtgcttctgtctgaactggcctgaactggcctaaagtggaacctggagtgaccgtttgtacctgatctgcggtggctgtgcccctgccctaaggaaggccagctgtgttgttcatgaggccctgactgcagtatttggagtggacgttgccatggggatttgtgccagggcacacagtccaaggttatccacaaagacccggtgacagttgaccaggcagcctctggcgccgagagcgtgccgagactaaagttgtatttggctgttttcttcccggccgtcacttggaagaactctccgtagcagcaggacagaggcagaagcatagctccttgtgggatttcttcatgtagaatggaatttgaggtgtgaggtgtgctgtacttgggattgttatctctaggctacatgactaactctcacttagcaaactcagttgaccccggagtggagcttgctgtatagaccaggctggcctcaaactcacattcctgcccctgcctcccaagtgctgacgttaaaggcatgtgccacaacccctgacatttcttttttttttttttttttttaaattgacatttttatttctgtgtgtgcctgtgtggaagtcaggacagctagtgggagatggttctctgcagcatgtaggcctcagccattaaagtcagagtgctgtcatggggacatgctaagccatctggctggctacatcttttaaatcaaagcttttgttgtctccaagggttagcaagtggccgcttgaggtcatgttcatgtccatagctcagcgctcagcacggtgtagggacgcagtggcggctaattaatgtttgcctccctacagccggttcccctttgtgtgcacatagctgagttcgaggtttattcattactcaacacttgtggggatctgaaaccagtaaaagccacagttttctttttctttcttcctttttctttcttgtggggctggggatagaacccggcaccttctgaattcgagacaggctctctaccaccaaactggaccctcagccccaaggatcatgctggtacacacagctaaatccacaagacatgttttaagtactggaacttaaacacactgtagtcaggggaaacccagtgtgtttgggtcatggaggaagcctttggggcatggaggaaggtcacagagtgtttcctggctgagcgtgactgagctggaatccagaggctgagatataggtcatcaggagctaagggagtgggctctagggcctgggtggacagcaggaacaaagactccccgcagggttctggagctacaaaggcgcagtgacatagtaacatgcttgagggaccagtgctaggctgatgctagagaggcaggcaggcgggcgggtggcaccagatggccttgctggccaccagggtaaggagcttggcctgatcctctggagagccactccaggatttaagccagggagcattgcagttggctgcccttgacatttatggagatgagtctgctctgcgtggggggatgatttgggggggggggggataagatgaggaaatgtgaagatcagttaggctgggaaatcatattgaacctcaagcagccacagtagtgggcttcagggcccgaggctgtgctcccaccaagccactgggacttgctctgcccagattgggtaatagtgaactggtcgtgtgtgtctgtcagttgcatggtagagagggatatagtggaaagctaataaatgtgtgtgtgtgtgtgtgttcagcaagaaaatgacaggaaaaagggcagcatgagttttaaaaactacaaaaattgggaagtcaaccatatgtatatatgtatggatttgcttttggtaatggccggaggatgatagcatcttgctgtgtagcccaggctagcctcaaatagactctgaagtactaggactacaagttgtggctatcatatgtgggaggaaatggggagactgagacaagatttggggtgcaaggaaactttgaggcaagtttcccaaatactagtttgctcactgttaacactgaaatatcaacagtagcatcctaagacaggctccctgtcgtttgcctgttaccctagctgtggggtgctcaggttaaggctgcaggagttaaggctagacagggagacatagttgagactttttgtttaataaaagagaagcagctgtagtccaggtggcgttcatttaatccccagcatgggacccccagtgcatggaggccctgtgtggtcctagtacttgggagccggaggcaggaggatcaggctttcaggaccgtcctcagctgtatagggagattgccgccagcctggggaaagaaagaacaaaaagcatcctatgtagttatcccaaagattattaaatcagatagcctgtagaagtcagtgtggtacctggcggtgataagacagtgagcagaaaaggccttcccatcctaacacagcagtatgaggccagacccgtccttcaggcatcaattcctgtgattttaactcttgatcattacacggcccccagcaagtagagttagggaaatggtggttcatggggtggggagggactgctttgtttctttctggcagggtgaggggagtgggggggggcaaccctggctggtggggaggtggggtggggnnnnnnnnnnnnnnnnnnnnnnnnnnnnnnnnnnnnnnnnnnnnnnnnnnnnnnnnnnnnnnnnnnnnnnnnnnnnnnnnnnnnnnnnnnnnnnnnnnnnnnnnnnnnnnnnnnnnnnnnnnnnnnnnnnnnnnnnnnnnnnnnnnnnnnnnnnnnnnnnnnnnnnnnnnnnnnnnnnnnnnnnnnnnnnnnnnnnnnnnnnnnnnnnnnnnnnnnnnnnnnnnnnnnnnnnnnnnnnnnnnnnnnnnnnnnnnnnnttctggggccaggtggaaggccttgtgagttttatggactctgtttcagaagggtgggtatcgcaaactcttagaaaacccgacagatcagaaagcaccccagggttcagtgtgtcttttcaccatgtgggtccctggattagagttcagatgggcagggttggtggccacaccaccggttcccatagcatgattttcagtggctacttgacatcttctctgtgtctttgtcctaatgtgtgtattctgtgtattctgagtactcaggtaatcccctccccatgataaattctgataaatgacatttagggacttttttcccccagtgaatggttagtgttgggactgccgtgatggacttattgcagcagagggacctgtctttcagtcattgagggcgtgatccaaagacacttgtggaccctggccctgctaataccttttttgtgccccctatctctccagcctttgccttctgattttcccaccagaggcctgaggcgatgggtaagccctggtaggaactagaaacactcaactgtgagctaaaacaaggcctctttataagctgattaactctggtattttgttatagtgatggagaatcaggaatcattatggcttaggtgtctggttccctacaggagatagctaggtttttgttaagaaacttaagtagaataatctagagagcaatagtttctcattttgactaatttcttttttttttcttctaactacttacaagaaggaaaaaaaaatctcccaattagaacaggatttttctcctctatacgaaagtgagactagataatgaaagtcatgaagacggaagtcagagtgggggttagaaaggccatgtcaagactcgtgttaaagataagagggaaacatcagaagacacacaacccggggcacaccaggagagacagctttccgtttggacttcatagagaccaagctgaaagacgcccccacaccagcctcttggaagttgtgggtaagaggaaagagagcccaagaaacctccgaatcttcggtggttggcctcaaacagaaaccaccaagaaaacccagttccagggccttgcggtggcctccctcacagtcccactgctgagaggctgagagaggagggtcactcgagcccacaagtttaagaccactccgggcaacatgggagatctgttcccccacaagagagaaaaataaacgtagaagttggggtttagaacttttctttagtaagctgaattttgtgccgggtgtggacaaggggagagagtcttcggttttaaatgaccacagaagactgagagctctttttgttgaactaagtgttgcagtaagtctacatctgcctgcctttgccatcaacagaggtgactgaggggcagagagattgctcagtggctaatgccagttgacagcctgaactcgatccccagaacccacgtggtagaaagagagaactaaaccccatgctgtcctcgggtcacgtgtgtgtcctagctccttgcatatccattgtggcatggcttgtgccagtgtgacgtccccatccatttgcatttctctttgtgcaagcacgcacatacgcatgcacgcacacacatgtacacacacacctgcacagactcacacactcgcaaacattgaaagtttttaaaaggatctaagccaggcgtggtcacgtgtgtgtcattccagttacttgagaggctgttgcaggaagatttgagctcagacgttgcagacataaataagtaaataaataattccagggcttaagaggcagaggcaggctcaagcggatctctgtaagttcaaggccagcctggtctacagagtgagttccaggacagctagggctacacagagaaaccctgtctcaaaataaacagtgtgatgcccctcaccgctcctcatggtgagcctggcctctgctgctccctagccgctcatcaagggccaaatgtggttgcttctagaccttttcattctgggcttatttgcttagaaattatgcaatactctccagctggtgagctgtgcatggaaggacgagggctgcttctgtgaaggccgaactagctatgtgctttcgaaagtgctgatacaaagcgtttcactaggaaagacccagaggctcgaaggtgagcgaggtggggactggactgagaaccagtcagagcgtcccgggattctgctctcacggtctttgctcacaggaaggatgtgaccacctaaaaatgaagtggaggggctggagagatacgggctgtgggtaacagcactcctttctcttgcagaggacctgggttcagttttcagcacccacatgacagctcacaactgtctctaaatccagttccaggggatccggtgcccctttatggtctctgtgggtactgggcatacatatggtacacatgaagataaaatacccaacacaaaataaataaatctttttttttttttttttttttaatgaagaaagtggaacctttctttaatgaaaagaccttggcagctagggagataggtcagggtaaagtgcttaaaaagttccatccctagaaaccattcgtacaaagccagactcccgcaagattgccaggtagtgggcagtgtgctcttgaagcccagtgctggggagatagagatgggccagccagtgagagaccttgtcttaatttaagactgtaaagctgacacacctgaaaagagataactgtgtcctttggcttccacacacgtgtgcatgcacgcatgtgcctgcacacacacaggaaagacctttgtcttaagggggtgggggaagcacattcctgcctttgaaatggctagccagtgcatgcgggaggtaggattatgagtatggggccagcctggactacatagcgagagctatctgaaagaaaacaaaacaaccaaagtggtgtgagtgcattttagcccatctgcccagttaactgattctaattatgtgtggtgcagaatttccaggcttagcagcaaaggttgggatttcagtggtactgggaaaacacgcacacatacacactcacactcacannnnnnnnnnnnnnnnnnnnnnnnnnnnnnnnnnnnnnnnnnnnnnnnnnnnnnnnnnnnnnnnnnnnnnnnnnnnnnnnnnnnnnnnnnnnnnnnnnnnnnnnnnnnnnnnnnnnnnnnnnnnnnnnnnnnnnnnnnnnnnnnnnnnnnnnnnnnnnnnnnnnnnnnnnnnnnnnnnnnnnnnnnnnnnnnnnnnnnnnnnnnnnnnnnnnnnnnnnnnnnnnnnnnnnnnnnnnnnnnnnnnnnnnnnnnnnnnnnnnnnnnnnnnnnnnnnnnnnnnnnnnnnnnnnnnnnnnnnnnnnnnnnnnnnnnnnnnnnnnnnnnnnnnnnnnnnnnnnnnnnnnnnnnnnnnnnnnnnnnnnnnnnnnnnnnnnnnnnnnnnnnnnnnnnnnnnnnnnnnnnnnnnnnnnnnnnnnnnnnnnnnnnnnnnnnnnnnnnnnnnnnnnnnnnnnnnnnnnnnnnnnnnnnnnnnnnnnnnnnnnnnnnnnnnnnnnnnnnnnnnnnnnnnnnnnnnnnnnnnnnnnnnnnnnnnnnnnnnnnnnnnnnnnnnnnnnnnnnnnnnnnnnnnnnnnnnnnnnnnnnnnnnnnnnnnnnnnnnnnnnnnnnnnnnnnnnnnnnnnnnnnnnnnnnnnnnnnnnnnnnnnnnnnnnnnnnnnnnnnnnnnnnnnnnnnnnnnnnnnnnnnnnnnnnnnnnnnnnnnnnnnnnnnnnnnnnnnnnnnnnnnnnnnnnnnnnnnnnnnnnnnnnnnnnnnnnnnnnnnnnnnnnnnnnnnnnnnnnnnnnnnnnnnnnnnnnnnnnnnnnnnnnnnnnnnnnnnnnnnnnnnnnnnnnnnnnnnnnnnnnnnnnnnnnnnnnnnnnnnnnnnnnnnnnnnnnnnnnnnnnnnnnnnnnnnnnnnnnnnnnnnnnnnnnnnnnnnnnnnnnnnnnnnnnnnnnnnnnnnnnnnnnnnnnnnnnnnnnnnnnnnnnnnnnnnnnnnnnnnnnnnnnnnnnnnnnnnnnnnnnnnnnnnnnnnnnnnnnnnnnnnnnnnnnnnnnnnnnnnnnnnnnnnnnnnnnnnnnnnnnnnnnnnnnnnnnnnnnnnnnnnnnnnnnnnnnnnnnnnnnnnnnnnnnnnnnnnnnnnnnnnnnnnnnnnnnnnnnnnnnnnnnnnnnnnnnnnnnnnnnnnnnnnnnnnnnnnnnnnnnnnnnnnnnnnnnnnnnnnnnnnnnnnnnnnnnnnnnnnnnnnnnnnnnnnnnnnnnnnnnnnnnnnnnnnnnnnnnnnnnnnnnnnnnnnnnnnnnnnnnnnnnnnnnnnnnnnnnnnnnnnnnnnnnnnnnnnnnnnnnnnnnnnnnnnnnnnnnnnnnnnnnnnnnnnnnnnnnnnnnnnnnnnnnnnnnnnnnnnnnnnnnnnnnnnnnnnnnnnnnnnnnnnnnnnnnnnnnnnnnnnnnnnnnnnnnnnnnnnnnnnnnnnnnnnnnnnnnnnnnnnnnnnnnnnnnnnnnnnnnnnnnnnnnnnnnnnnnnnnnnnnnnnnnnnnnnnnnnnnnnnnnnnnnnnnnnnnnnnnnnnnnnnnnnnnnnnnnnnnnnnnnnnnnnnnnnnnnnnnnnnnnnnnnnnnnnnnnnnnnnnnnnnnnnnnnnnnnnnnnnnnnnnnnnnnnnnnnnnnnnnnnnnnnnnnnnnnnnnnnnnnnnnnnnnnnnnnnnnnnnnnnnnnnnnnnnnnnnnnnnnnnnnnnnnnnnnnnnnnnnnnnnnnnnnnnnnnnnnnnnnnnnnnnnnnnnnnnnnnnnnnnnnnnnnnnnnnnnnnnnnnnnnnnnnnnnnnnnnnnnnnnnnnnnnnnnnnnnnnnnnnnnnnnnnnnnnnnnnnnnnnnnnnnnnnnnnnnnnnnnnnnnnnnnnnnnnnnnnnnnnnnnnnnnnnnnnnnnnnnnnnnnnnnnnnnnnnnnnnnnnnnnnnnnnnnnnnnnnnnnnnnnnnnnnnnnnnnnnnnnnnnnnnnnnnnnnnnnnnnnnnnnnnnnnnnnnnnnnnnnnnnnnnnnnnnnnnnnnnnnnnnnnnnnnnnnnnnnnnnnnnnnnnnnnnnnnnnnnnnnnnnnnnnnnnnnnnnnnnnnnnnnnnnnnnnnnnnnnnnnnnnnnnnnnnnnnnnnnnnnnnnnnnnnnnnnnnnnnnnnnnnnnnnnnnnnnnnnnnnnnnnnnnnnnnnnnnnnnnnnnnnnnnnnnnnnnnnnnnnnnnnnnnnnnnnnnnnnnnnnnnnnnnnnnnnnnnnnnnnnnnnnnnnnnnatcttgaccatgagacgctggaggtctgggctgcttccaggtcattgtcggggctcttgggggtgcttcctgtgtgtttgctgcgtgaatgaaggaacgaacgaatgaatgagtgaccggtcacttgttagagcatgttgtgactgaccagggtgagcagttgcttgtggtttttaaaaatacacttttaattgaaatagaattacacattttcccctccccttcctgtacgtctctaatccttcccgagccccctccccctcctcagattgatagctcttgttcattagttattgttgcatactacacacacatacacacacacacatacacgtctgttttgtgtgtgtaggtttcaaggctgactaccttgtgttcgacaaccagtaagggtacccaccagtggcaggcagcttctctcgcccatcattcattatttgcctagttctttgtctaggactgggaccccgtaaagcttcttccttttgaatgaataggaaattacagtggcctcagggctgtccgataactcagctgagtgtgtgtgtgtgtgtgtgtgtccctgaccctgtgagggtgtgcaccccacttcaccttcttccatctttggtccacattgttgagtcgcagcaccagaaaaggaagagaggtcatagggactgttcagtcagttggcttcgaggaacagagcaggagcgagggtggacctcgaggacagaagaagatgccagcactgtgcccatgccctgtggtggctgcagcagctcaccacagtcctgtggcctcagagtgtatgtgtcacactgcaggagctgggagtctggcatgacgtgctgtggcccctctttcacgtcaagtggtggccacactcctccacactcagtacaagaggtggcagagaaccctgagcagggagggtctagtttggggtggggctgttcagataaaggcagctcagagccattgccaagcttggtagaagtgtggacaggtcattggggacctaggagtcacatggacaaatctagtggcatatgtcatatatgccagggataggacttgtgcttattgcccagtaatatgtttgcttgttaaataaagcaagattatgcatatgctcggcctgccgagagtggagaggtaaccaggtaaccaggttgtagctttcaagtgactcagctggatctgcattcgcatcacgtgacagggccacctgtactgttaggaatgtccagctgagccgtgctggtggcgcagcctttaatcccaggactctggaggcagaggcaggtggatctctgagttcaagcccagcctggcctacagagtgagttccaggactacacagagagaaccctgtctggaaagaccggagagagggagacatggagggcggggaggagggatatttgctcctgtagttcaggagcatgtcttgtgtaaggaggaatcagggactgcatttaggaagacacgcttataattacagacaagggagccagactctggccagcttgggtcagaatttcattttggagaagtagctggtttggatggtgtccactggaaacccaagcttttgacctggccctagccagcagggctagggagtttcccatctgtaagtgttgcatggtcagggagcttacatctgttttcttctaacagggtcattgtctaacaggtctcctcgtcctgccccatttcagacagggtgtgtagggaggtgtacactggtggaggtcacaggtgtcttctattctccatctccctctgaacacagagctcacctatcagctggcctggcaggcttgtgagctccagggtctgcctgcctctctctcacccccagtgctggagttaaacctgtgtgactgggccctgggaatctgaactcgggtcccctccggtccttactctaacccccccccccttttttttttttggtttttcaagacagggtttctctgtgtagccctggctgtcctggcactcactttgtagaccaggctggcctcaaactcagaaatccgcctgcctctgcctcccaagtgcaccaccacacccggctccaacccccatttttaaagagagatactctcttttcctggggtgtttgccttctgttgtactgacatcagaaataccttttttaatgtaaggaaataactttttccctgtagaattaattatatgattgttaaaatgaatcaagtgattgaaaaaaaaatcaagtggaagctcaaagaagaaagtttggaagtgaactgattccgtgagttcaggctggccatgttaactaactctgggcagatgtcctagtcggccctcgttagacccctgggcagaaatagccatgcaaatggggcctgataaatgtgtcacacaccgctcagtttccataagaggaaaagaaagctaaagtgaaacccagagcttttacagaaatggctctttaccacagagaaattatttcctgaaaagattgctctatggtttaaaaaaacaaaaaaaaggaccgtgggaaaagatcaaggaatcaggccaccgccagcctcggttcccacgcgtgccctcgcctgtcatggggatgaggatgtgaacagcttggaatcctttcaagcctgacgtttgctaaagtggacttccctctgctctcggagcctttgctgggccagtggccctgctgagcttcccctgtccctgtccctgccaaagttacaaaagctaagaatggaaggtcagttagcccgaggcattcccgacccttgccttggctgccgttgccctcctggaggttgaggaggttctctgggtggccatttaggacttgttgtcatttgttcttattttttaaaaaaaccatctgccggcccaaagggcatataaaaaaatataccctgtttaacagcctggccatcatcattgggagtttgtttggtttcttttattggtgggtggctttgactttatgaatcccatcagatgactgcctgattctcagcacaggcttccctgtgttttcctccaggactttgtgctatgtagggcaagtggtcctgacttggaccctgtgggaacaagatatttttgtattcgcattttatagagaaaccaaagtggtgtgtctcagtttagctgcgtgctggactcccctgagactttggggaaaaagtccttgcctgggccccatccaggcagttggctagtaggtggttggtctggattggggtggggggggtgcggtgcccagagcctcatacatgctagagaggtgctctgctactgagctgtgccccagactacaagcacctagcttttcagcacccactttaaggagcattctgatgggtaactgctgtattctgatgggtagccgctgtattctgatggtagccgatgggtatcggctgttgtgaagccacctttaacaatgcccaggcaagtgctcgcatgtctcctttcccacgcccacctcaggaccacgaggctactgtgttgcttctgctttggaaactatccaccgagtgtgaccccacgtgcctgagataggcttagactcaggtgacattcctcgagagcccattgagtgctccgtgttccttgacaacagctcgctttctctgagtccgtatcttgttacccttggcgtttttgggtgatggtggggatgagacccagatccttgcacatgattgacaagcaccctggagccccgccccgttctttggtggagaatctgcctcagatggtttttggttttgttttctcgggggggggggggtgtgcgttggtggagcagatctcaccactgagtggtctctgtgggggggggcctgttgtgccaagcacgatctaagagcttggattttgatggggctcgccagacggtgagcaagaagagacatttcttattgttgagagtggagagcgatggcggtgggtgcctgtgagcttattagctcagggcggtcagggaggcctcagagtaaagaacaggtccagctccatctcagccagcgggagcagggcaagagcggcctaggatatggctacagaggatacggctacagaggacatggctacagaggacacagctacagaggactctgctccactttgagcgttcctgtacctgtgagtttcctctgcctgcctcaggcctggaaggtagtggcttgtcatcagtggtgtgggacagagcattgcagtcccaatgttgccgtttacagcgtgagtgtggtgcttcacagtgtgttgacctcagtacttgggaagttgaggcaggacgattgtgaatttagggctagcctggcctacacagtgggaacccatctggaaacacacagtcataagaacggtgcagagccagcagcgggctgggagctggagccaccgcctggtcctggccttggccttgatccccgccccccaacttgtgaggccacagcagttcctttccttctgactaagcttggtttaggcataagcgtcggaagagatgttagacacgagacacggctcctgtgtcctctttatctcatcccccagtggtaggacctggtaaagttctaacacattacactcacaaccaagggctggaccctgatcccgacaggacatagaacagagactctgtccccagttagaggctgtgtactcacagcccctccctgctccgcacaaacctctttctctccatcttgctatctgagaccactgcatgcatggaatcagatctatggcccttcagggttggctttcttcacaccctgtgattccatggggttttctttgagtttttggtgtctgagtcctgctctaagaatacactgtagctgtcttcagacacacctaaagaccccattacagatggtcatgagccaccatgtggttgctgggaattgaactcaggacctttagaagagcagtcagtgctcttaacctctgggccatctctccggcctcctgctcttccttttaattgccaactagcatttcatggtatacattcactgccgctgcactgttctcgtagtaaaagatatgcggcttgctgcaagttacagagtattgttactgggaaatttaagtgtagggggcttgcatgtgtgtgtagaggagattttgtttctctggaggaatgcccatgcgtacagcttctggggcaaattgtagttccaggttcagttttataaggcctgcctgccagagtggctatacacaggttgcttggtttcttcctctcagcagcttaacaatggaaggaaagactcatggggccatcggtccacagagcccacaaatagctcagggcagctctggagcagatgggccacgggagtctccctgccccccaggaaccctccttagacttcagtcgtcctccctgcttgcttgccaggtcctccctgcttgcttcagcagcagagagaaatgaaagtgtctccatgcccccagccatgggcctgtgtcaggctcgtgtttgacggtgttgagctgtgggggggttaagtggctttgtgactgaggtcctcaatggttggtttcagcagagtgtggtctttagggcctgtgtatcggctaaacaaatgcctcgggcacaatcaggtactcagtattcaagggttcccttggtctccactgtgtgtgtcccaagagtgaggacgctggagctgttgagggtacggtgggaggtgggaggtgggggaacagaggactatatacagaatacagagaggaaggaagtcgtagcaaaaatagcctgggtggggtgcagaaaaatattaaagggaaaatgaacggctgggcagggatgaagagctgctgctgaaaaaggggctgtctgttgcgtcgcctggggcgagggctgaacttaaagcgcagaaatcgaggtaatggtggacaggccttgtagaggaagttgtcccgagtgacaatcaggaaccagaaggcagatgttcatgttttttctctttgaacccgagtggccaatctttgtccctgtcacagacctccctctctaagcccccctacagccagccttcaatccctgtctgagggccttgagttgatgaggggactgttgttctgcacagtcaactcctctccttttgggggtcagctgtactgatggggacgacgcaggagagctgctaatgggcgggcgggtgggagtgagaaagatggagaagcggtcactgtaaacataactccctctctgggccccggctgggctcttttgatctgaggctgactatggagcacacattggcatcctgccggccaagcagcctctgatgaaagtggctgtgatttcctctgcagcggcggagcctgcctgaacagcccagccctttgcctttacagatgtttgcttttgccagtacagcagcagctgtgcaggattccaagccacagtgcatcattgaagccaaagcccagtgcgctgccatcgggagggagggaatctggccgcatcctttgtgaatggggagagtgctcagaaagaaggtggaggggcaggactctctgcttagcttgtctgcccagcctgtaggccttctgggagaccagggagggcgtggccttccgggtgccccccacgcagaacttgcctgagaactaacacaccgactccccccccccccgcccccatctcatcagcccgtgtgtttcttgcaggcgcagacggttcagcttaacaaagagatgaccctggctagcaaccggagcctggcagagggaaaccttctgtaccagccccaactggatgctcagaaagctcgcctgacccaaaaataccaggaactccaggttctctttgaggcctatcagataaagaagaccaaactaggtaacattttttttcaggtgatctttgagattaaagagttgaaggaagactgagcagtgatggcgaaagcctttatttagtcccagcactcgggaggcagaggcaggtggatctcttaatacaaggccagcctggtctacagccaggggtatacagagaaaccctgtcttaactgaaaagagttgaagtaagcgtacagagttcaaaggtctccctaccaggaaaatgacatgaaaaagtctcaggtcacattagtgactgccgtgacaagcaatagtttgtatatagaacacactgctggtttagggaagaaaccactttctaaatccacgactccgcctgctccagagagtacagcagaaatcttctgaactggggtagtcagctgacacttcagaagagccttatcgccggaacattgtgcagaagtgtcagagctcacttcatctgtatacaaagatagaaggactgagtgtgtatgtggtgcggtacgtgtgtgctgtcagtgtgtatggtatagttgtgactgtggtatgtgtagcctattcgtgtgtgttgagtgtgtagtatatgtgtatatgggggtgaatgtgtgtgtgtgtgtgtgtgtgtgtaggggagtacgtggtatgtctgagtgtgtgtgtggtgtgtggtatatctgtgagagtgtatgtggggtgtgtgtgggaggtgtatagtgcatgagtgagtgtgttgggagagagtggtggtgtgctgtgtgtgtcagccctggttgggcttgaactgaactttgtagcagcagacgacccttcctgcctctgcctcctaagtgctgggattgcgagtgtaaagcagcagggcctcagggctgaggctgaggctgaggctgttcatggagcgtttagattgagagaccttggggcagagagagagacagagacagagacagagagacaaaccgactgacttgtgggcctagagagatgtggctcagtgattaagggcatcatctgtttttctggagacccaagattcagttcccagcccccactcggcagctcacaactgccttgatccagttccagaggctcaaaccgccctcacgcagacatcaatgcaagcaaaataccaatgtacataaaatacaagtaaaacaatttcttctttttttttttttccttttttctttttttgagacagggtttctctgtgtagcgctggctgtcctggaactcactctgtagaccaggttggcctcgaactcagaaatccgcctgtctctgcctcccgagtgctgggattaaaggtatatgccaccactgcctggcaaataaaactatttcttaagacgaaacaaaggggaaaaagaaaacttgtgggagtcggctgtgttgtcgttcagcgcttgggaggcagaggcaggtagatctttgtgagttggaggccaaccagggctacaagaacgaccccttctgaagaaacaaccaaaaaaggacacactgtctgaactggagagatggctcgggttgagtgcctgctattcctctagaggccccaaggactgttttcagctcccacacaggcagcccacagctggctggatctggtgtctcctgctggaaccagcacatactcgcagaaagacacagattaaaacacctcgggtggtggcacacacctttaatcccagcactcacaaggcagcctggagatctctgatttctaggccagcctggtctacagagtgaattccagggcagccatagttattagagagaccctgtctcaaaaattaaacccacaaaacctcaaatcaccttatatgaggtttgcagcaactgtttactccagtcctcttggtccctataacgtccttacagttcctgacacccacccagattgtaagaaaaagaacgttaaagatttgaataccaagtgctggtgctggcaccaccttggaaggcttcttagccaggtcttctaatgcccagggcatgtcctgtgactcagggccacctgggcctgtccccagtggaaggagacactgtgtctgcgaggagacaagtacaaacagtggttgattgagtggttttatttgtttgtttgtttgtttgttttttacaatgattaagttgaagaataattgacgtgttcatctgcagagtgcaggctggggtggaatggcagctttgaaaagaaagaagtctcaggtatatctctaccatggcagggagatgctgagcgagaggctggcaggcagtgtcgcatccacgctgtaaaggccagccttgagggtgagaaggcaagatggagcctctaggaatgtctcatccagcctggcctggtgggatattgctggagatttattcatgtggtgtttttacttaagattgattttgatgtaggtgtctgtgagtgtatgttacctggcgtgggtgctaggaactgaacccaggtcctgtgagccttctctccaacccctcacgctgtttgaatctaagaccccaaggcttcaggtgtgtgtgtgtgttggatgaagttatcgctcaaaaggaggacgtgctaagggaaagtggctgagaaaagaagtgggaaatgcacggttggatggtgacaggcctgcaggtgcagccgcaggtggattgcaaggttcaggtctacccgaccatgccatcagattgtacagaacataagaactgggtacgttgtggatagaactcaggggcaggcttcctgccttacacttgtggagcccccgtccagtccttccttagtactggggaaagcctgtgtgactagtgatggggtcacatatgggacaactctgtggacagatgatgctgtgccgccctaaggtgagatgctggtgtgctctgatcctacaacttgccccttctggctcctctggtgtgtttaaagctctcctttcagcttcccagaaagttcattttctggtaggcatctggtaggacgtgcagcctcatgccgtcatattttttactgttttccagataaacagtctaacaacgcttccttggagactctgttagcgcttcttcaagcggaaggggccaagattgaggaggacactgaggtaaggcctgacagccctagtggccgccctccacatggctggactcttaggtcaccctgttcagtccctgtcctccaggacatgggagccccacagctccacagccagccagcggcacttccaacacacagaggcctggatgcacgtggccatcttggcctctggctagggaacgtgctaggccgggatcaagcggttcagctggggcctgggtgtggatgctcatgctgccctgaactaatgccagcctcttgggtgctagtgtctgcggcgtctgctgtggtcaacgaggcagctaatcgctgctgctacacgtggctggctgaatccagggctggagccttgtgaggggaggaaatgagtcagggtcacctgtatgtatgccttagcaagtcagggctggctacacattgccaggtcaggctggctttgtctgactaacccattaggcctcggcaggccccgatagccacaagtagggttcttgcctgcgaactctgttcagggtgagtcactggtcggcttgcagccaggtggaaaccagagggcagggtctgggccgtggcaatctctcaagagtgagagagctgggaagctcagaaccatgttgtcataagtaaggcatggccttgccaggcctgccatctgtctgtcgtggctctgcgaggtgacggctcctgccagcatcacccaggcccataggtcagcagctctgagcatgtggcagaagacaggcacccaggagtgctcgcaggagaaaggggtactacagggatctgagagcctctttccctttgcctgggctgtgaagggagccttcttcctaacagttggcctatcttataacctgctttctcctgcctcttgtagaacatggcagagaagtttctggatggagagcttcctctagattcctttattgatgtctaccagagcaagcggaagctggcgcacatgcgccgtgtgaaagtggagaagctccaggagctggtgctgaagggacagagacacccgcaggccggggccccgccaccacccagggtgcctgagccctcacctgccaccgcccttccctacccctctctggaggccactgggctcccttctgtcgtgcctcggcgtattcccccccctccacccccggtgcctgcaggacacgtagccacccctttcgctgctgccatgggctcgggacaggtttctgcatacccgggattacagtgcccacccctgcctcccagagtgggcctcccctctcagcaaggattctccgcacagttggtgtcaccgtacccaccagccctgccccagagaccccctccacggatggccccacaccagccaggcttcatcctgcagtgagctcgggtgcctgctcttcctgcaagacatcctctgcctgccgtgccgagctctgcaaacagaggctgtgcggttcagcatctgggccaagggcttgggtgccctgggtcagcgtgcccacctgattttagaactgtaggtccgtggtaagtaagagagcaggttctgtgcaccaagggagcgctgtttgtgccaggccagtctgcatcacctcaatctgtgttgggtgtgatttctgagtgtctcgggctgatggacttgtgcatttggaaagattacccccacccccaggttagaatcctggctctcctgttgcagctttatttaataagcatgattaattatatgttttattttcgagtcttggcccaccagctgccgtggcgctagtaaagactggtctcagctggccagcctggaatgtgtgcccacggccaggccctgctgggcagctgtgctgttcaccgagtgtgcagggcaggccagcccagtaacctcccactcctgccatgctgggtgctctcatggttcaaagccacaggcagagtttgcacttggctgctgtgaggtgtgcagaggccaggcgaactgtggcccggggtgcgaggccagtgtgagccctcagccctccccacacacctcaagccgcgtcacggtttctgt

SEQ ID NO: 1725 - DNA, 1474 bp, Mus musculus
tgaaaaaggggctgtctgttgcgtcgcctggggcgagggctgaacttaaagcgcagaaatcgaggcgcagacggttcagcttaacaaagagatgaccctggctagcaaccggagcctggcagagggaaaccttctgtaccagccccaactggatgctcagaaagctcgcctgacccaaaaataccaggaactccaggttctctttgaggcctatcagataaagaagaccaaactagataaacagtctaacaacgcttccttggagactctgttagcgcttcttcaagcggaaggggccaagattgaggaggacactgagaacatggcagagaagtttctggatggagagcttcctctagattcctttattgatgtctaccagagcaagcggaagctggcgcacatgcgccgtgtgaaagtggagaagctccaggagctggtgctgaagggacagagacacccgcaggccggggccccgccaccacccagggtgcctgagccctcacctgccaccgcccttccctacccctctctggaggccactgggctcccttctgtcgtgcctcggcgtattcccccccctccacccccggtgcctgcaggacacgtagccacccctttcgctgctgccatgggctcgggacaggtttctgcatacccgggattacagtgcccacccctgcctcccagagtgggcctcccctctcagcaaggattctccgcacagttggtgtcaccgtacccaccagccctgccccagagaccccctccacggatggccccacaccagccaggcttcatcctgcagtgagctcgggtgcctgctcttcctgcaagacatcctctgcctgccgtgccgagctctgcaaacagaggctgtgcggttcagcatctgggccaagggcttgggtgccctgggtcagcgtgcccacctgattttagaactgtaggtccgtggtaagtaagagagcaggttctgtgcaccaagggagcgctgtttgtgccaggccagtctgcatcacctcaatctgtgttgggtgtgatttctgagtgtctcgggctgatggacttgtgcatttggaaagattacccccacccccaggttagaatcctggctctcctgttgcagctttatttaataagcatgattaattatatgttttattttcgagtcttggcccaccagctgccgtggcgctagtaaagactggtctcagctggccagcctggaatgtgtgcccacggccaggccctgctgggcagctgtgctgttcaccgagtgtgcagggcaggccagcccagtaacctcccactcctgccatgctgggtgctctcatggttcaaagccacaggcagagtttgcacttggctgctgtgaggtgtgcagaggccaggcgaactgtggcccggggtgcgaggccagtgtgagccctcagccctccccacacacctcaagccgcgtcacggtttctgt

SEQ ID NO: 1726 - protein, 237 aa, Mus musculus
MTLNRSLAEGNLLYQPQLDAQKARLTQKYQELQVLFEAYQIKKTKLDKQSNNASLETLLALLQAEGAKIEEDTENMAEKFLDGELPLDSFIDVYQSKRKLAHMRRVKVEKLQELVLKGQRHPQAGAPPPPRVPEPSPATALPYPSLEATGLPSVVPRRIPPPPPPVPAGHVATPFAAAMGSGQVSAYPGLQCPPLPPRVGLPSQQGFSAQLVSPYPPALPQRPPPRMAPHQPGFILQ

SEQ ID NO: 1727 - DNA, 1554 bp, Mus musculus
tggcggcggcggcggcagggtccgagtggcgggatggcgggcgccgtgagcgaggcgcgcttcgcggggctgtcgctgatgcagctgcacgagctgctggaggacgatgcacagctcggcgacatggtgcggggtatggaagaggcgcagacggttcagcttaacaaagagatgaccctggctagcaaccggagcctggcagagggaaaccttctgtaccagccccaactggatgctcagaaagctcgcctgacccaaaaataccaggaactccaggttctctttgaggcctatcagataaagaagaccaaactagataaacagtctaacaacgcttccttggagactctgttagcgcttcttcaagcggaaggggccaagattgaggaggacactgagaacatggcagagaagtttctggatggagagcttcctctagattcctttattgatgtctaccagagcaagcggaagctggcgcacatgcgccgtgtgaaagtggagaagctccaggagctggtgctgaagggacagagacacccgcaggccggggccccgccaccacccagggtgcctgagccctcacctgccaccgcccttccctacccctctctggaggccactgggctcccttctgtcgtgcctcggcgtattcccccccctccacccccggtgcctgcaggacacgtagccacccctttcgctgctgccatgggctcgggacaggtttctgcatacccgggattacagtgcccacccctgcctcccagagtgggcctcccctctcagcaaggattctccgcacagttggtgtcaccgtacccaccagccctgccccagagaccccctccacggatggccccacaccagccaggcttcatcctgcagtgagctcgggtgcctgctcttcctgcaagacatcctctgcctgccgtgccgagctctgcaaacagaggctgtgcggttcagcatctgggccaagggcttgggtgccctgggtcagcgtgcccacctgattttagaactgtaggtccgtggtaagtaagagagcaggttctgtgcaccaagggagcgctgtttgtgccaggccagtctgcatcacctcaatctgtgttgggtgtgatttctgagtgtctcgggctgatggacttgtgcatttggaaagattacccccacccccaggttagaatcctggctctcctgttgcagctttatttaataagcatgattaattatatgttttattttcgagtcttggcccaccagctgccgtggcgctagtaaagactggtctcagctggccagcctggaatgtgtgcccacggccaggccctgctgggcagctgtgctgttcaccgagtgtgcagggcaggccagcccagtaacctcccactcctgccatgctgggtgctctcatggttcaaagccacaggcagagtttgcacttggctgctgtgaggtgtgcagaggccaggcgaactgtggcccggggtgcgaggccagtgtgagccctcagccctccccacacacctcaagccgcgtcacggtttctgt

SEQ ID NO: 1728 - protein, 294 aa, Mus musculus
WRRRRQGPSGGMAGAVSEARFAGLSLMQLHELLEDDAQLGDMVRGMEEAQTVQLNKEMTLNRSLAEGNLLYQPQLDAQKARLTQKYQELQVLFEAYQIKKTKLDKQSNNASLETLLALLQAEGAKIEEDTENMAEKFLDGELPLDSFIDVYQSKRKLAHMRRVKVEKLQELVLKGQRHPQAGAPPPPRVPEPSPATALPYPSLEATGLPSVVPRRIPPPPPPVPAGHVATPFAAAMGSGQVSAYPGLQCPPLPPRVGLPSQQGFSAQLVSPYPPALPQRPPPRMAPHQPGFILQ

SEQ ID NO: 1729 - DNA, 2019 bp, Mus musculus
cgggctcccagtggctttggatggtaagaaaggaggaagctgggcctttaaattgctgagtcacctgggcagtgccaacagccacctcagaggatgacgatggcagtcctcatgatcactgtagcacctcaattgagagactgagatcggtcattcagcaagcatttcctgagtgcctgctgtataccaaacacgtggcaggtcaggagaatctccagtctgaggtaatgagatccgaaaggtgacgtgaggagccaagactgaaggtattcaagagagagagacactactgagctgggctgtctgaggaggtgacaaatgacttcagacctgaatgacagtttagaagttcctgaagaagtggagcgtgccagctgggggtgcagctcggtggccatgtgacctaaggagctctgttctagatgtttacccggaagaaatggaaacatctgcagaaatccacacacgcattcctacatctgccggaagagctacaagctctgcaaatgctgagatgacaggaacaagctaccatacctggcttcaaattggacagcatttatgaatattcctaccagtgaccactgaagagaaagaattttgcctaaggcgcagacggttcagcttaacaaagagatgaccctggctagcaaccggagcctggcagagggaaaccttctgtaccagccccaactggatgctcagaaagctcgcctgacccaaaaataccaggaactccaggttctctttgaggcctatcagataaagaagaccaaactagataaacagtctaacaacgcttccttggagactctgttagcgcttcttcaagcggaaggggccaagattgaggaggacactgagaacatggcagagaagtttctggatggagagcttcctctagattcctttattgatgtctaccagagcaagcggaagctggcgcacatgcgccgtgtgaaagtggagaagctccaggagctggtgctgaagggacagagacacccgcaggccggggccccgccaccacccagggtgcctgagccctcacctgccaccgcccttccctacccctctctggaggccactgggctcccttctgtcgtgcctcggcgtattcccccccctccacccccggtgcctgcaggacacgtagccacccctttcgctgctgccatgggctcgggacaggtttctgcatacccgggattacagtgcccacccctgcctcccagagtgggcctcccctctcagcaaggattctccgcacagttggtgtcaccgtacccaccagccctgccccagagaccccctccacggatggccccacaccagccaggcttcatcctgcagtgagctcgggtgcctgctcttcctgcaagacatcctctgcctgccgtgccgagctctgcaaacagaggctgtgcggttcagcatctgggccaagggcttgggtgccctgggtcagcgtgcccacctgattttagaactgtaggtccgtggtaagtaagagagcaggttctgtgcaccaagggagcgctgtttgtgccaggccagtctgcatcacctcaatctgtgttgggtgtgatttctgagtgtctcgggctgatggacttgtgcatttggaaagattacccccacccccaggttagaatcctggctctcctgttgcagctttatttaataagcatgattaattatatgttttattttcgagtcttggcccaccagctgccgtggcgctagtaaagactggtctcagctggccagcctggaatgtgtgcccacggccaggccctgctgggcagctgtgctgttcaccgagtgtgcagggcaggccagcccagtaacctcccactcctgccatgctgggtgctctcatggttcaaagccacaggcagagtttgcacttggctgctgtgaggtgtgcagaggccaggcgaactgtggcccggggtgcgaggccagtgtgagccctcagccctccccacacacctcaagccgcgtcacggtttctgt

SEQ ID NO: 1730 - protein, 237 aa, Mus musculus; identical to SEQ ID NO: 1726
